United States Patent Application Publication US 2013/0096032 A1 - sequence listing, part 25

SEQ ID NO: 834 - DNA, 67720 bp, Arabidopsis thaliana
gccaggattttggtaagatgtgctaattttcatcaggcttgttaaaggtttgagatcactttgctcaaggtttgagacacctgaaagacccgggatttcagctagaagattcaaaagctctctgtagtttggcttaacaatggaaagtggtaattctattataccagtcccctgtagattcagtgtctcaatatttgggggaatttctgggaaacttttgatctctgtgcaacctgagagatttacaactcgtaaatgtagcaattgaccggtggctgggaaactctgcagtcttgtacagccttggagatcaactacctcaagattttgagcttttaaaagatcgtcaatatcaactagttgttgggaatgacaaagcctgattgtcttcaacatctccaggtcctacgaaaaaaaatgtcaaaaaaagaattacaaaatctgtctttgagtatagataacggcgaaaaacgcatatttgagattgcttaccttggttccaccccaaagtttcttaagttggctgtacggcatgttgatttcaacaaggtgtataggatcaaaattttgaggcagaaactgcagaggatagttctcccaatgcaggagtcttagcacattaggaagagaactgagagagcctttgaggaaattgtttacatgatggacttcaggattggaactgtaaatcttgaacaatctaaggttcaacatattatcaaaggcaacatgcttaatatcaaaacttaagtttgatgtgtccagaaacatgccttcgatctcttcagggacctgaaagaatattggaagtggattatagtaggatgttggctcataaaataggttcaatataaaactattaaatgataacagacctgagcacgttcaaaagttgttttttgttcttcattttcgttttgttccttatcttctaataaatatttgatgctgcaaggttcccacagtctgctgcgcctcttagtctgtcttgtttctctatttattatttgtcggccaacatcttggatcaagttatgcatccgcactcggttttctgaaatagtcaccagactcttctccacaagaacatcaattccaacatgtggaaagaaaccacaaccctcaagcagttgcatcacgtagtcaacattttctccctggaagaaacaagctatgtccaaaaaaatgtttttttccctgtcattgagtgtgtcatacgagctcttgattgcatcaacaaaaatagctggaggacattccttgagtttgaggaatgctatctccatttctggtggtcttttcttccccatcagttctctgccatagagattgagagctaatggatggccattagcatatttaataactttcattgacacctcgtggagattctgctctgccatatcgtctatagacgcacacaaagagaagagttgaagagcctctttctcatttaaaccctgaacctcgtatatttgattgactcgacaaaggcgaaacaccgatttatctttggaggttatgatgattagacttttgggaccaaaccagtcaaaccctccaagaaaagactccacaaccagaggactgcggacatcatcaagaacaacaagaaccctcttattgtttaatctatccctaagcaagctcaatttcgtaacggtaccactagcaccagcattttctttcaaaaactgttcctccagcaaacaataaacacccttctcttgaatagctttggtgtagtcttcaataaagcaatgagcatcaaactcaccagacatttggtcaaagactgctttagcaagtgtagtcttgcctatgccaggcataccccaaattccaacacaacggatgtccaacggttgcttgttaatcattttctcaatctccagcagcttcgaatatattccaattcgttccatataaaagagcttctcatacacatctctaacagtctcttttacaagctgggagtcactacattctttcctgcgtcatatttgttcaagaaaaagaaatgcacttcatagaaacactacacataaacttgaaactgaaattgtaatgcactttttaagatttagagcttatgatctcagttttaactctgttaggtattaacatgactacacatgaacttcaatggaagaattcactgatcaacacaaacaaggtagtgaaagacacttgctctgcgattcatatataactgtgaatagcttcacagaagaagatagtttatgaatacctggaatggtgtactgatgagaatcctttcgaatccagcgcgctaagccattcggtctctgatgatctgacaccgtacaacaccggaaccaccacttgatctttgttcttctggcaatcgagaaccttcacgagcttgtcaagagataccgtacggtttcctggtaaaatcataacagaaaccctagctctctcgaccattgattgagactcgttggaaagcgaatcatcgctatcgatgaagacatcgtttacaccttttcgctggagagctttggagaggtggctgacgaaggagtatcgtacctcctctatgcagctgatgtagacgatttgctcactctcggtcattattttagaaactgtgcgtctgggtcgcacccgaaaccaactctctaaaacgattgtggtccctaagcactgaagttggccaatggtagtcgcactccattctcaagtcaaccattctcaaacagttgttgagggagaaggagaaccactcaattcctagctaaaaacgtcaacagttggaaaagtaaacttattagatgattcaacttgcaaattgtctgccttgtctcccatggcggcctcctcttcctccaccggtctcccaccacaacatcaagtattcatcaatttccgtggagaagatttacgactcggattcgtaagccatctagtagaagctttagaaaacgataacataaaagtcttcatcgacaactacgcagacaaaggcgaacctttagaaacacttttaaccaagatacatgactccaaaatcgctctagctatcttctccgggaagtacactgaatcaacatggtgcttgagagagctagcgatgataaaagattgtgtggagaaaggtaaacttgttgctattcctatcttctacaaggtagatccatccactgttagaggtgttagagggcagttcggtgatgcttttagagatcttgaggaacgtgatgtgattaagaagaaagagtggaaacaagctttgaagtggattcctggcttaattggtatcactgttcacgataaaaggtagctgcttttgctctattggtttgagtattaacccaaaagcttgaacctttagtgattacaattgttagataagtttaggaacctttcatggtcatgatcttattttcctcatttgagtgaattaaccaaaagcttgaccctttagtattagagttgctagataagtttaggaacctttcatgggaatctaggaaagtcatgttgatcttatttttctcatttgtattgtagtcctgagagtgaaatactcaacgaaatcgttaaggaggttaagaaagtgttgaagaaagtttcattggagggaagccaaaaggtggtctctgtggatccatcacaaagtattgacactctaagttcggtaggaggtgaaaaggataagacttttggaatcaaacaacggttgaaggagttggaagagaagttggatcttgttaaatacaagggaactcgtgtcattggagttgttgggatgcctggaattggcaaaaccacactggtgaaagagctctataagacctggcagggcaagttttcgaggtatgcgttgatcgatcaaatccgtgggaagtcaaataacttcaggttagagtgcttgcctactttgcttttagagaagctactaccggagttgaataatcctcaactagatagtattgaagaaccatacaaaactcataagggtctactgcgtgaacgcaaagttctcgtcgtccttgatgatgttagtagaagggaacaaatatatgctcttcttgggaaatatgatcttcacagtaaacatgagtggatcaaagatggcagcaggatcatcattgcaacgaacgatatctcctcattgaagggtctcgttcatgacacttatgtggttcggcaattaaaccacagagacggcttacaactttttcgctatcacgcctttcattatgatcaagccactcctccaaaggtggatttcatgaagctttctgatgagtttgtgcattatgctagaggccatccactagctctcaaaatattgggtagagagctttatgagaaaaatatgaagcattgggaaacaaaactgataatacttgctcaaagtcccaccacttatattggagaagtcgtgcaagtaagttatgatgaattgagtttggcgcagaaagatgcatttctcgacatagcttgtttcagatcacaggatgtggattatgtagaaagtttactggtttcgtctgaccctggatctgctgaagcaataaaagctctcaagaataagttcttgattgatacatgtgacggccgtgtggagatgcatgatctactgtatagattttctagggaacttgatcttaaagcatccactcaaggtggtagcaaacaacgaaggttatgggtccgtcaagacataattaatgtacagcagaaaacaatggtgaaagtagaagttcctctatatttttattgatcaaagctcacattgtttttctcttcgctaatattgttctgttattgttgttatatattattaacagggagctgcaaatgttagaggtattttcctagatttgtctgaagtgaaggttgaaacaagcttagaccgtgaacacttcaagaatatgcgcaatctccggtatctcaagttatacaattcacattgccctcacgaatgtctaaccaataataagataaacatgcctgatggacttgagctaccattgaaagaggttcgatgccttcactggctgaaattcccattagaggaacttccaaacgattttgacccgattaatctcgtcgaccttaagctgccatacagtgagattgaacgactttgggatggtgttaaggtgtgtctctttataaaatgttttgttgcctttttgcgttaaatgaacctgtgtagcttttctaactagttgctaaaaaaaatactgttcaggatacaccagtcttaaaatgggtcgatctcaatcactcaagtaagttgtgcagcttgtcaggattatcaaaggctcaaaatcttcaaagactgaaccttgaagggtgcacaagtcttgaatctcttcgagatgtgaatttgacgtctttgaaaactctcaccctcagcaactgctcaaacttcaaggaatttccattgattccagaaaatttaaaagctttatacttggacgggacatcgataagtcaacttcctgacaacgtggggaacctcaaaagacttgtcttattgaatatgaaggactgcaaagtgctggagactatccctacctgtgttagtgagctgaaaactcttcaaaaacttgtactttcaggttgttcaaagctcaaggaatttccagaaatcaacaagagctctttaaaaattttacttctagatgggacatccatcaaaacgatgccgcagttaccctcagtacagtatttatgcttaagcagaaatgatcatctcatctaccttccagctggcatcaatcaagtttctcagttaacacggctggatttgaagtattgtacgaagcttacatatgttccagagttgccaccaactctccagtacttagatgcacatggctgtagctcactgaagaatgttgcaaaaccactggcccgtatcatgtcaaccgtgcagaaccattacactttcaatttcaccaactgtggtaacctggagcaagctgcaaaggaggaaatcacatcgtatgctcaaagaaaatgtcagttgctgtcagatgcacgtaaacactacaatgaggtttctctcaatattctaactctatctcctgtcgctctctgaacctgtctctgattcttatatttcaggaaactccacaaaaatgattttctttataatttgtcagggttcagaggctttgttcagcacttgctttcctggatgtgaggtgccttcgtggtttggtcatgaagcggttggatctctgttgcaaagaaaactcctcccacattggcatgacaagaggctttctggaatagctctatgtgctgtagtctcatttcctgacagccaagatcaactcagctgcttctcggtgacatgcacctttaaaataaaagctgaagacaagtcttgggtcccctttacttgcccggtaggaatttggactagagagggaaacaagaaagacaggattgagtcggatcatgttttcatagcctacattagtagcccacattcaataaggtgtctcgaagagaagaactctgataaatgcaattttagtgaagcctcccttgagtttacggtgacaagtgatacaagtggtattggagtattcaaggttttgaagtgtggattgagtttggtgtatgaaaatgacaaaaacaaaaacagttctcttgaggcaaagtatgatgttcctgttgaagtgagctttcaagaaccagaacacgggataatggaggaggagagatatataaacaaaagaagaagtgatgatagacgaccaaaaaagaagaggaagacaaaaagggatgatattatgataatatccactgtcactcaaacttgtgttccaagtgtaaatgcaagaatagaagataaagtcactggttaagcaaatggttgaaaaatctccaaggtgggatgaatatggttcaggtgaaccagattcttacaaaacacgctacctagtatttaagatgatcctgtactggtaaattttggttcatggtggtgtatcatcagagagggatactttggtggagcaaatccttctggagcaattggtgttctttttgctctgtgtgcaaagctaaatgtgtcaaccaaaatcgcctctgttatcttcaagccaaaggatttggcagagtgattttggtatacaaaagcttctcttttaccatcactttattttcttgtgagttcggtggttcacttcacgagacgtcctgacaagtatcaagttacagagcagaaaggtaatctgttatagagactttcagattcttgtttgattatatttcggctatggctctagtcttttcagctctctgtaagactcttttttactgttgaataaataaattttaatttccagaattctctttctcacattaagaatctgagatggttatcttttcgaggaatgttctaacccctcttattctgtcgagtcctgcaatcttcgtctgaagtctagcttgactatcacctttcagccttgagactgttgtaccaggtaatgttgatccctctgttgcttgactattttctatgtttaacagaatgattctgcgtatgaatcaaacctccctttttccttttctatttcaatttctggactattatgtgatgatttgcaactttccatatatagaaatagaaagagatataagagttcaaaggggtttatgctattactagagaacctgttcttgactgttgttacagttaaaccattgttgtttccctgtaacaactgtttctgttcccctgctttgaatttagaggcattgaggaaatatccattttaatatacaatcattttacgatggtttagagttatttgtatacacaaagtgtttaaagacctccccaattcaaaaagtctttccgtagattaatcagaaaatcagtgtcacacttttcttaaattgtgtttgaaactaatcaaataaacaatctgttggtgtttcaatctctaacacttaaaaaactaatgttatataatatagtcattggttgattacatattctttttttaagagaagcaagatgattagtagttttattgtagggtttatacaaagttgttttgagtagcatttttttttgttaatatttatgctatagattgaaacaagatacatgaaaaaaataatttaaatataaaattatcaattcgtcatggagcctattccatcaacaatttgtcactttgtttttcaatgtacccactgaacactccggtaacaaaagacgctagctaatagctatgatattggctaaaataaacattaagcaagagtcacaagctagatctaaactggatttaagaacgtttttacggcatatatttattttttaaaaattttgaagttagagttgaactgtttgtcgcgaaagtttcgatttaacatattatatattaatattttacaaaatttatggtaacagaaaataggaaaaaggttataatacttataattttagattttacaggaaaaatctgcatttattgaaaattgaggataaaactgtaaaaataaatgagttagaaggttatttttataaaaaaaacccattttaaaaacataacaatacgaaaacaagaaagtacagactctgacttacaggaaaaaaaaaattacaaactttaaaccataatagaggttatataaatatagttaacagaaattagatccaatatgctttggttttgtgccttactgcgctggacgaattgcaaagcctttgacaacaagaccactcttcctctcagtgttcaaaagctgatacatcgagaaaaagatctttgcgtcctctttctcttgcggtgcctcaaagtctccaacaggaatatccacccaattttctcctatgtattcgtccaaacacaatttcttcgctttcacattagcggcttcatcactcataaccaccttcagcgtcagggtcacttcattcttccaccccaaagatgtgtcatctaggctcacaataaacaccacctcgtactttttccctggtatcaattttctcgtgtgaaaatctccacttatttttatcaaggcgtgagtgttaatcatcgttgcaatttcgatgtctgctttgctgaaaaaattacatgaaagtttcattattacaagaaattatgttaaaaaaaaatatatatatatatatatgtaaaatgattacacatcatatatcttgtgttgaattttcatgaaataatttttgaaaatatagtactcccagttgaagtaaaaaaaaagaaaaaagcatctttttccagtgaataaattcttactgtggtctgtcatagatagcactccaggtccatttttcaggattatcagagtgagcaatggtaagtctccttgcagggaccagaaatcctccttttgaattcgattctacctttgggtttcccttcatcgcgatttgccacagcgctttttgaatctcgagaatcatttcattcatgaactctctttcgttcctatcactgtcaaacaatacgagtgagacatgtgaataaacttttttctattacttggttccgtgttctacgtatacattctctcaggccaaacagctacatactttggtcataccaagaacataatattctagatgtatctatgtaacgaacagaggttagtatagattttcactcttgaataacgaagcaaaagataagagatcaaccttttttctgccaatctcaggccctttagtttaggaatagactctaaagcttcttgccatttttgagttctttcaggatcatttttatatttctcctttagaaccctgaaagtatcgccaaaacctcctttgagttctaacacggaggaaggtgcaagtttgtagaagatgggaatcgcattgagaccgccttgattaatgcagtccttgatctcggccagctcatctaagcaccattccgaacttgtgtagtccttagaaaagatcaccaccgcaacccttgactcttggatcctcacaaaaaggttaaccagatctgtgcccaccacttcgtccttgtctatgaaaacgtttatgttcgcttctctcatggcaggctcaagaaagcttaggaagccgttacgcagatcttttcctcggaagttgatgaacacttgaggtcccgttggggtgggtctcacagaagaagaagcagccataagagagctttttcttttgaggtaagagattttgtttttattgattgttctttgacctttagtgttttctcaagatgatttgaatgttaaagctaatcacacgtccttatatagatttaaatgcatgaaataatgtaacatctaacttttcaacatgtaatttgttaattacttaatgatatagatcacaaaactatgtagtttttatttgaattagtcttttaatcatatcgaaatcctccggtcaagaccgagtattttctaaataactaattgtgtaacgtatgtagtttttatttattaaaaaactagtaacgtatggaagttggttaacacttacagatacatcaaataagagttttagttaagacgtcgatcaacatgtataaactaaagtaatttagtttttgtcaacgatcaacaaaaccaaattcactaccaaggtgtgcatctttgattggtttgcatgagtcgtccgccaaagtccttcctcaaattataatccaagtcaacaggacttgcctagttcataaagtctttctataggttcctttaataaaatcaaataaccaaattaaaaagcaaatttttaagaaccaaattattaaaatctcaagtgtcagataaaaaactgcaactgcaaacgcgaaccatattaaaataaaataattggacttcttcacacggtgtgaatcacaccttaatacgtcattgaaactgagctctcgaacgcggtcagaccataatcaagtagtgtagtatgtcattgcataaactacatcattaaaagatgtcatcgtctatggaaattttatgttctgattatttaatcgattagacttcagtagagtatacatataacatattaaaaagcaaatttttaagaaccaaattattaaaataaaactatattatacagtgacattttcactatgcatcttaaagacattttaaaacaaacccgtcgttcaattcatcatgtgaaaggtcattccagtgatcacaactctcacaattatgatcatcggatggtttattttcacggacaatccatagtcgtattattatgagacggttttaggtgaaagtactattatttcctaaaactgtgaattgcgaaaacaaggctggttagccattgcaaacctttataaaacaaaggacaattgtacatttctaaagacactaaaatctaacgtaggttttgcgttcaccctcggctgctagctaaatctctgaaacaaaaagggataaagagaatggatgtcataagaaaaaggggttaacaatttatattgatcagtcaatgtggatcgtcccagcaatattcgttcagaggaattgatcagtaacaacaaagcatgtaaatcaacaaaacatgtatatgagttggccaactttcatatacatgattttttaaccattaaatattttatgtgtgattttatataaacaaataatattgtaaatttgaatatcatagtaatcatatatatatatatatatatatatcctaattggtcaacttggcaattcatttttaaaaaataaaaataaaatactaatatttatcactaattaacccacaatacaacacatttattcatatatattaatccattattgaaaactaaattgtaaccatcatactaattgtgtattaattatattcttatttacccattgtcattcaaacaaattagaattctaactcctatactttaattatttataaaatgtaacttccatcacttttcattctataaataatcatatacacatataatatagtatgcaacaagccgcaagtatcaagtatcgcggctaaacaacctagttttaacctaaaccacacaaaattttatgtgaaacctaaagtatcacgttatttaatacaaatttaattttgttaaatttaatgtgaagatatgtgtatatatatatcaccagtataataagagcaaaaaatgatgtgtctatgtaaactttacttgaaagattgggagcatcattattatcaagtagaaaaattataaaattttatcataatttcaaacaacagtacccaaaaagaaaaaggaaaaacaattcactttaataaccaaacagagcatctatttttatttttattttaaacagactagcgattcatttttttaaaaatacatatattaaacaataggaataatcatatatccttcgtttgtacgctttagttcgtgggacgtattgcaacacctttgacgacgagtccctttttcttatacttgtcttcgtactgatacatggtgaaaatgatcgttgcgggagtagtttttggcggaaccacgaaaactccggccaaaatatccacccagttctggcctatgtaatcgttcaagttctctgttcgatccacccgatcgtcgtccccatcgtgttgtaccaccttcagctttagattcactggttgctcccatccactagcattattttctaatttgactacgaatacagcctcgtacttagctcctggtgttagattctccgtagttattgttcccactattttaagccagtaaactttattcaacgtcgcaatttcaatttccgcagagctgcaaacataattaaatcaaacatagatgagaaatagaaaggaccagataacaaataaacatctttacaaagaataaaatatcgtaactagtttcacgaaatttgaccaaaataacttgataaattgttgtaattactaaaaagatgagggaacccaaaactaattctgtaaattacacaaaacaatttttttaaaaaagtggacctaaatatcgatttctagctaggtttcataaactcttatttatttttatttcaaatgagaaaatgacatatatgttatttctagaatccattaaaaaatattttttgaaaggaaaagtacttttgacctcaaaaaataatgataaaagagataaaatattactttggtgcctcgttgatggtactccaagtccatttttgaggtttctcagaatgtgtgatgtctaaatcccttgcagggaccatggaagggaccacggaacttccttcctgactcgcttctctttctggcttccttgcagggaccatggaacctccttgaggattcgcttctcctttcggtttctttggagggacgatggaaactaatttacgttgcgcttctatttcattgtttcttctcacagccatattctccagtaattgttgaatcttgatgaccattgagtttatgaagtcattatcggtcctctcactgccataccatacaagtaagagatatcaaaaacaaactgtttattatgtatatatatctttaggccaaaagaacataaaaataacctttgttcagccaagggcatgcctattgatcccgggatagactctaatgcttccttccatttctgagttattggtagcatgtgtcgattattgcgttccagagccctgaaattatcgccaaattttccttcaagaaattttacagcggaaggtttaactttgtagaagatgggaatcactatgagacggccttgatccttgcgttccttgatcttggccagctcattcaagcacctatgcgatcttgtgaaatccacggaaaatatcactagcgcgagctcagactcttcaatcctcgtcaataggttagccatttctgagcccaaaaactcgttctcatctatgaagacgtttatgttcgcttctctcaaggcagggacaagaaagcttatgaagtgtttgcggacatctgctccccggaagcatatgaacacctgaggccccgttggggtgggtttcacaaccgaggaagaagaagccatgagagctttttttgagaaataagaagagagtttttgttgataattgtttgagcttctgttttgtcaagatgctttggacgataaactaatccaacaatcttatatgcttgatatacttttaatatgtatgtaatttggcaacatgtagttaattataacagattagagtttatcttgaaaatttgaaattggtccattgactttatatcactacaagaaaacaggtgataaacgacttacacgacagtcgcatagtagtcgtaaaaaatgataatacgactaatcagcgactaacgacgttagtcattattacattgtcgctgaatgagatagtcgtgaattagtcgttgatcgacgactatattacgacaataacacaatcagtaaacaatgatcgttgtatagtcgtatcatattggcgactatttaacgaccatagcacgattaattgtcctgtacgaagcgtgtgaaacacgtggtcgtataattgtttccgacgatttgacgactaattctatcaatgtaaggaaataattctcgtagtcatataatagtcgtataatgttttacgactattatacgtctcgtgcacgattatattgtgactaggtatcttagtcggataataatcggtaattagtgtgactattagacgactattttacgtctaatttgctacctaaatacgactactgagcgactacttgttttgtccgagtaagaatttggtcatcgattgttgggtttcttgtttcatgtttgttggttatcgattgttgttttcttgtttcttgttttctccttttttatttgaaatgctaaaaagatgaaaagacttgtatatatagaaaatcaagtacaaatacacatacaattatcttgtttattacacaaacaacttatttgaataaacatatgttcaagtagagtttgggcaaagataatctaaggatcattaggtggaggacttggtagacgttctgtggttgtggtagagtgacttgccatgaagtccaagaactgcggatcggtttggcggagatacttctcgactaaagacaattgctcgagctagtctttttactcagctgtgactcgggatgactcagcttctcgggcagcaatctcagcatctctcttctcattatatgcagcctgctcttctattttcctttgagcttcctgcagccgttcttctagggcttgaaaggatgatgaggaaccggagtgatggcggttggcgctgcctagagtgtcttttagacatcctagtcctagtccaaaaggattgcctcttgaatccttttctgtggactacaagaaatagagaagaagctcattagtgacagaatattaattggactctaagactcataattatactaaaacatcttacctcgagaaagatggctgtataatcatctagtgtgagctccggaggtcgtgaagagccatcagagacagcagaagcagacgcctctagtgctgacagcctatctctcacattctgctgataagcttgagcaatcttctccgacttctgattaacaaatgagccatccgacttagtgtgtgtttcgatgaacacctcaccaagatggaccggtcttcccaacttctcttcctgcaaacacaaatcaatatcaacagtagtcactagacataagaactcaacatactcacaagaaaacagactatattggattgaaaacagaaaacagaaaactctaacttatgagaatctgcagaaacacttaccaattcatcttggatttcttgaaaagattttggcccagaatagtggactggaggaccgataccgttacggtcagagagacgagctttggaataggtccgactccttttctgtgctgcttctgtgtcccagtaagcacacattgttccccacagcgtttctccaatccatggaggctgctctcgagttgtccttgcggtgctaaccatgtccttcaagcgcctcttgacgatctcattgaagtaatactggactgtccttgttattaagggatcccagtgatgagttttctacaaaaaaaaggaagaagttaatgaaactacataaacttaacttgaacaagagcagatatagaggaagcttaccgcaaactttaaaaataatctttctcttttatcaactggcatacatgaccagttatagaagggagcatcgaatttttgtaagaaaattctagtgatcttcctaaccaagcgagatcctctgtctcgagtaaacctccaaacacatgcaacaaagaaagaagtaaacatgttacaaaagtgaacaaagttattttcccaaaagaaatacaagtcacacacgactataaaccatgttccacaatagtactgtctcacaatatagcatcattcacaatcaaagcatcatcatttgtgtaatatagaacaacataacacgagtttagaactgaactaaactaatgaccaagaactaatgtaatcacaacacaacactcaactatgtttgaccgattaacaacagagcatcaaacaacaataaaacaggcattactacataaactaatgagtctagaactaaacttgactaaatgcctaacccgaaaacactagcaacacaagagccaacaatgtttcacaacacaacagccaacaaggttcacattttcggtttgattccaaagccaacaaagaaagaagtaaacatgttacaaaagtgaacaaagttatgttcccaaaagaaatacaagtcacacacgactataaactatgttccacaatagtactgtctcaacaatatagcatcattcacaatcaaagcatcatcatttgtgtaatatagaacaacataacacgagtttagaactgaactgaactaatgaccaagaacaaatgtaatcacaacagaacactcatctatgtttgaccgattcacaacagagcatcaaacaacaataaaacaggcattactacataaactaatgagtctagtactaaacttgactaaatggctaacccgaaaacactagcaacacaagagccaacaatgtttcacaacacaacagccaacaaggttcacattttgggtttgattcacaacagagcatacagaacaagaaaacagggaatttaaagtgaacttaccattcggtttttggccggggaatgggagacaacaaacaacaccacgcttctctgccaggcacagagagaatgtcattcagagcaaccatggagtcttcttggagctctggcaacactgcaggaatgccctcttggaagttgttgccttgagacgagggatgactgtgagatgcagtttctggatccagcgaaagaggagggtcttgctgagcagtctcttgtggtggcaacggatctacacgctgtggttgattggtggagtgttggaagagttgctgcggtggtgggtagttacggtagtggggggcagaggatgaggcgccggcgccggctccttgaggcggaatcgatgcagaaacttgaaccgtcgccgccgccggggtgaaatcgtactgctgcggtagcgaagaaggtcttccagcaggcgttgaacctccggctctttgagtcacgtttggtgtggtcttcctctttcgagatcctccacgaccggcgttaggcatcctcttggagatgagagaatcgagatggatcgaagaggcaagggagagtttggcgaagaagagagaatcgagatggatcgatgtattagggtttgttggtgaaagacggatcgatttagggttaagaagaagaagaagaagaagaagagaatcgatttagggttacgaagaagaagaagaagatcgaggaagaagaagaagagagaagaagagaagaatcgaagaagtggctaagtgtttggaacgaaggggaaatgaatcgaattagggttttcaacactggaatagtcgtatataagtcgcataatagtcactaaatcaattgggtttgggcttcgacgattaaaagcccaataacttacaccgttgtcgccccatagtcgctgaatcgtcaccacgtaaattgggttatgggcttagtaatttcgaagccgaacaacatacacaagtgtcgctgtgtagtcgtataattgtcaccacttaagttgggtttgggctttgtgatttcgaagcccaacagcttacaagataatcgctgtgtagtcgtatattaatcaccacctgagttgggtttgggctttgttattcgaagcccaacatcttacatggtagtcgcataatagtcgtaatttcgtcaccttatgccttttaaaattatttaataattttttaataattattcaaatacttattcaaatacttattcaaatacatcgtatattacaaaatttattcaaataattaattatacatctatttcacacaattattattcatcttcgtcttctatttcatcttcatccgaggacgataaattacatcggaattcatcttctggttaagcatctccaatatcgtaatcgaggatgattggggttacgtctactaccggatagtctattacaagatcttcaattgtagtctgcaaaacagcttcatcatcctcggtttgcaacagtgtcggatcactattttcatattgtccagaaatgtttccccttggattgacctttaaaacactgagccaaatgttctttggtttctttgtatatggatatggaatataacaaacttgatctgcttgagatgctgttcaaacatgttatacatatatcaacaaaaatatatacaacattatttattaatgaattagaaattttaagtatacttaattacgtaccaagaataaatggctcgtatttattgtatttcctcgtagatagaacatctacaacgccaccatggtttcggcgagttcctctcccgatctttgggtcataccacttacacttaaaaagtgtgatcctcaaattgatgatgccctcatactcgagttctatgacatcagttaaggtaccgtagaaatctgtttcatcagatgaatcagcgtaattttcacctttaacacataccctatagttacatgtctttcgtccagcaccgtgggtttgcgtatgaaacaaatatcctcttgtgaaatacattgaccaagttttaaccttgttcaaaggaccttgcacaatctcttgaacccaagtaggaaatggagaattagtgttccaatatgttacctacataatatagataaacaatatcaatatgatcttaaattaaatcacgctagctacaaaaaaacagacaaatagttacattcatgaaccaaaattactgtagacttacatattctttaacccataaatgatattcttcagctcttctgatgtagagttctttttcggacaaggatggatatttcgcagaaagataatcctcgaacatactgtctcaacaaacgaagacaaataaatcaaagtgatcttatctatgaataaatcaaagtgattaaaaatacctctcaaatggtttaaaatagtcacaatttcttaaaacatatgcatgtgcattttggtaatctttctccgaaagccattctacatgcattgcaccatttggacggccgacctgcataaatatgttaggtactccagggacatgatatacaggaacttcaccttcatcgaatcttgttaacctgccacatataattgaattaagatcgaagtagtatagcaacattttaaataaataaaggtatttaccttgattttgtttgtatatgatcggcaaagtagtgctctgaaaaataagcaatctcgtcattgatatatgactcaacaattgagcctgcagcatatcttttgttctttgcttttcatttcaactttttggaaaacctctcaaatggatacatccacctatattggacagggccacccaattcagcttcgtatgggagatggataggtagatgttccataacatcgaaaaatgatggtggaaagatcttttccaagttacagatgattaaaactatgttctgtttgagaatttgaacgcaacttgtctgtaaagttctcgaacataggtcccagaaaaatgctccaattcctaaaatatatgtggaagttaaataattacataaaaaaatttctccataaaaaatagttagaattgtacctaataatgcaaggtggacattccggtcaagaagttcagcaaagataaatggaagtagtcgctccataaaaacatgacaatcatgactcttcatgcctgaaaacttaccattctccaaatctacacaactagccaaatctgaagaatagccatctggaaatctaacatcatgtttcacacattgaaataaactttgtttgacttcttctgtcaatgtatacggtggaaaaggagctttgcccgtactatcaatatgtaagcctggccgagaacaatatttctcaatatccaatcttgacatgatattgtctttttatttacccttaacacccaagagagtgttcatgatgttgtcaagaaaattcttctctgtatgcataacatcaatattatgtcgaagattgaggtccttccagtaagacaactcccacaatatgctttctttgtgccaattatgttccatctcatagccacgcatcttcttttcatgaccgttcccaccaacatccttcgttttgggtggatttacactagccaaccgctcgtaataaacttgctcccctgtcaaagattcgggtggatactcgctagaagcgtctcttcctttgagaaagtcttttttgttcctacgagatggatgaccataagaaaaaaatctacggtgacaatcaaaccaacatgtcttccgtccattgggtagataaaaagactttgtactttccatgcaaacttgataagacaatttaccatgagtagtccatcctgataacatgctatacgcgggaaagtcgctaatcgtccagagtagtactgtttttagattaaaactctgactcaatgaaacatcgtacgcatcgactccagtacaccacaactcttttagctcctcaataagaggttggaggaagacatcaagactagctcgaggatgatttggtccagaattcagaatggtaagaaataagtattttgtattcatgcacataccagggggtaaattatatggagttaggatcacaggccacaacgaatgattacgagacatgccaaatggattgaacccatcagtacacaacccgagataaacgttacggggttcttcagcaaatcggggatgtaactcttggaaatatctccactctgccgcatctgaaggatgattcatttctccctcctttgattggtgctcagcatgccatcgcatagccacagctgtcttatggctctgatacattctcttcaaccggtctgcaataggtagacaccaaatacgactatatggtactttggttcttcgacggtcgtccttaggcttccatctttgtgcgccacaaaatcgacattgatcttctttttcgtcttctttccaaaataacatacaattgtttttgcaaacatcaatcgtatgatatggaagtcctaaattgcgcatcaacttctcggtctggtaatgtgaagtggtagcctggtttccttctggtaaaaaatctgtaaacatctcgcaaacggagtccaccaacttttcactcatattatactccgctttgttgtgcatgagtcgagatgctaatgataactgcgactgcccttcacgacaaccatcgtacaatggattatttgcaccttctaacaagtcgtagaacttatttgaatggttacgaaccggctcttccacattctgataactaccatcatgatgatagttatcatcatgacccacgttatcatcataccccatgttaaaatcaaatgcatcgttcaccatatccacatatggatcttctacaacattacccacttcttcatgattctcactaaaatacgtcctatccgtgtaactagttccgatatccatattcaattcttctccatgcttataccaaacataataatcaggcataaatccttgactaaacaaatgactactaactcttctatccgagatgatgtgtttttcattcttgcatacactacaaggacaatgaaatttacctcgacaactctgtactataggctgactattagcgaatgtcatgaattcctcaactcctgcgacgtattcggctgacaaattccccgtcacttcattgaatctcttgtacatccaatctcgatagaaaccgccactaccgccataattgtagtttcccgccattatagaataaactaaatttccattgttttcttttttttcttttgattgttgttttgatttgtttgtgaaagaagagtgtcgtgaattttgattatatagacgaatttttatgactaatttacgactacaacaaacaaattaggtgtacctacttcgcaatgcggaaaacgttttccaacaacttaatgcgactattctgcgactcagttgtgactagtttacgattacagatatgtgtcgtattttagtcgccgattgggcgactaacttccgcagtcggaaactgtagtcgtccatttgcgactatgtaacaacaaacgtttttcttctataatataatcgttaaatagtcgttactatacgagtatttgccgactaacatttttagtcgtaaaataacgactaattgactactaatgttcatgttgtcgtatatgcgtcgtaaaacggtcgtgacgtagtcgccaaaaacaacgactacatctgttgtcgctttctgtagtcgttgtttgtctgttttcttgtagtgtatggatgtctctaggtcaacaccgagtatgttcttatgtgatggataatttggtaaaagagataactcagaataattgattaaaatatgtagctgatgacagatgcatataatcataatcaaattatgaccttgatcaacatgaataaaccactaaactacaattgttttgaaattcacaccgagttttaaattattttatatataaccattttacgagggtttagtgttgttgtatacatcaagtgtcgaagacctcggcaattcataaagtctttccgtagatattaattagaaaaaacagtgtcaacttaaaactgcaactgcgaaaagttcaagaaatatcaagagaagtggactttttcatatcaatgaccatgcatgaaaaattaagatctcgaacgcggggatatcagaatcaagtcatgcatcatatatatacgatatgataactaaattttattagctatattaggatttgaaccacagtattaaaagcacgtaggaatttactttaaatacacatcttgtattgctaatgtttgctagatatgatatataattaaattattcaaccaaaataaatatctttagtattgaaaatttggatttctcgtatacaataaaaaataataatttcgtgcaatacacgcaatcacaatattagataaaaagatccaatgttttactttttctttagttactgcatgggacgaatagcaacacctttgaccacgagcccgctcttccggtcactagtcacatactgatacatggtgaaagtcatctttgcggccgcattcctaggaggtgccaccaaaactccagcttgaatatccacccagttttcacctatgtgacattccaagcttgtttctcgctcctgcaaactctcagttccatctggattaattaccttcaagttcagattcaccggctgctcccatcctgaagatgtatcatctaagctcaccaaaaagacaacctcatattttgtccctggtgtcagatttcttgtgtgaaaatttccagacatgtgcagccagtggacttcattcaacatggcaacttcaattgcagcgtcactgaaacataataaaaccatttttaaaataaaaaaatatattaaaaaagatgtttaaagttatcacatcgctgacctaagcgttaaagttttacttcgatacattgaatttcgaaattttatgctatcatatattttgtactttttttggcataggaccttttagtttcataaaatgtcttataggtttactttcttcatttcttgtaaaaccaaaactatcactttaatgatattttcaatcttataaaaatagaaaaaggacagaagaaaaccatgtgactgtatgtcaaaagtagtatggcaagcaaaatagttagagcatctcaaacaagccccttaaatttaagagttttttaaactccaacaaaccctcattagagaactccttaaattagtgcacttaatcttttcggttaaacatcaagataactccttaagttagtaaaatacttttgagtactaacttattttacaactacaactttattcgacacaccttaattaaatattatttgttattttattataataacagtttttacctaacttgtttaaatttatggttatgtacctatgtactaaacactaaccacaaaatacattgatctgatatattgcactcactttggtgtctcgtagatagaactccatgtccaatttatcagtttctccgagtgactcatctggagtttccttgcagggaccatgaaacatttgctatttgcttctttttctctgtatactcccacagaaatattcgccagcaatttactcatttcctccacggcagaatttatgagatctttcttgcactttacgctgtcattcgatacggataataaaaaattcaatcgatagggtgccagttagaaccaaagcatgtttgataattggatatacagtatttatcagtaaaaaaaaaaagttaatcttttagttacaattttactagaatataaaataaaatttgaaattataatcattttttactgagagactgactttttttactttacttaaacatttgggtcagaccaaatattcaaaaagaccaaataagaagtaaaacgtgtccttcaccaagaacagaggaaaagaaacaatacctgttttggagatcggccaagtctccagtcgcatctaccttgtagaatataggaatcgcttcatcggcggattcattattcttcagtaaatcattaaaatcacattttgactctgaaaagatcgcgagtgagatctttgagtcctggattcttttaaacagattctttagacctttgcctcttacctcttcctcgtctatgaagacatttatatttttgttttgtaagaccggttcgagaaaattgatcagacctttgctcacatcttcttcttgcgactttatgaacactaaaggccgtgatggtatcaatcctacaaaagaagacgacgaagaaaaggtagaagccgccatgatgagaaaggttttttcttttagagaaagtttttaaacgaatttttccaacgttattatctgtttgaatccttcaaacaatataattcaacatgttaagttgtcaacttgtcataacttgattaagtctaacttaaaactaatattcgaaagtcaaagctggattaagtcattgaagctagaatttggtggttaagtcaaagctggattaagtcattgaagctaaggtatggtctcgccggtcgctatagtatcccataccttatgaaccttaagtgtacttctcatcctcatgtcccatacggtatagttagttgatttgagcataggacattgtatcgaagacggtccacctccgcctccgccttcttgtttctccagtaccaccgcaacctcactcatcttctttctctatggattttgctttaacattgaaactctaataccaattcttgttttagggatatgatcaagaacaaaatataaagaatgattctctttatttctttagaaaaataactataaaaacctaaagctctctcttaatctctcaatctctaaagtaaactcataagttatgcaacatctttgcattttcttatataacaaaagaattagataagttcctattctcattaggaaaactcacaaatatatatatatttaagcaacttcctaaatataatgtctaattcatattttctttagggatagctcctttcctcggaaattgatgaatacttgaggtctcgttggaataaataatacattggaagaagaagaagaaactaaagatgctcctaccatcgaagagcaagcaataggatcgtttgatcgattcttgtttgaatttgcaacatggattggtgaaattaattaatgtgtaagtcatatctttgtgagatatatatatatacttagtatgatgacattattatcgtcattgatcgtcgttattactattattagtataattaatcttctgaaatgtacattttggaaattttccatgtaacgttagtccaaaaatggaaactgcaaatacttttcgaagaatctctccaaaacgagttgagagttgacttcttcactgactaaatttctgcaaaaacgagtaagatataacttcttctatggtgcaaaaatacggaaagcaattttctcttatttctagaatttatcaatgtactttagttcccagttcaaagcccatccaaatatcttcgcagacttgggtgtttaaaagcccatccaaatatcaaagcccataatgttttgatgtagacataaaagcctgtttagaataaagatttttttgcgcaaacttgtacctgaaaaaactataaataaagaaaagggtatggtacaaaaacatcttcaaaatcgtttatttttttaactttatttctaactctaaaaaatatagaataatcctacaaaatcaagaataacacgcaaactagcctttatatatatatatatatatatatatatatatatatatatattgtaaacgtattacgataacgtacatttgatttcataatacataaaaaaatacataaaatacttttttataaacaacatagcaaatcgaatctctcgtgatgacaagtttaaatccatttttaaaattaccatgaacccttttgaatatataatgtatgcaaccataaaaccttttaaaatatacatatgaaggttataaaacatattatttttaatttcataaatttgttctgtattttttgaagacgacggaaagtaaaattgcaataaaacagacagagatttggagagccttttttgcagaacacccaaccaaaaaaataaacaatggtaattaatttcataactaatccaactgctattttattgtgatattaaactgattagattttgctgtcacggccaatatatcatgactgaccaatataaaccaaacatgaatgatgatgatagcactcagtgttattctttgtacttagtattataaaaaacaaagtcttcttccagaacatatttttctttttagtctaatgtataatgattacatagaaatcccaacgtgaaggtcgatagctaaaacagattttgcgtttttctctccatttggcttgggccgctttaaaatattcgatgttttttttaaatctttaaaaactgatttagcatcattggaaaatggaaactaatgatatcattttccgtttaaaacaatcaaatcctaattttttcaatccttttattcgataaagatctttaacatccgcaacatgaatggtactagttaattattttgtttctttaactaaaatcatgtatacaaaataataaatttcttacttcgaatactattttttcaatgttagtagtttgtatattccctctatttctgattatatatagttttaaaaaaaaaattataaaataagtgttgttttcacttatctattcaaaacttaaatgtatttaataatttttggttaattatattttacaatatattttttttattggtagaattagatgtagttaatgatgttttacagaaaatagataaattaaatgagatttttatgttttttttatgtgtgagacaaaggaaatattaattaagcagtccgattcaatatgtaatgtccacatattaattcataataaggttttgattaatattaggatattagcccagagtaggtgaagaagtttcaatatgtaatctctattattatacatatagcctatagagaagaaagacaatattcttcttggaaatcttaagataataatttagctctctcccaggcaccattttcgagacaccatcgttggccatgttttccgacgccggtggagttttaactcgccggcgtcgggatgtctcgtcttctcttagcttccttttcaagacctgctcattttagttctgttttctttcaatttttgcgaatttggatctatttctctttttggcctcttcccatggcgtctccgagatatgtgacagagaaagaaggtgtgttccggcgagtctccttcttccatatcctctgttcacaacgttggtttcgaagtcgtcaaaagaggaatcccttgattccaactgtttttcatctttgaaatatgagatttgtctcactgtttctctcggatccaatggatctagatctctctcgggtctccccgaagaactttctcaccgaatatcgtcgacaatacttctacctcctcgcgttttaatgaagacttctccaagcatcatctgcattttgtttcgagaagccatgttgttctggagttcatgctcgtcgtccgtaccggtgaagattctgccggcaagcaacttaaacctaattcttccaatggtctcctttcatgggcttgatctacaattctgctggcagtcctttggcccatattgcatctcatctcggcccatttatgtggattttggcccaatttctttttcaacttggcccaggtctgttcctttcaacctatattacaacccattaatcatgcctccaagttgcatcatttcttcaaatgtcttaagcttaatgactacaactatgacgacattattagtgtgttattgctctcaacggctcagtttcccgttgaagaaatcatctcgaataattttggaagaacgtattgttaagaagattttaatgctctgtgatccggtttggctccgacagtggcatgttcgagtctccctgttcgctctgtccggtttatatctaccggttttcatcttcattacccaccgtttgaagcatcacaaaatcgattttaaccagcatccccaatctagcagtgtgcacattctgaattggtttcagatttcaaagaaagtttctgcgattgttcgaaaagctttcgatctgcgttttagagctctgaatcttcctttatctgatctgaagggtcccttttacccaaattcctccacaaaagagagacatttggtgttaaattcctcctttatggagagatcacttttttccccctcctcctttatggagagaaccgtctcatcaaatgaccatcttcgttttctggttcttaagctgagaaatcggttgcgtatcctaaccgtgttactatcttttgtagttgaagatgtatcatgttttgcgccggcgaaactcaaggttatgggttctttttcaacgtcacaatggcaatgtctagtgaccaatccactcctcgatttgttcgtggatgtgtcttcgactctccaatgtctcgtttgttttaagatgctttttagctcatgtcttctagctcttttggatctacggtcgtattatcgtatttatctatgttttgcatttttgaatgctttatcctttgatgtactaaattcagagttctttgaactcctatggatctctgtaatcttcttgttcgtttgaatggaatcaaattatttgacaaaaaaaaaaatacatatagcctaggtaatagtgattaccagcaggaacaataattaaagcaaataaatttcaagtcttgtgaaactaatagtgatactttttttgggtctgaaataacagtgattgaacaatgcaccttggaacattaactaaagcaaattgaattcaagattaacacagaggttgattgtccgtccgagtcatggcaaaaataaacaagtaatcaagtaaagaatgatagtgatttcaactttatgtcataaaatatagtatgagagattgtattagactttataataatgagtgattagatctgaacccgtgttgtggttaaacacttaggcggcgggattagtggggacaaaatagattatggagtgtattcaaagcattccatttagataggtgggactatgattcctaaactctaaactaacggataattttattttaaactgaaaattgacaatagtctaaatttgttatgtaaattaatttcaatatatagccgaaaatgttttgaaataacaaactaccttagaatttaaaatcgttaatcccaaaatgttaagcaaaacagcctaattttctaagttttcatttgaaacattggatgtgcctagatgacataatttggcttaaaagaaagtagctgaaataaaaatttgttgagttcttcctcgatcaatcagagttgaataaatataaactaatgtcaacccaattacactaaaaaaaatatatatatatatatatatgataaattgtcgaagtttatgtcgcatttgtttttgtacgattataaattttcgatgtttattaaatatattttggaaaacagattttatggacttaactaaaactttttttttctttttgcaaagtattgaaagtttgcttagagctaatacttggatcactttatgtatatgattactataatttcgctagaatctgtttaatcatatatttgtagttttttaaaatatgtttaattaaacaaatagctaaatatatagggtttgattgttagaaagaaaaaaagtaaaaaggggaagtttgtaaaattacactaaaaacaatgatttttgaaacatagaccactttccaatttttaaaaacttaattaactatttatatgttaatttacaaatgtatcctttcatggttaaaagttttaacttaaaactaacttaattaattacttaaaccatttttccgaatcatatatgttatcgtatgatgttttttgtatatcacaaacgaagttacgtcgaagtgtccaaagaaatattctctcaattaatttgatattgttgcttcaggttcattaatcatacagacatgtaattttccagtcacgctaaatcattacaacttggcagcaacgacacagacggtgtaatccaacttccaaaagtatagtatgaaagaagatatggttgaagtcactaatcaatcaaccacctcaaacgttcttttttccttttattttctcaatttggtccataaagacaaagtaatcaatcaacacattgtttacgatgtttgaaacgtggacgtgtaagagacccactccacgatgactttgccttcttcctttatggggggtctataatagaagttccaatcatgactacaaatttactcaactattcgtaacttgtgtaaaagaaaaactaaaagtaacaggaatataagaccatctctatcaataactgtttaatataaaactaaaatataatcaaaaagtatgaaagaaagtaaaattagtttttcaaatgaaaaattttgagaaactcataaaaatatttatatatatcatctattggtcaaatattattttattattaaaatttaattatataactaatatttattaaaatacaaatatcattttttttttagaaaccaaaaaggtatctcactgatggagatgccctaatagtacattatagtaagtatatcctacataattttttttatttttttttggtaaaagataaaattttatatcatttttgatttgtgacataattacagaaaaaactagaaacagattaaaacaatctacagaataatattacaactagtaaaaaactaaaaacacattatagtaaatgtatcctacataattaaaaacaaaatcaaaatgaatataaacaatttcttacatattgttcatggatggaatggagctagaaccatccttcaccaaatcaatgtcactatatagaaaagcaaagaagttgtccaaagagaaatgttttaccttaaaatctcaaagacttaaaaaataaaaataaaacgaatattgaataaaatattaatattgtaaatgaaacgaccgaaacctgaaacaactcagaagaaaatcttattaaaaaaagttgacagatgtgaacattattaagatactttaactaattagtgggtccttctatctattttaatcttaatgtaatcatatcattattataactcacttgatttgttattaattttagcttttttaattctatctttcttcttttgtcccgaggactttggcggacacgaagggaagaaaaggaaatatttaagtggggaaagtaaaagatgagatgctgaataagtcattagtgggacgtgcaattatcatcgattctcttatttctttttcatataataaaacaatataaaatcgaaagaatcgaaaattaactagaaaatatgttaaaaggtaaagtacatttttgctttgtcaagtgtactccaccatttcataaactttaataccaaaccgaaccatatcacacttcgtacatatatctttttatacatttcataatgtataatatatttttggctggtgaatattattttgcatatagttttgattgtttcgatggaaacatttcaacgtggtaaccaatgatatcgaatattgcaatgcttaactaataccggatcttaattagtaattataatagttaagaagaagaataatatttttagggaatttatatgaccatgacttgtaataatcatatcaaaatgagaagctatagttcatttgttttaacaatgtaaatttttagctacagctatagttctagtctggtttcgatattcgacatgaaacttcttgctttcatattatatgacaaatgagtatataatacagaaaagattgctttgatttgattttaagatacttatagagcaattctttgttaaatcctagttgccaatgaacgaataattcttataataacaatgtgtgcgtaagatgaatagacgatcaagttcccatgtatttgtgttttcggtgtcattcgttaatggtggcatgtgaatgtgatgattatttttattgtatactcttaagtatttatttatcttagcgatccataatcttccatttctcgtaataatataataagaaaattaaagacaatttggtcatatgattaagctttatagaattataggtcctttgattatctagctaattaaacattatgcggacacaatcatacagacaaattggccttaagttctgatcagtctccactaattatattatttttatatttagcatgtgtttctaaaagtgcacaaaatccttacctaatatgctctccattctccaacttatcaaacactgttttttgttatatgttaagcttattacatgaagtattaatggagagtctcgatcactactacctagtatcataatatcctaatatcttcaataatttaagaaaatgctttactaattttatagtttcctattatttggccttccgacattgttttatgttatcgtttagtttttctttatctatattcgagcttatacagttgctttttattccaacgacattgctctgtaatctatcacaacgattaaaatccttttttgtttatcatccaaatgataatatagatttgtttgtcattgttatactcttcgtacagattgaaaattctactcatctacacaaggagcatattttatttatttagatcgcttcattcacacccgatagaggttattttaactaaaaatgcttaacaatggttacgatacataataatctaaattttcatatttgacatttattaaaaatgaacaagtttaattgttgattatcttaccagtactatttaataaaatgtgaaaatggtagaagcagtcgaaattggttgaaaagcaaatttcattgaaaacaactttatctaaagttaagtggttttattctagtagtaattttttcagttaaagttattttgttttactagcctttttcgtggaaacatcgcaaatttggcctataaactagtaaaccattcaaaaaatataataaacctaaatatataactggtggtggataccaagaatccatcaatctcaatatatgccaccttttttggtggcatctccatttatgattttctatcactcttgtccattaaaaatttacaaaaaattatatatagttattttttatacacatatgtgtagatatatagattactaggtatatgtatatgtgtgtgaggatctttatgcacctttattttttgccagtgctttagggaatttaagacaatgctagcaagtctcagacacattatgtagtggggatcactgttcccataacttctgtatttttgaaattttcttttaattattttatattcaattatttcctttttctgagctttaggatccatgacctaacaaggttgtgcaggagtgggtggtgatggggaccaatttgattatttcaacaatttcagatttggttccatcactatctgtcttttctctatatataagagtgtatatatcatatatgcaaattttgtaaaatccaaagaaatgtaatagtgagaaaggacaaagaaatggtacctaaacatgtatatatgtttaatgggcgtgaaagtgtcccgtgaataaatttattaaaattttggaaaatcactcaaaaacaaacaaaaaaaacattcaataatgaaaaggacaatgaaaacttgtttataaatgtaatgagcaactcatccacgatgtgaaggaacctaataaatattgaaattataattcataataattttatcacatttattatcatgtgggcgcattcccggaaatacaaaggatgagcttggtggacacggccctagtactcttgtcttgttcttgtctaaacttttagttaatcaacttattaattatcaatatttaaaaagttaattaaacaagtctacaaatttacgttgatagctcatatatctagttggtggtgccattagctcggcgaatgacaaatgagttttaagagtttttgggtctatgatttagaggtttgatcttattgtatttaaatatcacacgtctttcgttatactttgcagatttttatatgtgaaattgcaagtcaaaggatgcattaaaatctcatattgaaatgataattttttgtagattgtgtatattactagctagtaataagttttgttcgctgtgcttcatatttaaaactccccaagattttctttaattagcaaaataataataaaaaaactacccaagatttaactgctgtttcagactagatatgaacaatgaaatgatggaatatcatcttgtactagcagagtagaattcttacaaaataagcataaaacatttaaaatattttatattttaacatgcattcttatcttttatatgagtggtagaattagctgaattattcaaaatataaattcttttctttttttaaatctaaattcttcatcattaacaaaatataactaacatgagtttttttctctattttaaatgactatgcctagtatatgtcactcctacccactttctcttttcgttccgttcccccacaacttcattacaatgcttcaaattccaatctccatcatatatatatatatatatatatatatagatagataatcatatatatatatctgaatgaaattaatttaatctgtcagagataccatgattttggttttactagatcagaaactgcacatgaacataaatttggagaaataatatatatgttgtaccgaattaccaattatgtcattaagttggtctcaggtgtaaaacaagtgaacaactaataagttaggtttaaaatttcgtaacctagaatacagttagaagtatttttaacaaaaaaaagggttagaagtattatcaagtgatctcatatacttctgaaccgtttcaattaatatataaatgttgccaaaaaaatatatatcaagtgatgtcatattttaacaaattaaatgaaactaatttatccaattagtgaatctcagttatccattctgaatataaacctaaatctaaatttacaaagatatgatcaataactttgagttataaaaataaagcctaaatctttaaccattaaacctaaacttaaaaccattattttaaaattcttttctattttttatttctcataagaaaatatataattaattatcccatatattatggagtggcgcattcttatcaactaatctccaatctaggtaaatgacatatgtatagattttcaaactttttataaaaaaactattatttgttcttggtaacatgtatctatacgtattcgtcaatatgaatgacacatatataaagagagacagagagagaaagatagattgatacgtacgtagattcgcctgtacatataacaatgactacaagacattaaatacacagagacacgcatgaatgtgtccacagacacataaaatagactttttccatgtggtccacttatttatcccacatctaaaaacaattatgtaaatcacttattgtccgtacagtgttataacattatcggataattttcagttttatttcagcgtattactttcatttgttttaattgttttaaaaaagaaaaagaaaagcgacgagacaacaaactttttcccagcaaagccatggaccaaaaacaaaagctatattttcagattcactaaaatagtaaaatggaaacagtgaagtttaaaggaatgggttccaccaaaacgtggtttatgttgtttctccccatcatggacctcacacgtttggcatgtgtaaaaactatacgcacttacaaaatagactatttatagttttaagagtaaacattggcgaaaaaaaaaaaaaaagttaacagtaataaccctataaaataattgactctaaatttgttttatcttcgtatatataaaagaaatgaagaagtgtaatccaaaattttgatagaaattgataagatagaatttgaaaaaaaaaattgtttaaaatgtaacactaactagtaaaaatataaataataaacatataaagtaagtattttagtgacatggcaaacgattgcaataatatttttatatttattgatattattatgtttttcgtaattcattttctactacacagtatcctgatttaatattatgtattatgttttataaaagacataatatatcctaatcttttaacatacaatattttcaattacaattcagaacaaaaattgtacaaatttctttcaataaccattttttacaagtaataatagctgagattggacatctcacattatattactttgattatcccatagatgaatcatctgacaataatcataatcaaaacaacttacaagtagtttttttttcatttatacgatctaggttataaacttaaactaagttttgaggattgataatttgattataattttacgatttttgctttcaaagtatcttaaattaaatcctgttaaattaaaaatcaaatatttagtggtgtgctcctccaccttacaccatcatcaagtccttttttcagtgaaagatggttttgattaatgctaactgctaactgtttccccttacaccatcattcagttgtattctttttacatgttaggtctaaaaatagtggaatgtggtattaaaaataaaaataatgagttaatcacaacaaaaccattattgggcatacgatatatattttctttgctcaaaaagaaaatgaaaattgaactatgcaattcaaaaatatatcaggttccttaccttttatttatcaaattcaacgtcacaattttactacatgacagcaattgtaacgaaaaaagttaaagttgaatcttggattgtgaaaatttttcgtaatttggtatgaaaataatttatgagcaataatcctctttcattcaacactagtcacttcaatcaaaaataactcccaacattgttatctttaagttggcgatgttgtaaaaatacaaaaaattttgaatttcttttttcttaaaattctaaagttttgaaactaaaaaaaattaagaagacatttcagtgagtactcatgctcacaattttgtctatgaatatatcaaagattgacagagtgttaatatggattttaatcactcaaacacccttgattatagaccttatttgagattcaagattaacaaggaataagaatagtaaaggtggcatatcagattaacaaatgaataacaaaatcaatagaaggataacaactgtaagccgaacaaattttatttttttaaaacgccataaagctaaaatttagttataattttaaaatgtgctagtgctagataaattaaattacttattatttccacgttttataattcaatgcaaagttttgtgaattatatgtattcaacaaatcaaattttcaaactgtaaaaacatggaaaattgtatatcattcaatccctaaatcaaactagacacgacatttatttaaaatacacacttactcaatcaatatgtttggaaaaataaacaacaacaatacaatagagttattatattgtcaaaaatatatacacggtcgaatcttcttggtaattgcatgatgtagcaagcgtggagaggaattaacacataacagatacgacttgcatgcttctcgatttgtttttgttttctgccagtacatttgagaaaattgattttaccaaaataccccttaagattcttacctatgacatatactgaccaatcatatcaatgcttatagatagtaaaaaaaaattaaaaaatcattccgtttttatgtatagtcaaaagaaaactgaaaaaggtattttaaatgattcctaaatttcgtatagtcaaaacaaaactgcaagaaaattttatattagctagatttatttccttttgctatgatatattataccaagatataaatagcatttatgcacgggaaaaaataacagattttaaggaaaaatagctaaacaatttctttctttaaacattactaacaaataaaaatcaattttaaatttacaaaattaggaatacacaatatttataccatatcactacaagtcaagtcaatcaaaaaaaaaaaaaaaagtatacatatacagtcacatgtgctggtgtttgttaagatatttatatataggaaattaatttaaaaaaatgtaaaactttcaaaaggataatttattctctttctagaaataatcttattttaatttattcatttttgactttttttctctctctctcttccttaaataaaaagcctccctccatagatttcttcaccagtcttcttcttcttctgcctccaaactctctctttctctctcgagaaccttaagaaaacgttacaaatggctgttgaagcaagacacatgaatctcttctcttctcaatacattaccaacaggtaaatttcattctcttcacgattcggtttcggtgattttttttttgcagttgtattgattttttttgttacatttcttttcttccagagaatgtgttaaatctcaaacgaatatgaacaacggacaacaaatcgccggcggtggttttccggtaacaatcggtgatcggaatttacagtacatagatccgattaacagcttcaacaaatcagaaagcgagctcacagctatttcaaaacgtcagagagattcaacgtttgattcagacgctttaatcgcatctcagaaacgcagagcaatcgcgttttctccggcgtcattaatcgacgcagagttagtttcacagatccaacagcaaaactcagaaatcgatagattcgtagcgcaacaaacggaaacgttgagaatcgaattagaagcgagacaaagaacgcaaacgcggatgttagcgtcagcggtacaaaacgcgatattgaaaaagctgaaagcgaaagacgaagagattataagaatggggaaattaaactgggttttacaagaacgtgtgaagaatctctacgtagagaatcagatctggcgtgatttagcacaaactaatgaagctactgcgaataatctcagatcaaatctcgaacaagttttggctcaagttgatgatttagatgcgtttcgtcgtcctttggttgaagaagctgatgatgcagaatctagctgtggaagctgtgacggaggtgatgtaacggcggttgttaacggaggatgtaaacggtgcggtgagttaacggcgagtgtgttggtgttgccttgtcgtcatttgtgtttgtgtacggtttgtggatcgtcggctttgttgcggacgtgtcctgtatgtgatatggtcatgactgctagtgtacatgttaacatgtcatcatgaccatttttttcgtttttaaatttattttgaagttaaattttttagttttattgttttgatttgaggattaaagagtaaaaattaggtgaaaaacaaaagaagaagaaatgtgactcttttttgactttttttggagacttataaagatggatttgattcattatttgtttgtagtttttgtatatttcttattttggtaatgacaatttgttttccttcattcgtacggaatcaatgcgatctctttgactttgaatatattatgtaaccgtgataattaaaaatatgtacgtaattaggatcattaaacgaaaaaaattgtttcaaattttagagttaaagaatgttataatccttgtaagtttatcattaaatttgcggaactgcataatagaatttgtggtgttggtgtgttcatgcttcggaacgcactaaaccaaattttaccctttcaaatcaatgttagttagtgtcttgttgcaacattaacattaagtaggaaaataattcttattttgtttcctagtctttggttaaatcacgatgcaatcttactgattggcttaaaacttaatctacttccttagtcctaccttttttctagatagaatctgaaaatcaaatatcagtctaattaatctgttaacattattatcgtcattgatcgtcattaatatctattttaaaatatatacttttggttattttcctggaaacttcagaagtggaagccaaaaacggaagttgcaaaagacgacataataattgaatgtgggaaagaaattttaaagaatatctccaaaacatgtgaggttgtccttggccttttacttctcctctagccaaagcaatcacatataaccaaaatagaaaaacaaattctcagtcctaagaaaattatccttgaattttagaaaatattaaaagcattgatgaaataattaaacttatctaagaatttttcttgttatccattagttggaaaattcaaaatattacattgtaaggtattgtattattttgtgaaactatttttttaaaaattattgttattttggtttgatacaatttctagtcagattttcttgttatttatgtatgtttaactatattattaaaaatgttattaagaaacaagctaaattaataaacatcctaaattttaaattatgtttgatgtttactcaaagtctcaattcccaaagtgtcgctgggaattatgtttactcaaagtgtcgtcaatatattatcaagaaacaaaagattcataattttcttggtcatgtcctcttttgctctttcaaaattcgaatttcaatgctgcattctaacacccaaaatctgttgcccactaaaagttatttcattatgtcgcaatcactaataatgaaaatgtctagtgacgtttaatataacaaaaatgtatataaatctgttttctaagaagaatcaaatttccctatcccaactataaaaaagtagaaaagaaaacgtcatataaagcaatagtctgaatttgataccttcaacgacattgcaattcaaagtctattagtattatttgtcgtgtaataaacttcaaaatttggggtcgtatcttgtgcagtgcatatagacaaaaaaagacccccataaattttcagatttgataataaaataaatgtattcaaatatatatgccatttaagtacatatcagaacgcagaacgatgaatacgatgtgtgaattcacgatttacgatgattgcgtccaagaaacgttacaatgtcgctatccaatatttatacaaattttcgtcttgattatataatgcgtccaacaactttttttggtgatgacatatcgatatttggttagatgattcacatgctttcacatcttcactaaaccctattccctaagaatattccaaaatttggtcctaataattaacactaattattactaaattgatttagtattggataggtttttggtgaaccaaacaaatataaatgtcatacgtccatatccatatagtctttaaaaatatgcatgtcacgtcttatcttacatttaatgttgatttaaacaacttctaccgttaaattttaacttccgataatgctaagtgctaacacagagtaagctattgtgagattcttcatagatttgatattcatatatcacgagaatttcatcacaactcctactttatccgtaatcaaatttatagaatataatatgatacaaaatttcaaaactcacttattgtaataagtacataatagttttaaactatttcctaattcgcgtgaaaatgctaaaatgatacttatattaaaacaaaatttaagtattcattttctagaagccaaattaaatttatgtgtaggttattgaaatttatgcacttgaagtgatttggaaatggtttaggttagtgaacaacaaaatgtggtgatatacaattgttcttggtgttaaggtgtttagagtactttaaaatgttttaggtgtttgcaaggataaacctcttttgttgattttgttgatttaatatgttccagaaatatacatgacttgtcttatcattttgttgattttcttatgatgacgagatgcgtaagttcattctctcgcttgatgatgacgatttgcgctaccttggttcgaaatgtggatctttgtagattatctcgtagcctgaaacctgtatagctgttgtaattggttgatgtgtaagacaaaacgattctccaacatacattcttggtaaattattactcagtacatttgtgtcgtcatttgtgcctttataaaatgccaatgggctgtttatgtaaaggggccgacctctttttctttttgtcacccaaaatgtggcactattatattaataatgaatattaataatcaaagctatataccaatatggttattagtacttttatatttccttgtattagtatgtacattgtttttggtattgtatcaaaacacctcaataaagatgtagtttccggttacctggaggatgcaacctccgagactcatgccttcaaacatttgatggaagcaaagagccgcaatgagaccttaaatggtgcatgtgtcatttgttgcgcctagacatagcccaataaccacagagtgaactataattcctagctccaacacatatcatatgtgtttataaaaacaaataaaatggtaattaagtacatttgttaaaagtggaatatttatttatgaggtagtctggtagactaaccatagcaatgacacggtaccgcaataactgtgaagaacgaacatctttagtagttaatgtaacgccatgaccatgattatggccatgagttattatcggattcgctctctcctcactcggaaacaacatcatatatatcactttactcaaaggtaccatttgatcataccttattggcttattctcactctatttttttgtaatccgaggataaactcaaatttttgatattttggcaataaaactggttataggttataggagatgaaatgtccctaaaatttcaagataaagtataaactcaactgcaaagtcacataaaatataactataaaaacaaaagcacaatcggttgaaaatcacatggtttttacttatgatccagaaaaatatattatttacgctaactgaaatataattatatttcataaaagtcgagaggataatgtgaatgtgtttatgcccacttggccaggactgacattccgccacacccaagcaaagctgccccgaagcagttaagctgaagcttgacgcttctttggagcatagatcccataaactctgcggctagaagatctacaagtgccatataaatgagcaatcctgcagaacaagcattgagcagtcctaccgtgattaatgctgttggactgttgtctttgtaaacgctcgacaaggctataccaagagcgattcatgatggtgttgtaacagcaaagaagaaggccatcacaaatttcttcacatttgtatattctgcctgttcaaaaagaatttgtatatatttctcaaaattctatatgtttctatcatcatatgttcaacactcttttatcgaaaatatatagatttatcaaaagttgcgcgtatttacataaaattcagattaatatccttcaatctatatgtttgtgttatggtcaattcttttagatttgataaagaacaaaatattatgattctatttgcttatatataataattttatctttattttgaaatcgttgtttgtagcttttacggttttgtttagtattgttttggaccacatataaaaaaaaggatattaagaaaatattgtacctgaaggatgcaaccgccgagacccatcccttcgaacatttgatggaagcaaagagctgcaataaggcctttaatagtgcatgtgtcgttggttgcacctagagatagtccaatgaccacggagtgaactattatcccaagctccaagacctaattttacacataagatttttgaatatgtgaataaaatatttaatattgatagtgttttcggaagtatgtgtatacatatgttaaagaaacaactaaatgagattgtaataaaggctcaactaaccgtggcgataactcggtaccgcaatagttgttttgagcatgtagagctacgttctttagttgttagaggcaaatgatcgatttgaattatcataggagtagtcctttcttcgctgtcatcagcgacagctttcttggtgtagagacttgtagcgatagagtcaatagcaagagttacaagaccggacaacatagcgacaaagccagtgaagggaaacttgtgccatggattgtcttcaagacatggagaggacaacatctcgaaagaatcgggcaaaacatgcatgaagccggttcctaggatgatcccggatgcaaaacacttaatgatcataaagattttaccatctggatgcaggaatgtgacatatcggctaaagagaggagctgcgactccgatcatgcttgtcacgaggatggcaacgattgctacaattttgagaggtaaggctttggttttatcgatgcaagagtctgttgaatcggtctcgcattcttttggaaccgttgagatcgccggagagattgcgaaggagattaggaggagtacgaggaagatttgattcatgtgttgagtagtcgtagccatttttcaattttggttttgttagtaaacgaaaataatgtgttattttgcctcaaatcatatgaagtttatgactcatatatatacggattatatataatgttccggcttgttgatattgacatgcatgggatattattcgttttatatctacgaacaaaaaataacgcatgacacacgagtcaatattaatgtagattagaagtatagttatgtgaaatgtaatctaatcttatctttaaaatgaacattttaaacttcatatgcatatagatatgccaaatataattgacattattattttttatgtagtatcatatattccctttgtgtacttcattccatggaatttcatcatggccaggatcacgccgatcaaggatttaagcttcattcatgcttttggatgtatcggtaacaagtcaacgttagttacacgattaaaataaagtttcgttaatctataagactagaaatatattagattctaaattctgaacatatatttgaaagaactatgatacagttgttgattcagaccagaagaaaagttattagttgtgaatttggataatcaagctaatgattattatatttattttccattttcaagtatattaccgaatgaaaactaggtttatcaaagctgggccagacctaattggaaacccccctcacagcatcaggcccattaatttctgtaagccgagttttgtttgagcttatatgctttagattcttttttcatttatggacgaaatcttcttttctttcaggttaaaaatttagaatctgatcagtgatccattaatggttagcatcgggcccattagtaaagaaacgttagaatcttatcagtggtcctctgtgacagcattttcaactcgatcctcattgtaatggacgtttaatctgagcaagaactgtccgatctcggttgctttcaatgtttcttagcacatcggatggagttgtttgtatatgtcgtaaacgataggaaagagtacaaccaatgaatggtgaaatggtacgggtaaatctacaatttacaaacacattctccaactgttaacttctacttcgagagacaagactacaaataaactcttctaattggatggcaatctacaatcgatgatatttgaacggaacaaaactaagtgggaaagcttcattagttacttacataaatagtttcattaaattgacttgttgtatgttgttattgacaagtagctgcggtttattcctaccaaattgttggttctttacaaagaaaatagtttgttcaaaactctgtatgccttttatttttactttatttatgcaaaccttttcacatagagtattttgacacgattaaaaaacattgttgtatatgacccggtccaagccacgccaagtctcttttaatacacgaaaactcaaatatcaaaggtggaaacgcatgttatataaacttttttaattgatattatatcaaattattcgatattataaaaaaattacataaggagactttgtatgataaaccatatattccgcgtagcttctcagcaggaactaggaagcatcaccgacactgacacaccaccccattggatcgatgcttcaatttttatttccagtaatacatttacatgagtcatcaaggttgttttctcttccaaaatataaaaaagttcatcatatacaggttcatacattttagatgctttgggacaaatttaaaagatatattccttaatatcataatttttttatatacttcttcttttaacaaaaacattaggtgccttttgagtatatacaaaaaacaaattgtgtccatcttgtatagatttttttttttgtgccctataaatttatgtatatgtagttatgtaccctataagtttatattatcggcccctatagttaagccggcattgactatatatttttatggaaaatttaagagttttctttttgttttgttatttttctttttaattgtttcatcaagttaagtttcgtttccaattcctcttagaatgatttttatctcttgtgttaggtcacgctttactagtttacactcctctttagaatgatttatctcttgtatgagttttgtttttgtctttttgttaagaatttaaatattccactaaaatgaaaagtgttaggattttcatgaagtaaagcctgaagtttttggtcttatggcaaaaaaagaaaaaaacatgaaaacaaaagaaatcaatccattgacatcaacaaaacaaattacgtttttgagtcataaagtgatataacaattttgaataactaccaatatatatgtcctcaatcttgtgtgagttcaaggctttatgggttacatcgttatacttagtttatgtaagaaatttgtaaatttgaatgggttaaaacttctgatctaaataacgaattggtaggaaacttttttttgtcttgttaatatttgatggttttagccaaagtaatacataaaataattatttagtgaccaaaacttatcgcatatttgatgatttaagccatagtaatatgatttgtattagtgacgttgatggtttaatatatgatttagtgatacttagtgaacgaaagatacaaattaacatatggtttaccaaagtaacgcagcgtcactagtgaccaaaacttagcgtatatttgatagtttaagtcaaagtaatatactaatatgatttgtattagtgacgttgcattgtcactatccaagtttacacttatatgttattttttgttaaaaatatatatttatagttagaattctatattcgatagcattaccgaaagtcgaaaatttaatcataggaatcattgccaatcgaaataatgctaattaaattttatttcatataaaaatttgatgaataaactattcaacgactatccttaaagagtttttttttttttaatagtcagctaacgcatttcaccgattgtatttgtagccttgtaggtagagtcgaatttccgacgcgactagaatgctagcataagagacttcaccactttgttacgaagccaagaatcttcttgttttaaaaaaaaaaatcaagacaaaattgtcgtccctcatatctatattcaattcatttcaaaacgttatttatgtcttaaaatttggaactaggccacaaagaatgactttggtcatcacaaaattataaatttaataaaaatttggaccactataggcatagctattgcctattataatctctactattactttatgatttatctactattccgaaagtgtaattgtttaatacgtcatcacattgcagcaatccacacacaagccacgtcattcatatgccgttcgtatttgctttcgtcacttccttccgtcatcaatagtgacggctatttcttaatattaatcttcttgacttaatgctatttcgtgacggcattaattggcatatcattacaagttatttacacctaagaaacaaattaaaactattgaataatatgatgtaaataaaaatatattaatgatgtgatatatcgcagtcaaataaaaatagtgattttgatgagaaaaaaaatatgtgtttatccatagatttgttaaattagagaaagatgtggaaaatgttagtgagtggcgtcatacacggagaacctttggcatcatacacggatttttctagtctttgttttctatttgtcaactttcatttgagtctttctttatacactttattagaccatgtttttaattctaatgcttattaattcatattattaaatttacaaaaaaaactattatattaactctcttgtttcctctgtatcttccttcacattgaagctgtctctttctttcaccatcacttgcacctgttgtgtcctgtttgttctcaatttcatcatcatttatcctttatatacctctctttctttcttgacttttcctctaaattctcttcctttttatctctttgatacatctcaatttggttcttttgccttctctttgatcttatctcttacgattgtgcagatctcaatctctatatccttggttgtgtcagattctcttagggtttattttctctcccaattttgtttgattccttgtccaaagtttcttcctttccttttgacttttttttgtggtacattgaatcagaggtgtaagagtaatagtttcataactcaaatccccaagtgtacaaattttcctcttttggttctgggtttggttgattccttgttagaaatgtaaatttagggcttttgtatctgaaaccgatcttcagacttgtgtaatcttcttgatcttcatgcaagattgataattctacaagaagaagaagaagagaaaatggctactttgactgagccatcatcatctttgagtttcacatcttctcatttctcttatggttctattgggtccaatcacttctcatcaagctcagcttctaatcctgaagttgttagtctaaccaaactcagctccaatcttgagcagcttcttagtaattcagattgtgattacagtgatgcagagatcattgttgatggtgttccagttggtgttcatagatgcattttagctgcaagaagtaagtttttccaagatttgtttaagaaagaaaagaaaatttcgaaaactgagaaaccaaagtatcagttgagagagatgttaccttatggagctgttgctcatgaagctttcttgtatttcttgagttatatatatactgggagattaaagccttttccattggaggtttcgacttgtgttgatccagtttgttctcatgattgttgtcgacctgccattgattttgttgttcaattgatgtatgcttcctctgttctccaagtgcctgagctagtttcatcttttcaggtgtgtgaaaagtcttcttttttcttcggtctctttgtttcttaattcatagacctcaatgagaactaaaaggtttgtgtgcttgcagcggcggctttgtaactttgtggagaagacccttgttgagaatgttcttcccattcttatggttgctttcaattgtaagttgactcagcttcttgatcagtgtattgagagagtggcgaggtcagatctttacaggttctgtattgaaaaggaagttcctcccgaagtagcagagaagattaaacagcttcgacttatatccccgcaagacgaagaaaccagtcccaagatttcggagaaattgcttgaaagaatcggtaaaattctcaaggccttggattcagatgatgttgagcttgtgaagcttcttttgactgagtcagatatcactctagatcaagccaatggtctgcattattctgttgtgtatagtgatccgaaagttgttgccgagattcttgctctggatatgggtgatgtgaactacaggaattcccggggttacacggttcttcattttgctgcgatgcgtagagagccatcgatcattatatcgcttatcgataaaggcgccaatgcatctgagtttacatctgacggacgtagcgcagttaatatattaagaagactgacaaatccaaaggattatcataccaaaacagctaaagggcgtgaatctagtaaagccaggttatgcatcgatatcttggaaagagaaatcaggaagaaccccatggttctagatacaccaatgtgttccatttctatgcctgaagatctccagatgagactgttgtacctagaaaagagaggtaattgactgaaaattactgaattcttctgtatctttactacatttttgttaaagcttctaccttttttgcagtggggcttgctcagttgttctttccaacggaagctaaagttgctatggacattggtaacgtagaaggtacaagtgagttcacgggtttgtcacctccttcgagtgggttaaccggaaacttgagtcaggttgatttaaacgaaactcctcatatgcaaacccaaagacttcttactcgtatggtggctctaatgaaaacaggtaacaaaaagcttgctctctgtaagtctacccttcatcttcttatgttgctcattttctcttgactgacttcattaccgtttcacaatgcagttgagactggtcgaaggttttttccatatggttcagaggttctagataagtacatggctgagtatatagacgacgacatcctcgacgatttccattttgagaagggatctacacatgaaagaagattgaaaagaatgagatatagagagcttaaggatgatgtccaaaaggcatatagcaaagacaaagagtctaagattgcgcggtcttgtctttctgcttcatcttctccttcttcttcttccataagagatgacctgcacaacacaacatgaaactgcaccataagtcaaatgtaattagatatctttgttaaaagggttttttctttatggatgttactcagattttatacagatgctttaggttcagtttcaataaagagagatggatagatagatgtacaagattaggagtgctgattaacccaaaacgttctaactatacgcaatcttttgttttcaatacaaaaatctaatatttaggttatctacaagatattctcagatacctgaaacttaaacaaacaaagacactccacaaaaagtcaggaaaaaacatgatcatttgtcaatcatagctatctctttacataattacagaagataagactactggtggctaagagtaaagaacaaaaaccattcttccaaacaacctgtaataatgcattctgaacagaactgtcacatgtatgtcccagtaagtagatgttagctgctctctttggcatagggtcggggcaggggcttgtctgaccaatactgtctatctgtcttcttcaacaaagaaagcatttcaagttgcattatatgttaagtgtgcctttccaacatcgtaaagcaatagaagaatattgtaccaacgaaggactgtgcctttccaatttgtcactctgttcagtccagtctaaaattcacttcactgagttcagtggcgtttcaacattacggagagcctttgttctttcagctttctcgaagtccttccttgttcgtttgttggcatctatatctatactgatgagtagagaggtacaatcaaatccacaggcggaaatacttcactatgcatcgacatattctgtgatcctctccatcgcactgagaatttccaggtttcactggttgtgagctaagcaatgagaaaatgttatagatcaacagacatctgcactagattgaagataacgttatatcattgaacggaccagttaatcaggtagatgctttctttatattttcccaagtagctggaccttccgggtgggtattgacaaagtatggcacaataagggtattagaaataccgacaacagtgcctagtgtcagcctcggtattactgcatctctttccctcaaccaaatgtacattgtgaatctctgatgtattctcttcatactataacacaaatatgttggggactctatcacggattctattggataaaccaaataatctattagcataatgatcttcttttctatgatatctttcggccggttaagtatatgaggcgcccgcttaacaagctggctaaccacattatagtccaaaccagccttcacaaagcaatcaaatctctcctgtagctcatctcccctcccttggaactttttcagagccctcaccatctcatcggaattctctacataccctaacttcaacaagaatgtcgtcttctctgcattcctcgaatccagtgaatcaagttcaattctacctttattagttttagaagctatactgaacaatctcaaaggctcttccttaatgatctgacataactcatctcttctgattttcaatctattccaaacagctctaggtactagcaaagaggatgaacagatatgcttcatgtgacactgtaaaaacctaacgacaaactgcttttctattctgatacatttcaagaatttcaacgcctctaaaattctttttacagatttctctaataacatctcggagttgtctatcagtaatttatcaatttcattcatctgaagtccaactttatgaaacttttcaaacataatataagctttattgccagaagtttcacctaccaaatctggatacgcttttaaaagattactcaacttcttctctttaaaccccaccttctcaaggagctccattgtctcaagaatccggcgccagttatatgtttttctaactgacaaataccgcgcaagccaatcgcatcctaagtttaatcccttcaacttatttaccacagaaacaaactcacaatcaatgccaccaaccagaagcaacgggcaacaagtaacaagcttaatgactatagcctttctaagaaccaagatctcataaggttcaagtttcgatgccaaaaccccattctcgtatacaaaaatctctcttgcttccttatacaaacgaccaatcttgtcacggggaatcccataatagcaaagaacatgaaagttctcaaacatggtactgccatcactcaaagcaccacattccgttgaatgaaacgcaaaatatcagatggacgcaaacccaaactctcgaaaaatggttcaaactcattgatgggattgttgaagaataaagtccgttgctttcagtttcagtttgaataagtcttatgactttgtttgtctttcaaataacatccctaagtattaggagatagactagcatttcagttccgtttatttagcagtctgttgcattcttgttatctttgtaacttgatctatttaagatctctatcgtctatgagaataacacacaagttacacatttgttctctgagtcactagttcgtttacaacaagtggtagcagagcttttgttcttaaacgctcaaagaaatgagtgagaaagatggtttgagcattccaaaattcgacggagattacgaacactgggcaatgctcatggagaatctcatgaggtccaaggagtggtgggatctcattgagcatggagttatgcagccagagagaaacgtgatcctgacgggagcccaaagaacagagcttgcagagagtaagctcaaagatttgaaggcaaagaattacttctttgcttcaatcgacaaggcaactctgaagacgattgcaaagaaggacacagctaaagatatttgggagtccatgaaaacaaagtaccaggggaacaagaaggttcaaagcgcccaactgcagagactgcgaaggaactttgaagtgttagaaatgaaagagggagacaccattgatgggtatttctcaaaggtgatggtggtggcaaatgacatgagaaaccttggtgagagcatgccggatgcaaagattgttgagaaaatcctgagaacattggtggagaaatacacatatgtggtgtgtgcaattgaggagtcaaatgacatcacagaactctcagtggattcattgcagagctcactactagtgcacgaacagaagctgagtagacatggagatgatgagcgtgcacttaagattgagggcaggtgggattctagtggaggaagaggtcgtggtggacaccaaaaccgtggaaaaggaagaggaggatatcaaggacgtggcagaggtagcacaaacttcaacaaagaaacagtggagtgctacaaatgtcacagactggggcatttcaaattcgaatgcccggagtgggagaagactgctcattatgcagaactggaggaagatgttctgctcatggcgcatgttgatattcaaagagcaggaaacgatgaggtctggttcttagattcggggtgttcgaatcacatgtgcagcacaagagagtggtttgtggagtttgactcaacattcaagcatagtgttaaacttggagataacaggaagatgagtgtagaaggaagaggaagtctccgactcatcattaatggggcagcacaaaagataacaaaagtttactatgtcccaaagttgaagaacaatctcttgagtgttgggcagctgcagcagaagggactgagaatcatcattgaagatgatgtgtgtgagatctggcacaagcagcagagaagactactcatgttctcaactatgacaaaaaaccggatgtttgtcatacaggcagcagtgagaggagacaaagaaaaagaagaagggaactgtctgcaagctgtttcagatgagaaagttgaggaactgtggcataggcgacttggacacctgaatcaaggaggaatgcagagtttgtcagagaaacagatggtgatagggatgcctatgcaaacaaagaccaatgctgcagagttgtgtgatgtatgcatgaagggaaaacagaacaggcttagcattccaaagaagagttcatggagagcaagtcggggtctccaattggtccacacagacatctgcggaccaataactcccacatcagaaggtggcaagaggtacatcattaactttattgatgactatagtcgtaagtgctggacctatttcttgtcagagaaatcggaagctttgagagtgttcaaagagttcaaggtggctgcagagagggaactcggagtgagtttgatatgcttgagatcagacagagaaggcgagtacaactctaatgcgtttcaggagttctgtaaggaacatgggattaaaagacaactcactgcagcatacactcctcaacagaatggagttgcagagaggaaaaacaggagcctgttgaacatgacaaggtgtatgctgtttgggatgtcagtaccaaggagattttggccggaagctgtgcaatatgcagtacacatattgaatagaagtccctctaaagctcttgcagatgctacaccagaagaaatgtggagcaagcataagccatcaatcgatcacctaagagtgtttgggtgtgtagggtacgcactagtgccatatgagaagagaattaagttggatgaaaagagtagaaaatgtgtgatgctgggagtgagtaaagagtcaaaagcataccgcctgtatgaccctgagacaaagaagatcattatcagtcgtgatgtgcagtttgatgagaaactaaggtggaattgggaagaggatcagcaagaagactcacctaaatgggaagagagtgatgctgattctgaaaaaactgcagagaacgctgaaaatgaggagagagaagcagaagaggacgaacctgcagcagtcactgatacacctgcagcagtcacagatacacctgcagaaaacgaacaagctccagtcagaggaaccagtggcagaacgatacagccacctgtgtggatgaaggattatgtaacaggaggaaaaagcttgtttgttattgatggtgatgaggtaatggcgctgtatactgcagcagaggatccagagagcttcgaggaagcagcccaacatgagaaatggagaaaagctatggaagtggagataaaatccatagaagataacaacacttgggagatcatagagctgcctgaaggtgcaaaagtaattggagtaaagtggatttagaaaaccaaatacaatgagaaaggagaagtagacaagtttaaagccaggctcgtggcaaagggataccaccagaggcaaggaattgacttcgaagaggtgtttgctcctgtggccagatgggatactataagaaccctacttgcaaaggctgctcaaaaggggtggaaagtgtttcaactggatgtcaaaagtgcattcttacatggtgaattgaatgaagatgtttacatcgaacaaccacagggctttgaagtagaaggagaagaggagaaagtttacaaactcagaaaagctctctatggtctgagacaagcacctagagcatggtacagcagaatagaaagttattttgctaaggaggggttcaagaaatgctactgtgagcataccttgttcgtcaaagcagagcgtggaggggttctgattgtgagtgtgtacgtggatgatctcatatatacaggtaactcagactccatgctagctgactttaaggcgtcgatgacaaaagagtttgctatgacagacttgggtttgatgaaatatttcttgggggtggaagtgattcaagatgacaaaggaattttcatcaaacaacaaaagtatgctgcagagatacttgaaagatttggtatggagaggtgtaattcggtcaaaaatccaattgttcctggaaacaagctttcaaaggaaggtgctggagcagaagttgatccaacaacattcaaacagctggttggaagcttaaggtacctaactgcaactcgaccagatctcatttcttctgtgaatttggtgagtagatacatggaacatccaaatgagcaacacatgttggcagtcaagagaatcctgaggtatgtacaagggacagcagggtttgaaatttagtattggcgtggtaacaaggaggagctggttggtttctctgacagtgagtatgcaggagacattgatgataggaaaagcacttccggctatgtgtttatgttgggaggaggagcagtatcatgggcgtcaaagaaacaagccatagtaacgttgtcgacaactgaagctgagtttgtagcagcagctcatggagcgtgtcaaggaatctggttgagaaatgtacttgaagaaatcggtgaaacactagaagaaggaacagttatgtactgtgataacagctctactatcaagctctcaaagaatcctgtactgcacggaaggagcaaacacattcatgtcaggtatcatttcctgcgtgaacttgtcaatgatggagtaatgcaaatcaagttctgtcctacacacgagcagttggctgatggcatgacaaaggcacttaagttggcgacgttcgtgtatctaagagagaagatgggagtatgtctgaaagaagagtaaactggaaaggagttccagtttaagggaaggattgaagaataaagtccgttgctttcagtttcagtttgaataagtcttatgactttgttttgtctttcaaataacatccctaagtattaggagatagactagcatttcagttccgtttatttagcagtctgttgcattcttgttatctttgtaacttgatctatttaagatctctatcgtctatgagaataacacacaagttacacatttgttctctgagtcactagttcgtttacaacaattgtaacttagaaacttagtcaacgctgggatatatcctcctttcgagtatcatcaatcttggacaataaagccaaaacaaaacgaggtgaattcttaccaatatgctctgcatcaacaaaactaagtgttctagtataatgcaagtaatcaaagagagctttttgagcttcattcttcatagctctcgaaacccgattcccgaaaacccgtgtaggtgactgagaccaatgtcgtaaagaagatttatccccacagacaaatctaccactctgaaaacatctcactgcactataaacatgacaaagcttcgaccttgaaatgtggttttgatgagcaatggagaagatattgaattgagcaatcctttctagtttttccagaaatcttgagaacatcactgaaaccctaaacactaaggcaaagagaggaatcaaacaccaaccctaaaacccaaggacaaaatgcaaagctatgtaagattcatcaaaaataatttctttccttgagaactcatcaaaataattgatatttaccagagaattaaggactataaggcgattgaatcctccatcttcacctaattttctaaggtttcatcgcacataatttctctgtgccctttgctaaaacctccatctcatggctctttacttctccgactgtgatcttttcactttccaggcaaccccgagatgcaatttactaataggcccctgaattcttccttgtcatattaatgtgaccatatcttttcttcctacttatcagtatttgaaaaaatggtctaattggtcgtatatcggaaacctaaaaagtttctcaaacaaaaaaattattaatatttacttaattaaatttttattttagtgaaaaaattgaaccatttaaaataagagaaatgttatgatgacttgtatagattatctcatagtttttcacttgaaaatttttttacactctctctcttctcttttcattttctaaattattttagtagtgagaaactatcttgaaaatttttttacactctctctcttctcttttcattttctaaattattttagtagtgagaaactatcttgagagactactaatggaaatggtcttagattctgactatacgttcatgtgacgtataaattattactttgaccgcttataataataaaaatattttatgctataatctgttatgttggctaatgcatctttcattggaaaaattctgttaactaaatattttttccttacatgatatagagattctaaaatgagctaattgacatggtacgctctgctcatcattttctaagacgaattcagtttcaaattcagagtctagtagagatgcttcaatcaggagactaaccctagtatgatgacgattcgctgctataggtctaacataaaaattattcccatacctagaatcactaagacaatgaaaaatacccttcagaaagtacgtcatggtaaacttcaaatcctctaaatcctaaaagattatcctagaacgctccttgacactctacatttcttattcgacaattcttaatttgttttcaataaatagttgagttaaattgaactgattggaggtgttgttctagtaaattaaaaaaaaaactaaacaatgttttgagcataaaaaattattacgttgataagatttaacatataacttctaattgtaaaaaatatagtacatgaaaactatacgaaatatctaaaaataataatttatgtcacgtttgtgattagtaattatcaaaagtaatatactttacacagtatcaatacgaggtttccattcaaaactagcattttcgttttttgtattttatataatatccattcaggcccggcttagaggcagtgctggcagtgctaaagcactgggtccaccatttttttctaatttttacaaggttttaagatataaattttttggtggagcggcttacgtgtgaagctccacaaaaatacattttaattggacaacatgcaaaatgatatactactgagtacaatatctatggtgcactcattggtacgtcataaagaaaataatattatctatataattttctgcaactctttatataattggttacatttttaaattaaaaaatgtgatagtttttgaagataaaaaaacttataatatgtttttcgaccaatatatcatatattttaaaacagaaaagcaatatatatttccgaaaattttattttttacactacaacgtataacttactagtgtgtattagtttatgtcatttccttatcatccaaattcaaacttgcataaaatatcctaaatataatcacataatatcaaactatcataataagttttaggttcgcaaaattaactttattccagtgatgattgatgaagtgcggtccattttatgaaaaatgacgtaacttaaaatatcacatggaaaagtacatataaagcttaattagtttaccaacattagttaaatagttaattaactccatttttgattcgctttttccataggtgtttgattccactaagtcgtagtatccgtgtagtaggaattggttataaaacgatcaaatatattaaaagtaaaaaagtttaccaacattttttaaatactaattcttcttccttaattagaaagcacagcaaaattgtttgaataagagttttgaaaccctcgttcatgtctataaataccggaactaacttcacactaaacatatacaaaatcaaacctttcattttacatttgttttctttttcattatctttgtaagctaagcgatggaaacccaaacacacgttttgtttctcttcctactcatcactctattgttaaacaccaccaacaaaacccaagcaagacaacataaaaaccctagttcctcctcatcttcctttcttgtccttaccttgaccaaatcaagtgtttctcttcccacaccaaagtctcaaacccaagaaaggatcaagaagccattatcatcagtagatgttgtaatggaacccttgagagaagtgagagatggttatttgataaccttaaacattggaacacctccacaagcagttcaagtgtacttggacacaggaagtgatctcacatgggtcccatgtgggaatctaagttttgattgcattgaatgttatgatctcaagaacaacgatctaaaatcaccatcggtcttttctcctcttcattcatctacatcttttagagattcttgtgctagttccttttgcgtcgagatccatagctcagacaatccttttgacccttgtgcagtcgccggctgctctgtgagtatgcttctcaagtctacttgcgtaaggccttgtccttcctttgcttatacttatggtgaaggtggtcttatctctgggatactaaccagggatatactgaaggctcgaactagggatgttccaaggttttcttttggctgcgtaacgtccacttaccgggaacctattggcattgctggatttggaagaggtttactctctctcccttcgcaactaggctttcttgaaaagggattttcccattgtttcttgcctttcaagtttgtcaacaatcctaacatctctagccctttgatcctaggagcctctgctttatcgataaatctaaccgactctttgcaatttactcccatgttgaatactccaatgtatcccaacagctactacatcggtttagaatcaattacaataggcacaaatatcactcccacacaagttcctttaaccttaagacaatttgattcacaaggaaatggaggaatgttggtcgattcgggtacgacttacacacatttacccgaacctttctactcacaactcctcacaactctccaatcaacaatcacatacccaagagccactgaaactgaatcaagaacaggctttgatctctgctacaaagtcccgtgtcctaacaacaatctcactagcctcgaaaacgatgtaatgatgatatttccttcaattacattccatttcttgaacaatgcaaccttacttctcccgcaaggtaactctttttacgcaatgagcgcccctagcgatggttccgtggtgcaatgcttgttgtttcagaacatggaagatggagactacggaccggccggagtttttgggagctttcagcagcagaatgtgaaagttgtgtatgatttggagaaagagagaattggcttccaagctatggattgtgtcttagaagctgcttcacatggactcaaccaaggctcatgaacaaaaaaaaaagtcatcaatcttatgagttgatttcggaattgttttggcttcatcttttttttttttttatgtttgttttgttgttgtttaaactgtttcgatgactctttgtatatggtgggagttttcttttgattatgtaatgttttttttataattacttttcttcttttggattaatgattattcctgaggtggagactttactatatatagagagaatgagttggaagatggaacttgggaacaaatcgtcgtggaatacgaggtgtattagactttcagttgtgcaaagggacaaaacaacatgatctgttaaaatttctttgtttatacaccacaaattaatgcatacacacacagtatacatgtgtaacgtttttgatgttcccgtgaaaatagatgtgtatttagagcctagatggatagattatgattggatgaaacatttgtaatattttgacaaaagtttaccatttacgttaaatgtaatagaatgaacattcctctaaaaaaaaactccctaagcaaaaaattactataaggatgaatggtatatcgcttagtcacgttttcaaacgctatttttttacattcaaaatatttatcaaatttttttcgatttcacgttttcgaaaagtaattcggctgtatactactaggctactagcatgtcaatatacctagaaaaaaacatgattaatccactagaactatattttcatccattaaactaatttattcagttcaattcattccactaataattattcagttattccgtcatttcactataattataagttatagacaagttttttttactaacatgttatagctatccttcaaaaatggtacttagcaataacatcttatagctattctgaacatccataatgttttgtcatccaattttgttcttcaaaataaacaagttaaaattaatttctcgtcttcaattctaaataattggctccactgatgaaagcccataacccatatggaaaaacgtgcatttcagcatttgtgtagatagcgatattttgttcgactacacagaaagttttttttctttttgactaccaaagaaatttgattcatagtatcttcgagttaggtaccaaaacatgtaaaacagtctcgtcttaaaccgtccaatacgacttcatgaccgacaaaattaaatcacacggccagttttgacgcgtgagacaacaacctactattgaggatttggctaaacactcgccacaatgcttctattgtattgacaatatttgtgtttatttcatttgttattaataaagacaaatatcataagtaataattgactactactaatccataatttaaaatgttattttttttgaaccaaggactacataactaacaacttgtgactaaagattacaaaacatgttttagtcgttatttttaatcattatagtttatagtaatcgctattattcgttgttattgctaactatgaaatgaacatggttgtacattttgtcccatcactaccaccaaaatttttggattttgttgaaaaaagggagactaaccatggtttacaaagaatctatgaaatactaacgaaactatacacaattatcgactttattattaagagacatcgtctacaatatatgaaggtcagcgtgtaacatatttttgtttttggggcgtttttagtattttagacaaatatagggatttatcgtaatttcgataatcttgtggtttttttagttataagtctcctcttgtcatattcacgagccgtataaaaaagttgtttctttcttctctgtttttttgctttcgtcttcaagagagagagagagagagatacaaagagagaaatttggttgtttgttgacggaagcttcttcggtctctcttctccgtcttacgattgtcaacgcgtggttccatcttcaattttgtttctattttagcagaagtttctcgagcttcaaatactgtttcagatcaatcaatcagtcaatcatggctagctctggaaacaagaacatcaacgccaaattggtcagtttaattcttctggattttgcttatcctttgaaggatgatcgtcaattttgattagatcgttgatttcgatgagttagttctgtttccaatttggggaattttcaaccaaattctctgatctgaaattggatgattgtgatcgaattagaaatcgcatggtttatcagtataaaactagggtttggagtaaaggttatagattttattcgatctggtagttttgttttagggttctaacgagtcagaagaaaaatctgtttttttccccctttattttgtttttggtggttaacttggttaagcgcttcaggtattactaggagatgttggagctggaaaatcaagtcttgtgctacggtttgtgaaagatcagtttgttgaatttcaggttggttggtggcattttcctcctgtgatcttgatagaggttttcttctcgttcctgtggttgattcttgactttttgatactcgttttgttgtaggaatcaaccattggtgcagcttttttctctcaaacattggctgtgaatgatgcgactgtgaagtttgagatatgggatacagctggtcaggaacgataccacagtttggctccaatgtactacaggggtgcagctgctgctattattgtctttgacattactaatcaagtacgaactcacgatccttgtgtttttagtcacgaatgcactgacttacagaatatcagtggactttagtggcagtttaaggctctctgcaaagttaggtttgcttaatttttgtttttctattgccacaggcctcatttgagagggcgaagaaatgggttcaggaactgcaggcacaaggtatggaatagctgactttggttttagctagtttatgattcctactttctgatagttggtgtggtttatttggtatcattatatgttaatgtggatcatgtgaataggtaaccctaatatggtgatggctcttgctggaaacaaagctgatttattagacgcaaggaaggtgtctgcagaggtaaactaaatctttctttcttttgctgtctgattttgctttgctaatgccaaaaatcttgatgaaattcgaaagtaccgggagaaaatgttaactaacactcggggatgagattcgactggtgcctgtgaaatcttctattacatcacctaccgacttgtttttttcattactgagttgtgttgttaagtagttcttgatattgttatttacaggaggcagagatatatgctcaagagaacagccttttctttatggaaacctcagcgaagaccgcaacaaatgtcaaagacatattctacgaaataggtgagtcattctttcatcaagaaagctatttccaacaattagttgttttcaattaaatccctttttcacttttgtttctcttgttcaaaccgctacagcgaaaaggctaccacgtgtacagccagctgaaaacccgacaggaatggttctcccaaacgggccaggggctacggcagtgagttcatcgtgttgtgcttagattcgtacctgaagagagatctcatttggttagtcacatagtagagaacatctggactttcatgtgtttgcttcttcttcgtctttgttactttactttgcttgcattgacaacaacaacagtgtatatcatgatgatacttattctgcctttgtgaaatctgaagatatttgtatttggagagatttatatatatatatctcttttgtaattagaaaacaaaacttagtccgaaaaaaatgtgcttatctttcgtttatgttttaagtgaatgctcagatttataggcttattatcttttgtattacttaaatctccaaaatgttttttccattgttggaatgctgtaatatgaatgtatatatcaataaaagaaacacctttgaaaaaaaaaagtggcattgcttctctctcccttctcttctttcatctttcaaagagaaagaagtttttccgttcagattttgccggcgttcttctccaatgactttggtctcacttcgatagcatcttcgtccggctatgaattaagtggaatgatattcttgtcaaagctttcgatttccaattgatgaactgcaacttgaagattgaaaagctgttgtttgaagaagaagattcacaaatttgaataaagtggagtcatattctcgtcaaagctaaaatatgaatttcgcctttgtatctttgggccaagattgagatctgccgattgaacaaattttggccggaattgaaactttccaacgtctcaaagacgtcacaacgatctgtgggtgatcggagactcccatcccttccacttcccacgtgtcttccaaacctgtttcccatttgcaacatgttttatatgttgtgtacaac

SEQ ID NO: 835 - DNA, 71618 bp, Arabidopsis thaliana
aagcttttcctttagttggacttgtttgtttcagtatttgtgaaatattgacctatcatattggctctgtattatgaataaaacacaattgtgacaaaaaaacgtaatactaatttaatacaaaaaaggtctgctttgacggagatgttagagtcttggttgcactaatcaatggtacaagactaaaactttaatttggtgcatattaaaggacccatgaagtcagattttggaagaacaaatttgaagagatacagttcaattgggtaaagagatggtaacaagccagctgatattctttctacgaaaagttaaaaacatttttcattctattttattccaaggtttcagtacaacaaatgagaacaaaacaaatatgatccaacctcgaggactttgacagaggcaccaaatttcaaaccaaaagcaaccgaagtcgtataaaatacaatcatccaagttgaaaacagtttgataacatttctctgagatcaagcctctgtgagtttcagacgcggaacaacattcatcgactggagttcctgttaccacgtaatgcgcacaacgattaagaaataacagagaaacaaaccagtaaaaccgaaaacatcagtgattcttacttattttaggaagaaatttatatccagagatcagaattattttatcattttccaaatgggacgaagtagagagtttcaatttgaagaatagaccaatggtttttacctggaatagtagcttgcatgcgtatgggagtttcatagtagcaatgttatcgccatttttacatgttgtacaaactgctttcttaagcttgtaattgtaataacccaacaaaccacaagctctgcaaacctgcattcaaacgtttaaacagtgtatcacaaaattgcaatcatttctcacaaggtttgtcataattcaaaacagtgcattatgatttaattacctgaacttcgaaaggatcactagatatcatgagccgctcgtagatcaacatgctggctccataagcaattagacaatctctttccatttctcccactcttaaacctgcaacagcattaaagatacaattgagaagttgacaaaaaccttactatattagtagaaaacagaacaataacgtaacaagagtaaaatggaattctaaattatttcctaaatcaagaaatacagaaatagaaagtccagagtgaagaagatacagaagcaagaggcacatacctccattcttagatttcccttcagtaggctgtcttgtcatcataacacgtggtccactccctcgcgcatgcatcttgtccagaacctattttaacatatgtacaaaaacgagaatttctctttacattttcagaaaaaatgttactgtactctgatatttagaattttttttttttttttttgtgtgattacaaaacagtagaagatggttcaaataagttaagaggaacctcaccatgtgtttcaatttctggtaatatattggccccataaagatgtacgcttccactggctcgccactgatacctgaaaaactctcaaggtcgtcaggttgatgtacaaataaagaatcatgaacccttatatagctttggaataagaatgagtatgtccgggtgttaacaatgtaaaatgataatgtcttggcccattttagtgtagatcctaaacaactctgtattcaaagaaataaacaacagacactagaatgcactttaacatataactgcacattttgaaatgtgtacagaatcataatgcagtacctgagtataacaagtccttcccactgtatgaaaaccctttttccacaagggtcgcactgaaatgattgaagagcatacggtgacattaaatgccaaaacaaaagtttatatatggaagaacttttatatataagagagaaaagagtaccttatagtctcaaccttgtcagcatgaccacttctttctccaaaagcactaccataatgaaatctaccacaagaaaccccagccttacttccaaggagttctatcatcttacctacagtcatacgactgtgacaagaaatatgttaatacattcgtcagttttaatacaaaatctcaagtaatcaagaacttcagatgaaactcgaaagctttggaacgaagggatgaagctaactgttgcttcaagttagctaccaaaacagatttaagattttatgccaactggaaatccattgttgtttgttacatcgaaaagattcttatagttaaggcaacgtgatgaagcaaaacctccacacaaaagtctccaaatacacccacccacacactcgcacaatgaaggatgttttttttttttttaatccacgttataatataataaggctacatgcacagataaatagagaaaaatcttatgaggaatattttctaaccttggaaacccatgaggattcatgatcaaatcagggcaaattccaagctcagaaaatggaaaatcttcttgctgaataattataccacatacacctttctgcccatgcctactgctgaatttgtcgccaagctgaaaaaaaagccagaccaagacatgattaacactgtagaacatgagggctagggctagaagcataacagtactgaagaaaaaatttctcacctctggtcgacgagtatggcgtatgatatatttgatgcacaactggcctttcttatcagaacagagagcaactctatcgaccacttgcgtctccccttcaggacctttgaaatactctctggccggacggtattgactgaaaattacacaacgaattgtacattggtgattacagttttaagaaacaattatggtcatatactttgaaaagttaactgaatacctatcagataacgcagatgtaaacttagttactgtgtccacagggacttgtttatttatataaatatcattcggtctgataatctcccctggagtagctaatccatcatcatccagtatcttgaaaagaaaaaataattaacatgaaaacgtattcaacatgtatcagcagacggaaaggccacagttaagtaaataaaaaataaacaccaaaatggaacaaagagaaggaaaacgcttatattccgacactctaacttgccctttggataatcacaattaagaaatctccgatcttcaaacacagaataggaaataatcacgaactagccctctgggttatgccagttctgtcatagtttctaggcagtcatattattgttaatgaagcgtctatcttgagaataatacagtcacatattctaataagctacaatcatattgtgcttgctccctctgataagaaattgcaaagtccgaacatgtatattgtcctcaatgtcttagctagggctgtttccacatcatctaaaaatccggaaagaattagcatttgcaacaacactaattcccaaagatcccatttttaaaaataaatgacttgcacaagttttatgatacggcatatgcagacaaaatgtactacctgcatcttttctgcatctgggcctgttctttgtggaatgagtattctgtctgctgtacagttgtcatacttctgggacatagcaacaattctgtttcacaaaacaacacaacacgagaagcaatagttaatgtaatagacgatttttcaaagcaaacgactttgctcaaagagaaatccattacatactttttcataacaatgcagcggccaaaaccacgatccaaggaagatttgttcatcactattgcatcctctatgtcgtatccactaaaactcatgacagcaactgttgcattttgacctgctccaagtttatcgtatccaacctgttaacaagcataatgtattagttccatattattaacacattcctgttagagcaaagaaacttaccaattcaattgtccttgttgtcaacaggggtcgttgaggatacaccaataggtaaagcaatgtgtccatccggttcaactaaatacaaagtataaaaagcaatatcagtgtccaatagagagcaaagcaaaacctgagagatagcataataggcaacaatttgcctaatcacaacaaaactggaagcagcaggatttgcctcaatggaatgatatgaaaggcataaacggacttgcctggttgtaagcaatatttcccatagcttgtttccccatagcacactgcacacaatgtaacaggactaataacggaatgcaaaccaacagaaattgcagctgcttatgtcagattgtttagaaacacaaacctgatatgtatttctaggtgactgattatggtgagggtagggaataagaccagcaacaacacctaagatggtgaaaggttcaatctcaatgtgggttgtgtctgccttagctgcttctgctccttcatccagttccgtagtgccatcactttcatataaagcgatcttaaaacaaggaaaaagagcagtttatcattttaggctgcctacggtgcaatataatataatacatctagaaaatatggagactgagacaaaccaatgcattgttttcctcattgacatcaaggtactctatcaaaccgtcacgaataaagtcatcaaaagtgcgaaccccatccttcaaaaaaatagaaatcagtcagccaatgtatttaactcataccactaagacaagtatgcatgactctaggaaatataatacatgtacctgtaattccttcatgtggtgttgtttaactcttgatattcctttatcggctataacaagtggacggcaaacccgcccaacatcagaagcaacgtaaacacaatgctgataaacattttctcttcagagtcagtctcagttaacatttgtgaattcatagaaacaattggcaggaattttagcaaccatctacaaagttgtagcttttataattgacatccttagctgtatttctactcaaatcaccaaaacggagactacaaattaattaacgaagcttgcacggacaattttcaattcagaaatcccaattttcatttctagctataccaaaagcatgtattaacaaatatatttgggttttgcttcatggacgaatgaacataagctataggtgcccaacgcaaaacttagatacccaaattactgatcaatgaaatacctgcttttcgtttgtgaacacactgacaaactctccaatttttccagctctacgcagccttctaagtgaattggcgaagtactgaaacaaaagaaactcgtgaagaggtgtaaataagtgtattgtgcttgttgcaaaaccatgtatttatataaagtacctgtggcctactatgtttgccaagtattagcccattcaatatgaccaagaatgagtccggagtatgcagctcctctgctgacaatacttccagatctgtaacacccaatttgtagcactgtttccagaaaatttattcaaacacagatttgcattaatcgaccatatgagcaaaaaaaatagcaaaccataccatagcaaccaatgggccttcctcttcatctgttgtgacatgagtcattaaagccaagttcttgacaagcccacaagattcgccttctggggtatcacatgggcatagcatgccccactagaacaaatcacaataccaaaaattagattaaatgatacttctaacaaaagcagtagttttctttacaaatttcagcactgataaagaaagtatcattacctggctgggttgcaatgatctaggcccacttacttttctggacttttcaaattgtggcgaaattttcgtgataaaccccatgctcccgataaaagataaccttgttaagacctatatgaaaagatttctttgagagtaatgtagcatgaaggaggatacagacttacacacagatgtatatagagactgacctgtgtcatgccttttctatgcattctgaaccttttaatatcgaagtttccagttgaaagggttctttctagtccgagagaaatactgtaacgactgtctttattaagacactataagcacaccacaaaaaaagaaaaaatgaaagttttaccaagacatctttgactacaataactatctctgaaaatctactctaagggaaatgttattctaagggaaaagctacagaagcaataaaaaatataattgttgcaatggaatatccaagggaaatgtaagttgataaagcaagtggtaatctgcatgataacacctagttaataatgatctcattgcaaacacatatatatatagattacttcaagacacatgaagggaacacagaataaatcttaaaatatcaatctttgatgttattttgactgaagttcatttacagatgcaaatattagaaggtgtctaaagaaaaatgttttgtgttaacaaaattattgcaagacctgaaccagcagggaaatgtatttctgcacttacctgagaaaaatcaaatcggctagcccggattggtttgttaagaatatgatctacatttttaatggcctcactgagcatcgttttgaacaaatcctgtagcaggagagggagggaaataataggtaaggactagacaaaatcttattgaaaaaacggaataaaaagtactgtgcttggtgatatgttccggcgacacctcaaagagaagagatattagttgtccagataactccaaccgcttgttaccaacataatcctacaagaagacgcacatttgagaacatacgttacaagcaatatgaactttcgggttacaataagacttgtctacagatgattgactaaacaagcaatcaaaatgagttgaagtcttaaataccaatggtcctctaagagacggccaagacattttgtaagccatttcagcatgtccctcccttttttcaaatggctaatcttggttaatctaagtatctaacatgtcatacagcaataatcctaatagaaaataaccagacttcaaatatgttccacaggtacaaaataaccagacttcaaatatactgcagatagaaggccatcatattaccttgtcatccatcgcatctttgtttaacattgcttcaatcattcgtctcaacatcacaccaacgtagaaacatttttgacgaaaattgttgtcaggcaccttaaagagaagaacatagcagtaagtaaagactaaaattttaagaaccaaaagaaattaagatacttactggtacatgcgcaaggaataaatctctgaggatggatagagctcttccgtcctagtaaatcatgtaaatatacaatgcggaattttcagttagcaagacaactttcatattcaaatttgcaggggggtcaaaaacatattatccatctgtgatctgtaattctgtataaagttgaactagagagtctaaaagtggaatacagaataaataccttttcaggtggagttccgtatgatatttttttcacctacgtaataaacagataaaataatgtcacataattcttgccgcaaattgacaaaagtcaaaatctattgttaatataacataacctgatagtctactcttttgttcagagtgtttattcctcaatggaaaacatggaaataaattgcagacttactctctatatatcacagaatgaggtggaaggaactaattataccagatttctttcagctgagtgagatatgagctatggtctttttaacactagaaagagctcaatttcaacaggggggtaaaatcttttctgggttttagataattttcgaagtatacgatttgtgttcactacaaatattgaacagaaaaactattaaatgactctgtaagataactaaatgtctaaaatactgcacctttgcctcaagatagtccagtgcttgtttttgtgtattcacaccttcgctaacacactcctgaaattaaataagcattttgagagataaatatgatgcttcagagatcaaggctcgttaaaccccacaggatgaatagaatagcatggaagaataagaaattcatcaacttttacattcaacaaaaaggactagctaagaaattggtttcatatggcaggttcttttgtgagacacaggtatatgatattcacacattacctataactttcattagctagagcaagagggagaacaatgtcaaagcaaaaccttccattctaagagccataagtggcttctatatctttatgcgtcaccgaccgaccaacgttgctcacaagtgcatcagacaatatgcatggtatcagatttgaatatcattatctatgtattatgacttctttatggcaacacgttagtattgggagttgagtttaaaaattagacattcaccctcctactaaaattgtgagaacaaaacaatcaaccacaagggtcactgcttcgtagtttacttcgcaaatgaaagagattcaaaaattcatacaacaaacatttacatccatagaactacagttgcttctagatctagagttttataaatggaaaggttcactcaaacaccagtatcattacgaaaagaccataaattagacacaagataaaaagcagggggctatagtacttgcctcaatagaaggtaagagtgacgcgctaaaacggggatcccttccaaccatttgtacaatctcttggtcgctctccattcccatagcttttaggacaattataattggaatctatgacaaaatcacatgctcagccaataaaatccaacgccgaaagatctacaattaaagcggaggttgtcataatgtatctacaccttttttacaaatcgatgaagaaataaatatatcttctccttttccatctgaataactgttttgctttttgtcatttcggtgctgcttgtgacggatgcatttatgctgaaaatacgtagtaaaagaaagagagtcagtaaatagtaaaattgataattggatagtggtgggtaaataacggaagaacactgctggagcatgatacaatgatttggcttgacaattaatgtatatggggatgcttgccatcaatattactacagggaccaaaatactgtaagagatcacttacttcccctttttatcagaatcaataataattctgttcttcgaaagttgttcttgtatcaacaacacctgaaatgaacatcaaacaccaacacacgcaatggcatggcttcaggtcacgtaaaaaggaaaggattccatgacaaatcggataactctattgacataagaaactaaaaaccaaaacacgccaattagaacgagaacggtgttaacagttaaataaacacactatcaagtctgaactaaagatatgcaacaacacagaacatgtatccactaagtcaaagtgcggactactaggcaatctatagactccataagatgctgtgagtagattgtatatacgaagtatgaagcaccttctcagttcctttaatgatgaagtatcctccaggatcaagagggcactcacctagaatccaaatgaaatacaataaatatgatgaacaagaagatgtaatgcttgaaataagagtacaatacaaacccaatcttgcaagttcctcttcgtcttttccatgtaatacacagcggcaactccgcaacataataggcatccttccgataattacattatcctgaaataaagaaacatcatattcagcctgaattttccaataaccagcagtttgtataatacattttgtttttcccatttacctttgcactttttgccttgtttccatgacttccgtgaacatattctatattgacaaatattggagcagcatatctgatgattaaaacaagaagttttaagacatttaacacagccaagagaaaaaagaaagttattgatgatgtggaagaatgcagaacaacagaaacaggtggaaaatgcaaaagatatcaccaaattctaactgcccaacatatgctcaaacatcgaacaacaaaaaaaatgtaaataaaagaactctttacgtcatgtctgctaatcggcacatgtgcggattaatattttccaccgtattaacgtttataattgacggttcaccaactctgaccttcttaaacctgcattaaaatttggctacgaaaggttagtttaggaaagagcagaaatccaataaatagaacaatctcaatttatatatcaatgttgtaggacgattaaaaaaagacttcaaaacaccaacggttctacatactgattatgaaacaaagtatatcaatatacatatgtaaagaaattgagataaaaaagatgataaaaaaagtttgaccttaggtagattgatgggtccactgtggatgtaatacgactatttgccttaacaatcttatgaatcccgacattgataaagtagttgaaagaatccaggtgttgcttcacaagtcctctcacctacaaaaacaagacaattacacaatcaaattatggattacctttgctaccaagattacatacattccaagtagtatcaaagactttgaaagtaaagtaacccaattgcattgtttcagctattcgtataaagcaaaaataaagatttttgtgttctgtgtagtaccttcaagaactcaggaacgagctggaatttatctgcagtagacttgataggagctgaaagcttttccttgtcaatgaaatgatcatcattggtcaagctgtttcaatagaaagagtaacattagacatatatctaaatagttcaattaaaatccaaaatcaatgaagaattaacaaaaaaaaaccatactctaaatcttcttgatcaagtcccatcgctcttaactttgcaattaagctgtcagttatctgaaatccatggagaaatataattaacatcaacacatcataatcacaagagaattaaaccacaaaaacccaaatactgaatcctagttttccacaatttcatcaaaattcaaataaaacccagaatttcccagaaaccagtcgttttgagaattgaagacgaagcattgtgatttacagagaagaaacagtaagagaagtaaacctaacgactctacgagtaccggaaatttgtggaagagattgtgaggggattttcgtgtgatttcaaaaaggagattgaagatgaaaatcgaagaagagaacctgcgattcgaaggagattgaagctggagttgatacagtcgcttcgctggctgaagattttacacagtcgaagtcggttaagggaagaggtttaagagacggcgaaagggttttaaacagtatctttgcgtttattacttttttttttgtcatcctttgcgtttattacttattggtatttaattcactttagtagtccttcttttctttttacgttttgaattgttacccaaacttcaaagttgattaatatttgccaataaccacaattggcctctaaggagggtgtattcaaattagaatttaagaagaggctcggtatagtttaaggcaaatgtctttgttttcttttttttttttttggccggaaaacgggagaagtctcccgctttattattcataacaaaagaaaaaagaactataaccgaacaaaacgtaaccttgagaccccattggcatcttccaacaaaatcggattaacaatatccggtggaagattaaaagaatagaaacctaaaggtaaagaaaaagcatagttcgctaacccatccgctagacggttagcctccctatacacatgtgacacacggactaaccagtcccttgataaaaaagccatagcacaaacgtactaggaacgacagggggtgagagtcactgatccctgaagttaaaaaccccaccacaatctccgagtccacctctagctccaacctcgcgacccgcctctcccaagctatgtaaagtccatagtagaccccccacagttctgccaaaggagctgtacaaatcccaatattaagcacaaagcctccaatccaattgccttcctcatcccgcaacgcaccacctgcagtcgcctctccgggattcccatgcgacgccccatccgtattcagcttgacccagccctcatttggtttcctccatgagacttgtcgctctacccgcacaatctccttcgtattcccggggagctttaagtgagcagctgaaacctcatttgccaaatccttaatgaaccgtagtctatcccgacagcggccaacctctccaaaaacatttccacaacgccatttccaaccccaccaagctgccaatgcaaaaactgtggaccaaacactgcctctcacctcaccgtggtctcccagatttacatacaaccactcaagaatagacttctcaaagaaaaggcgccgtttgctcaccgggacaagccgtagccatattccttccattgcagggcaatctctgagaacatggataatagactcttccgctcccttacaaacttgacagatgctcgtggtactcaaatgtcgacgatgcctttcttgattcgtcataatggcttgttgtgctactaaccagaggaagagtctcactctctcaggcgcagtcacgttccatacttggtcaaagaatctcttcatatcttgtctcggcgcctcatctctagtaagaaaagaataggcggtgctcactttgaatctcccatcttgactctccccccacgatattctgtctctagctcccgttatatcatctaaaacaaccgattgtaattgtaatctgttataagaagatatatatggagctatcgccgccatatcccaaccgatcccatttctccaaagatccctagctcgcattcctttccaacccgccggaagctcctgaaccaacaactcagctagaggaatatttgttagccacttatccatccaaaacagaatctcccgaccatctccaatcacccaacttaagcccgggattaccacctctctcatacccaacgctacacttctccaagtcgatgagcagacgcttctaactttagtccaagcaccatcccgaacatcttgtactctgtacttacatctcatgattctcgcccataagctatgatgatcctgaattagacgccatcctagcttagagagaagagctttattcatatcctgagctttcctaattcctagcccaccttcactcctaggtttacaaactcttttccaggaaataagatgctgcttcctttgagttacagagctgccccataagaacgatctagacactttgtctaacccatccaacgttgatttcggcaaagcaatggtgctcatggtgtgaaccggaatcgacgaaagcactgccttggtgagtgtaactctccccgcaagcaatgtctttgttttattttgctactttagtctttattgggtttgtggtactggtaggggtttaatttttcaaaactaaagttaagggtttaaattcatgttgttaacaacggtcacgggtttataaccttaaaaaatagttcaccgcatatttaggacaggtcctgcttgtgacatgacctactaactcagcttttcgtcggagatgaattcagtagaagcagtagagaagatcttgaactacagtttcgtgaacaagactcttctcaaggaagctatcacacaaaaatctcctttattcgaccggcttgagttcttcggcgactctattcttgaggtcgccttcactaattacatctgccacacttaccctaacctcaaagtcaaggagttgcgtgacttgcgaactgcaaatgttagtaacgagaagttcgctcgtatcgccgtcaatcacaatctccaccacttccttttactccagaatccttctctatttaaaaaggtctctgctattttattttctagaatcattagaaacagagtgtcactgtctcgagtcattgaatgatttgagtgatttaatattaggttaaaaatttcgcagaggcggtgaggaaagaagatgatccagttccgtatggtggattagtgaaagcaccaaagattcttgctgacactttagagtcaatagctgcaactgtttttattgatgtgaattatgatgtgaaaagactctgggaggtctgtgtctacttaatgtggtttttgtctttggttccaattctaaggtatatgattctcaagttattaataaaaaaagagaggaaattttgcagatctttaggagtcttttggagccaatatatacaccggatgatttactgctgcaacctaaactaccatttcttacgctttttcgcttagctgataaacacggcagcgaatcgacttcaggtattcgaaagatgacgacatcaacaaaaatattgctgaggtatatcttgatggtatatttttagcttctggatgtgctaaagtatagatgccgctaagttgtttgctgctgaggaagcgatacgaaagttgtcagatcagaatgtatgcctattgaaaagattaggaataaagattgtctagatgtggaccttgaagatgtgaaagggaagtcgtttgagatttgctccactgaattattttctctgtccactgtttctgagaactctttaactgatgaaatgtcacaagaagaggtggttattgatgaggatagtccgaatgttgaacctgaagatgtgaaagggaagttgtttgagatttgctatacgagaaagctccaaatacagactggttcctctggaaaccctttaacctatgaaatgactacaaaacaaatggttgttgataaggatagtctacatgtggaacccgtaaatgggagaggggagttgattgagatttgcaccaaaaataagtggccaaggccgattttcaggtatatcttattcctacatttttctttgctaagtagtacttactacttaacaagaaccatgattcatagtcaaacaaatatctttgagtagtctagagtcttatagtctcagaaaaggatactgtgtttgcgaatccgtggttacactgttacaatcttaggtagagcagtcacatatatgctcgaaaaaactatacttgtaagatcaatgttagatagctatgttttactttgtgtggctcaacaagcacgaatgtgtcatattaatttgaacacttttgttacttttccagtgttcaggaagaaaaaggaccaaaaaatgagcccaaatttgtttgttcagtaaagattgagataccaaatatagaaggaacctttcacatgaagggagatattaaatcaaagaaaaagcaagcagaaaactccttagcctaccacatgataagagccttggaatcttctctagtgagtcttgtcataagtaatttacaaaagccgaaaagtttagatgagaagaataatccattgctcttcagctcagagatggattcttcagtggaagcagtggagaagatcttgaattacagtttcgtgaacaagactcttctgaaagaactgcttacacacaataattcacctttattccaggggcttatgttcgttggtgagtcggctctttctctcgcctttacgaaacacttatacctcacttaccctatgctcgaacccaaggatttgtctgtgttgcgagatgcgaatacatgtcatgacaaatatgcttgtgtcgccgtcaaaaaaggcatttaccaatcctttataggcagtgtcccaaagccagaaaaaatggtatatttttaaagttcatttcttgtgaactgagaacatctctgttgttatgatacactcatcatcttttgtctatctcttagactacagatttcatagagttgatgggcaaagaagatgatccatacagagttgtgaaagcccccaaaattctcgttaatcttctagctggtgtagctggagctgtttatattgatgtgaaatataacgtacaacgactcttggaggttggttgtgtttctttcactagatatttgtaaacaatacgaagttatatgactcaatttattgtagaaagaatggaaattttgcagatcttcagggttcttttggagccaatatatacactggatgatttacggatgcaacttaaacaaccatttcttatgctttttcgtttggctgataaacacggcaagcaaatcgacttcaggtattcgaaagatggtggcagcagaaaaaatattgctcaggtatatatggatgatatgtttatagcttccggttgtgctaaacgtatagataccgcaaagttgcttgctgctgaggaagcgatacagaagctctcagaatgtatgcccatcgaaaagattattcatcaagataatctagacggtgaggtaattcagactggatcatcttctttgcttactgcctttgagaaccctttaaccgaagaaatgacacaagaacaaatggttatcgatgaggatagtctagatgtggaatggaagttgtttgagactgaagagctccaaatacagactggatcatcttctatgtccactgtctctgagaaccccttaccttgtgaaattacaccaacaaaaatggttattggtgaggttagtccgcatgttgaacttgaagatgtgaaagggaagtcgtttgagattagctccactgaaacatcttctttgcccatcgcctttgaaaacccattaaccaatgaactgacacaagaacaaatggttattgatgagaatagtccatacgttgaacctgtagatactaaagggaagttgtttgagagttgctctgttgaatcatcttcgttgcccactacctctgagaacccgtcaacatatgaaatgacaacaaaacaaatggttgttgataaggatagtccacatgttgaaccagaagatgagaaagggaagttgtttgaaatttgcgccaagaataagtggccgaacccgattttcaggtatattttttcctttcttctttgctttagcatgaatctttcttttctaattactacttactgcttaactaggagcatgatccgaagtgaaactaatatctttgagtagtctagagtcttataatatcaaagaaggataatgtgtttgctaatccgtggttaaactcgtacaatcttgtgtagagaaatcacatatatgctctaaaaaattatacttgtatcaacttgaaacttttttgttactgtgttaaacgttttccagtgttgaggaagaaagagggcaacaaaacgagcagaaaattgtttgttcagttaagattgagataccaaatatagaaggtacctttcacataaaaggagatgcaaaaccaacgaaaaaggaagcagaaaactcctcagccgaccacatgataagagccttggaatcttctgtaatgagtcttgtcataacgaatctgcaaatgcatgaaaatttagatgggaagaagaagaatctgcaaatgaaggaaagtttaaatgaaaacaaaactctgctgcattcaacaaagaggaggagaagactatgaaagaccattgtctctgtagccagagtcactcacctctgcttgtgatcacatcatgtctaacataagttcttgtcatagtataacccaacaactcttgaactgttgtcttttgcttaatcttatccaaatattgttttatatttattttttcctattgtttcatattttatccttgtgtgaccttaatctaccctctttcagagaaaaattacaaatcaaatctaatatttactaaaaatatcataatctcatagaaagaaccaaaaaaaaaacaatcttcaaaaaaaagtatactcttcttaagaaaaagctaaagagacagaaacaagcttcgtatatttctcgctgctatttaggcggttctcttctattctcttctcttctcttctctattttctcttctcttcttcctgctcaatctctgcttctcaatcttcggctggaagtatcacagaaaaatcgaatttaaaaactgacctatatatcggtaagaaaaaacaaaaaccccaaagtagtttcgttcctacttgctgatgctgtgatgcatgtattcagcttcacaacatcattcaaaattttggatttttatgacgtttttgtgggttttgtagatccgtggaagtcgaatttcgtgtaaaatagagatgggggaaaacgatgatggttgctcgactcagctaatcgatgggaatggtgaatttaacgttaagggtttggataatttcgtgaaaaagacgaagctttctgattgtggtctttcttatgctgttgttgcaatcatgggtcctcaaagtagtggtatgatattctgagtttgcttttgttcttctttaatttgaagttcgaagttaattctaatcaaagttacagttttttgttgattttggaatctgggtatatgaatttctcaactttactagattctatacttaatgatttcagcttgagacatttgcaaagtctttgacttgctgagatatttcaaatgcttattgttgttgtatgtcatttcagggaagagtacacttttgaatcatctttttaaaaccagttttcgggaaatggatgcttttgcgggaaggttagtgattgtcatttgtcaattattgttttttataatctttttgtggcaatgccacttttggggttgaaattgggttgactttgtaaattactcttcattttcattttcaggagtcaaacaactaaaggtatttggatggctaggtgtgttggtattgagcctttcacaattgctatggatttggagggtactgatgggagagaaagaggcgaggtaagatgactgaatcacacggttagctatatttagttgtaacccaacaatatgtttttggctaactagctatgaaattttcagaaaaatttgaatatttatggatacttatatctttccgatacttatacatatacttgatccttttactttatgtgtgtctagcatttttcttattattctttttgtcaatggctcatgtgtttttcaggatgacactacatttgagaaacaaagtgccctgtttgctatagctgttgccgatattgtactgataaacatgtgagtatgttttgtttgctcgttactgatgtattttaaacattgagcacacagttaaacagccagtgttagaaggtgatagatgtaaagccagtttattattggatagttttatgttttacatctcttctgaatcttactatgttagatttgaaatcgaataagttattaatgaactaccaacacaggcatgatgtaaatcttaggcaaaaggtgtggccgttttggccatggatatactttttttgggtagattattaatgaactagcgaactccacaggtggtgccatgacattggaagggaacaggctgccaacaaaccattgctaaagacagttttccaggtatcctgatatgcttacatatggaactggaacgttatgttcaaccaataggtttgataacttggtcattactcattattgcttttgtaggtcatgctgcgattgtttagccctcgtaaaacaactcttctttttgtcatacgtgataaaacaaaggtttggtttttgcaattgagtatgattcttgattgtgagttcatatttcttagattttctgcttttgttcttagactccaatagagctgcttgaacgtgctctaagagaagatattcagaaggtagtagcacgcagtctcttttagtttccttttatttttgacggctttttcctctctgaagtttgggtactggttatggtttgttgcagatatgggattcagttcgcaagcctgaagcacacaaaaatacacctctaaatgaattcttcaatgtaaggagatcattttccaacatagatgatacttcttatgatgaatttcaactggattagcgctggattgttactaaattgttcatgaatagtcctgtctatcttttccttagttgataattcgctcgatatatgcttgtaggtaatgattgttgcattatccagctatgaagagaaagaaaaacagtttgagcaagaggtattattctgatatgtgaaacactcgtcttttgaagcatcaaagtaaatctaagaccgattcccttgtttcatgggaacttccaaataggttgctgagttgaggcagaggtttttccattccatttcacctgggggacttgctggtgatagacgtggtgtagttcctgcttcaggattttctttcagctcccagcagatttggaaagttataaaagagaatagagatttggaccttcctgctcacaaggtcttctattcattcaaatttatatggttaaaccttgtttacctatcttgtgacctaaagttgttttgttttatgcttgcaaggtaatggttgccactgttcggtgtgaagagatagccaatgagaagctgcgcgacttggcaaccaatgaggtttgcttctgcggcctccttacctcctttaatttttcttgctgatttaaatgttttgtaacataatggggatataacttatttagagttggttagagttgcatgaagccgctgaaggtggtctagttcctggttttggcaaaaagcttagctctatccttgaaaaatacttctcagagtaagccctctttttttttcctgaagtatttaattcccaagcaaagtaattttgcctaatcttgtttcgtctaccccttcttagatatgacgcagaggcaatatactttgatgaaggagtaagaaaagagaagcgtctacagctgaaacttaatgctttggatgtatggcttcttccgtctttgggtttgcattaaacagtgttgactctggatctggttacttatgagttatgatgattgcgtctcttattttcaacttttctctaaattttcagttcgtatacccttcttatgctaccatgttgggacatctacggtccaatgcactggaatcctttaagatccgactggaacagtccctaaatcaaggtgaaggattcgcaaaagctgtgcgagactcccaacagtcttgtctgatggtgtttgacaaaggatgtgaaggtgagagtttctacttcagtttgtgtgcttcaaaagtagagtttcccttatgagaaacaaattgttttggccaaaaactacaaaacatttacataaggatacctccatttattaattgtgttcgtctcttcagatgctgcggttaaacaagcaacttgggatgcatcaaaaatcagggagaaactttgtcgtgacattgatgctcacacattttttgctaggagtgctaaactatctgaattaactgccaactatgaggttctgttttggtttttctattcttttgatatcttagctttttagggctcgtatttaaatgttttgattcatgctggttcacagaaacggctaactcaagcacttagtgaacctgttgagtctttgttcgaagctggtggaaaagagacctggccttccataaggaagcttctcaaacgcgagactgaaacagctgttacagattttctggatgtggttactggttttgagctagatcacgctaaaattgatgctatggttcagaatctaaagaactattctcagagtttagtggagaaaaaagcaagagaagaagctgctaaaattttaatccgaatgaaagataggtaagaaaaaagaacagagtacactcctaatattggcctctttttcagtttcctctgcttgatattattccaaacacatattaggttctcaacagtcttcagtcatgacaaagactcaatgccacgggtctggactggaaaagaggatattagagcaatcacaaaagatgctcgagcagaggtaacttcttagaattaatggcgaaatggggcttgtcatgaaactcactctgtctgttgctattctgcaggctttaagtcttttatctgtgatgactgcaatacgtttggatgaaagaccagacaatattgagagtactcttttctcttctctaatggatggaactgtttctgctgcatcttcccacaacagaagcgtaggaacgtctacagatccacttgcatctagctcttgggaagaggtaaacagtctaagcaagtggtctctagtataatctggttgaaaaatgtgactattattaagacatcacactaaatggaatacgaaataatccaatttagtctactttaccaattatttatttgttccgccaaaattaggacatacttggcatcgtggctcatgggatgaaccacttccacttgtcgtcaaatgaattaccaatgttattgttattgttatgtgtgcaggttcctccaaataatatactactgacgccagtgcagtgtaagtcactgtggagacagttcaaatctgagaccgagtatactgtaacccaagctatttcggcacaggtgattttgaaaatctacctcagaatttatgtgtgttataagcatcatttagtcaacggtatgttttcatttttatttttcaggaggctcacaagcgaaataacaactggcttccaccggcttgggcgatcgtgttgatgattgtccttggtttcaatgaattcatgatgcttttgaagtaatatcattttccttgcactcttttactattcattcaaagattctccccaagtgtttcagctatttagattcactggcatgtttgatattattggaacaggaatcctttgtaccttttgggtttcttcgtggcgtttttactctccaaagccttatgggtgcagcttgacattccgagggaatttcaacatggcgcagtaagctcttgctaagcttccattgttccaaacacatttattttcagacattatcttaacaccatgtttcctgcatctgttaggttgctggagtactgtccatcacgtcgaagtttcttccaactgttatgaatcttctaagaaagcttgcggaagaagcgcaaggaaaaacaacacaggaagttccagacttatcagcttcccaaacctatagacagcaatctccatcacactccatctcaagcacaatatctgaatctgtcgcatcaaacatatcatctgctggtgatgatgcagaatactcaagcccaagcccggccctggttcggagacgaaacaccaacaatgtacaagaatcagaaatctcacaaatgtaaaccaactaaaagtgcaagatctaccgtagaacaagtcatgtcagttctgacaatggtcttcataaaaatcacactgtagttctatatataggtagtgtcttgactcagaaacgaaatcttcttctttttttcacaagtcgtattattatatcatcacaggcattacaaacagatacaacagtggagacatccacctcatgacttaaaattctgactgattatatcattttgaataaaaccatagatatataagtagctcaagttattggaatctaggataagctttccaaaaaaaacaaaacatgtttccttcaagctcattggattagtattgagtaaaggtttgttgatgtctgaaaattaaccacaccaattcattacaaagaatcaagttgtacaacacgtagctatagttaatatatatcaagtcgaaaacttcacaagaacttcgagaagtgaacaataactcgacagtatttccagattctgatttttagacaactttcttgaattgtttcttcaagacttgatcttgttcctaagttttgggattgttaggtctgcacctccaaacccatccattacacctttggccgatggaaactcacctcttgccgttaaacttcaagcaaaaagaatggtaaagaaaatgagcaaatgaacaatgctccacagaagcacatttcaggctttagttctgtagaataaggaacaaaaatctgaaaagagacatctgaaaccgaacatcatacctgcttcgcatgactacacacggcatgcctatcatctttgcagcagaaactccaggttgactaccagcaacaagtacacagttatttacaggtaatcctatgtgttccgcagcagcacgcaatgcaacaacaatcttttccaatctggagaaagtaagaaacaaaatgagaagccatcacttttcttgttgatgtatggaactggaatttttgtagagaagaagagaaagtcccacctctcagatgaggttgtgtcaatatcaacactaagctttagcattgatgcaacttcttctgctatcctctgtttctcagcggacgctagtcagacaaaatttaagatgatgagatattcactacagttacaaggaagatcttagatataaaataaggattagcaaattttctccgagctctatacctgctttttttacttccttcactagttgctcctctagacttgaagaaactcctttcccaagaacaagttgtccatacatactctgttctacctcattgtctccgataaccttcacatttggaagtctttcttgcccaagcatctcgacaatggatctgttcaataatcgcatcataaagattatacaatcacaaaaagaaaacaacagtacgattagcataaaaatctaatgtaggattttgtttatgctaatggattgtttagtagggtttcctcataagtactacttttcaccttgcattttttggtctttctaaatatgtgagattatacaatcacaaaaagaaaacaatagtaggaccttaagtacttacagggctactttgtctccactcttgcagtaggctgttacgatagcaaccggtactttctccgcgtatgcattatcgataaatctacagctcaaaaaggtgaaatcgtttgaatttacaacttacaagtacaagaaaaaaatctaaagttctttgctacagtttgaaagagatatctacgtgactcactcttgcactccagatctcagaggtaagcttttcgatatgagaaactcatccattgcatttttctgacaacaaacaagttggatctaatatattgatggagttgcgaaaaccttaacttgaaagagaatatagatagcagaaaataacactatgttcaagtatgcaaggaaccttttctcgcaatacactctttacaaaacttgctttctcactggttggcaacgacgaaggccaaccaatctgaagagaggtcaataaacaagtgagaagaaaagctgtcagattttgataactgtgtggtcgcaactcagtaatgatgtttaggcaaaaaaaaatgataatttacctggttgaaatacaaaagcaacattttctcttcatcagcagcaccttttctggtaataaccaactaaacactctcagacaacgaaatgcaattgtaaaatgaactcaatctaaatcgtctactcataccaagagtaatcgaacgggaaacagccgttgattatgaacggaagcataaacagtttgaatggaaccaaattatcaagttagtatctatagactagtaaaagaattagacctttttaaatccctagaaacagaatctaagagatggaaatggagatgattgaaaacaaatagattcttcaaggtcacagatagatggattataaaccaatagcaacaaaacaatcaatgcttaagtatttcaaagtaaacttcaatgaaccaaaacccaaccggaaaacacaagtcacaaacttcgatatatatacctcaacaagtctgaataaactggttcaggccaatttgcacaatctagcccaagcttttgaaaagctggtactcacaataagaagcaacaacatcagcacaataaaataaaaaaacaatcactgagcacaaaagaatgggtgatttaaaagccgcacctacattgaacgcttggcgattacttgaccatgtatcaatcataaccctgacattaaaacagagccaagcaaacaaacaaaagttacccatcactgaatcaaaaaccaacaacttgcttcaaaactcagaaagtttgaagctttttcataatccgaacttacttacctatcaacctcaagtatcacagcgaattcttcagatgggtttacgtcttctctgctagctgataagcaaatcgaagagaatctctgcaatcgcaagcattttccgagaatctgagattttccagggaaatttgaaaaaggcaagaaattgcgtcttccagtgtcgtgtgaagaacgctcgctcaaatactgagtgaaaatagaagtctttgtacaagaaatttgaagattgttaagaattgaacaagaagcgatttccatggctctcttttttctgctggttcatacacaacactagtatacaaaaatcgtgtccaatgataaaatgattattgggattagcataaaaataaagtacacaactttacgggactattccgaatttcagacttttggtccctgtcactcgtttaactctttgaatggttagcgatccatttctatggttttttttaaaaaaaatcggatttttattctaataaaatcgtgttaatccgcataataaatttttagttatgcatcggatttatagtgttttcttgtattggagattacagaacaaattgtagtatttgtaggttaatgcataaaaaagtattgtcgttaactcatcctcttctgttttagtgtagttctattgtacattcaaatttctcagctttatgttgtatttattgtaaaaccgtcttatttttggtaaataaattttacattcatataaaaaaaaattgcagaacaacatgatttccataaaactctttgtagtgttttcttgtttcgagattgttctttggaaccttaattagtctctggataggttcggtgggaataggaagaacgtagttgaaacttgagtatattgctgatagaggatttttagtggactattgtcctgtaaattttactcttcacaatgaaaaggttttctctacgtataatttggtgtcacgtttacttttctgcattaagcttttgctgccaactcacaaacgcatataaacgtgggtaagattttaatatgattatgatgcgctgtgttgtgcgtatttcatagcatcttgatggcattgaaatacgattttggaaacaacctccaatgcacttctcatataaccatcatagaggaggaaaaaggagaaaacaattatttcatttatttaaaagcaaacgatacaataaacttaaacatataaaaacaaattaggatgagaaagggtcttgtgcattattaatctgaggatgaaaagacaatcctatatctatcacttatttagttattttaatgaagtagattatctttttgaattacgctaaggcttgagattcatgtctttagacaaatcatcggcatgttgaatgctgaaagtggagaagcaatgatttttgaagaatctgcttgatcttctcataacgtgcatttctttaaggaattgatccaacatcttttctttgctcggtaatgtgaatttaccgtccaagagctgactgagccaccttgaatgtaattctgatgatttcaaattagagctgctttgaacatatccgatgaaacccatgtttggtatcaacggatggattgttcccctgaaaattttagtaaattagcatcgttattatataagcaacggtccaattttatataagcaacgattattatataatcgttatctattaacaattcttttgaaaattctatgtaaatatatagtcttataaacccgtaaggccacaatcgtatgagccatataattttttttcggcctagaaaaatattgtaaaactatatattattatcgttttaaccatatctttaggtgtatgcaatttttacataaaatgaaactttagaattttttgaattgtaacacatgttttcttaaatatataagccttttacaagaacaaaagacatgtatattttgttacagtatcaaattagcacaacatttcggaatagtctagaacaagtttactatataaaaaaaaaagtgtattaaaaaagtgtacgtacctgtataaaggcatgataccccaaggaaactcaagccatgatcgaaaaggttcagggacaatggctttgagcttcttcatgccatcatatcctgtcgcaagtatcacaacatcagcttctagggtagtgccatcctcaaactcaatcccttcatcataaaaccaccaatttgttgtccttttgaaacggatcattcccttatccgcttcttcaaagaatttctctggcacgagcgccatttgacaagaagcatagtcctcctcgaatgcatggtccggtttaagaccatatttctctaacggaagcttccacaaaacatatgattcgatgaatttggaaactgtggcacgctatgtttgtcaaatacattgtttgaaaacaattagaaagtttgcatgattgcatgcaaattatatataggagacgaaattgagtgtttgaagaggacgaaccagaagagagaagattatagtaaagagagttctaaactagctttggttaggcctctcatgaatgaattgagaagctctagttgagtagaacaagaagaatggtagaccccaaacccaataatgtgggatcacccaatgtggtgttctcaccaccattgtgcatgttttcccttcttttcctgaaaattttaaatatattatttagttcaaaatatttttgagattttaatcatattacatgattgactaatcaaagacttacctgtaaaaaaaaaatatatatatatatattataccttgattagctaatgcagactctaacgccaaatcaatggctgatttcttgaaaccaatcacggccactttcttgccatggaggagttgagaagctttttctttctgcaacttggagtaatccatggaatgcaacactttccctttgaatatctccggtcctttcttcaccggaaacgtgggggttcttggtacatcgccatattttcctgcacatactaccacgtactcaaatgcatgccactgcatgcacacacacaaatgcatattattaaaaagaaacgttttacaatataataaacaaatctaagtaaacttgaatccattatgcatgcaaaatgttttcaaaagttgaaataagtttaataaaaatatttatacgccgcaaaaaaagaaaaaaaaaaaaaaaaaaacgatggttcatatacatatgatatgtaacatatcccaacaatatggatttgcaaacaaaaatacaataagtgattagatgatatcaaatgtaacaaacctggatgtctccatccccggtattaacggcaacttcccagacaggttttccaggcaacaagttgccgtaagcaccgaggtctcccatctgcaaagtcttaccatcaccgatgaacctaagttcaacgactttggagttgaattttataaactttacaaggttaaaatgctttgcataagcctccaaataatccaatacatcgacataagttgggaagctgctttcgcctctgttcggccaaaggaaatcggagagctcatagcttactcgaaccgactggagcttagttgtttcatacgtacattttctccaaacacctccaatcgaatcagaggcttcaaagacttgtggatggtgacgtgctaagtgcttagcggcagctaaaccgctaacacccgcacctatgatagctactcttgatgaagtatgcatattgtagttgtaagccatgaaaaagattatgaaatagagagatattataaaactttttatgtggaaaatattttgagatttgttgatttgcatagaacatctttataaggtgctattgggtcggatcttgtctagtcggatcggatatagctatttgggagcatgtaagttgaaagtataagagttttaatgtcaattaaaaccaatgctaagattaagaaaagtgacgtcatgattctgacgtttacaaatggcgtcagttatctaagtgaaacgagatagcttgtcccttttaaaagctaaagtttggatatgtgcgacacgctattaacaaaacaaaactaaataatttctttacgtaggttcaggcttcttttgccaaactctaggttggtggaagttgatttttttatattttatatttagtctaggaacagaatgttctactctatagatctcttcctttcttttctagataacagaagagttacatatttagttattttcgttctttctttctacatgctttctttgtatttatgcttccgaatcagatggcacttctccgataggtcatacaaaatatcacttttcgaagaaaacaaaatctgacagacttaaaagtacatatagttcattttgataccgtacaatacaaaggtttctctcttttacatcatatataacttaagaaaacattggtcgtaacaatattttggcatcaaaagtaaactcaattcaacaatgtacagtaacaaagaagttatcaagtggacttaaccacaacctatacattacttcctatgacctgacactaattttaccgtactagaggaaactttttcacaatgcgcatcaatataaggaaacgaagtaaatgtgactatgaagttgccaagcagaatcaaaccttagcccggtttagattagatggaaaaaagcaggtaattatgcataattaaagaaccctagcatggagtggttacaggaagaaacacctaattagcttctcaacatccttttaggatgatgagtcctagttcaagtcgttggattgtgcaaaaatgccacgaatagatatataatcaacataaaatacagagagcatggttccaacgactgaaccgacccatgtagaagtcaagttcacatggttgggcatcgaagtgccaaaggtcttttaaaaagaccatttagatggaatacaaagagtagcagttttaataatcattacctctcttatgaatggttattctcttgtgagtgtcttctgtgctctctatcaccatgatggctactacctctgctcgtcttatggctttcttccccattctcactattgtggcgtctctttccttctgactgcttttcaggagggcttcccatttttctctttctgctatgcatcatcggggacacattgttgtttaccatttcaccttcctctgtatttttgacttctcctttaacatctaaaatctcaccatgttctgtacccatgagatcagagttctccgcctttggcctgctctgtactttcctttccttcgtcttttcatcctcaacagctagttgcacatcttccagttctctttcaatcaaatcatcctcatccatcaaatcctttttcctcgttctttcacctagcaacttcttagctttctctcgtttagccttcaccttatctcgaagcaatttcaaatcttttggcgattggctgattagggcatcacccacatcaacatttcgagatttatgaacagcaccatcatcttgtagctctccaccctctctttctgagttgtctttcccaggtccctcaactaaaggtctagagttatggggggcttctctcacattgtccttatgggctggatggctttcaagatgtaggctgctttcttttgtttctctctctatctcctctttgttatcgacactgacattagctgcctcaccacccccattctcattgttctgattcaatactcctttggatgaacccccatgattatcagaatttgattgttcatgggttgaacgtactgatgacgtttgcctagaaccaacatgctcatcggttgaaaccgcatttctggagcctggtcgctgagctgaccctccacctacactactctcgacttcacttccttgagatgcagggacacgattttgctcataaagctcaagcatttggttgctaacatctgagatatacaaaagacgattactcttgaaatcataaagaaaaagggaatggaagtcaaacaaggaaacaagaattgtcaagtcaattcatattgtacataccctccagttgtctgggtgtgacatcaaattcttgccaccaaaccttctctccatctgatggtaacttcactttaaggaacttggccgcaagaaatattgcaccagccgcaatatgatgaggcttaaattgcaggcagagagatgtccgtagactgcaagccacttttcattgtatgaagacgaaaatacaaggcacatagaattattggaagctttagaaggaaatagttcttgaacgtacccatcattaacaaaattccatgcaacttgggcaagtgcattctgtgcaaccttaaatttctttattgcttctaccaggggtttataaggatgataaacattgaggtcaaagcctagagtggaaagaacaattttttctccgtttaatataagctctttttgttgctcatatacttcctgaaaaagtgatataggtcaaatacattttgatatgctgaccaacagacaataaatcaggaccaaaggaccatggttctacaaaacaacgaagcaaagtctgtagctaatactaaaacctcaatgtcaaataaaacaaaagatatggggaaaaaatgatacgttcatctataactagtaaaacagaggtgagaaattaggaagattcagtagtaagatggaataccttttgcttgattttctgggaagcaccaggatccttcttgtttataatctcataggagacaaaaataacatctttcaagggccgtggagtttcctcaacctttccagcaaggaacatgcatacagttgcaatggtctgcagaaacaacatgaagagagagctcagtaaagatccgagtatttttttccgctctagaagaaataacaacaatcacaattcactaattctgcatagaataagtaaaaaagaaaaatctaaatcaaagtggtagcgaaactataaatgaaactacaataatgagctctctataaataccatgaaaaatggcaaggagatggatccactatatataaaaccaatacatttcaataccttaaatactagccagactacagcatagtggttcaaacaacacagaatagagtcatttttttttaagcattcaacttgttcaggtgcaaaacaataaactcacccttctgtcattctttgcatgtgattggcgaaagaagaatcgatgacagaagattatcgctgtagctattgtaacctggggactgattggaaaactatatcagcgactttccaagagagccaaaaattgaaatctctgaacaatgcagaaaccatgactacaaaagcaaaattaagacagtgtggcagttatgtcttcaccactaataactgtctcttccttgtattcatgccaaagaaagaaaaattgagataaaataaacacaacttctacaactttccgtttaaaggtgctagaactaacatcagtacaaacgtatgcctaaaaccatcagcagcacatcaaattccaattaaacgaaacctatatgtaaaggggtaactattatctgtccacaatgatgatgggacggattggacgaactataatgtcaagaaaccaagccaacttgaagcagttaaaggaacaatgcacagaaagaaatctaagatgaggtgatagagaacttacactttcaatctcatgcccaagtcctgcaaaaatgtacagtaggatttgcggaggtatgtttccttctttaagtcaataccatccaaccttgacggtgaattctcttctatttcttttcttccaaaataccagcgggaaacctcttcttgcttttcatgggaattccttgagtgtgatgaaactccactctcactgtaagaacattccccagctagtactccagccattagtatcttctaaaaccaaaaattatccccacctaacaaaagcagagaaccaaaatgtgcatcactttacaaataataataagcctgaaactcaacactagaaaggacaattaaagagaacataagaaaaaccagatcgattccccaacaaacgaagctatgatctttgtaattgcattaaaaccgtatctttgaataacagataatcttataagcatttagaaaactctaagaacaggaatcaactgaggtttctaacagtacacagaagggcacaaagggggagatactgattcatgattagtgtcgtaaagcagagtagcaaaatgacagcaaagaaccaaaatttgcttcactttataacaatctgtgcaacctagcaaaagcagcggaccaaaatggggcatctctttacaatggtaataagtctgatactcgacactagataggataagagatcatcagaaaaagtagatagctatgttttttatacccgcattcgaactttggctttgaataagaaattagctacacggaagggcacaacggggaagagactagtgacatggcttcaaggaaacataaccacatagtctaaaacgagagtcaaaggggataaatcttctacaagctatgaacatgaatcatgcaaaggatgaacctttacgaattgcaaatcatggaatcgaacttgtggtaacaacttgattaggctaaaaattcatcaccaattagatacattcgatcaaaatcccaaaattttctcaaaacacgaaacgatacctagaaaattagtaattgagcaggaaaaaaacagatccaaagggtttctatagaaattaaccggaagatggaaaaattcgttgagagattcacttgacggtggacaaaaaagaatacccaaatcgagaggataaaggaaatcaacgagaatttaagacagtaattgaacgagggagggaaacaaaaagatggatactttaccttaacttcaatggaattagcttctctagttgcgaattgcagaagaagatgaagaataacgcgtgaaaatcaacaaaccctaaccctagagagtcgcgagaaaacgaaagagggaagaagaagaaaaaggggataggaagtattctaaagagttgtgatattaaaagctgagaccagattcacttctttcccttttttcacattaaaagaatataaataaattcataagctaatcactaatcgtctttattgatatctttaacatttgttttttgaaatgtgataagaacaaaaagaaaatcgacggaaaaaaaaagaaaaagaaaaagaaaataggaaacagttattaggaattagaaatcaagagataaaataaatattaaaagcttattatattttatataggcctaggttataaaaatgcgactttataatttttattatttaaagtaaattttttaaagttgttaactcaaaatgaccgcgatatacgtaaatcacaatatatacatatatcacaaattaaattttaattatctactaaagcttttgaaaaaatataaaaatttcttcaaatatgttttttttgtgtattttgtcaaaagttttgtttttttcttttgttttgttaaaataactccaaaatttggatgtcaactaaacatataaaatggtgagatgtatagataaagattataataaaatattcaatagtatcgaagatgaatgagaattaagtatatatatgtttgtgtaaaacatttatgacaagttagcaatatttatagtttaaatcacatagtatactgtagtagttatttagtaaacaacaaaaaaaattacgttatttaaaaatatttagagagaatattgagattagagttataacatggggcagatgtaggtagaggagaggtgaggcacgtgccccacactcatttttcaatttttcatttttcaaactaataaatatgtatattttagtagtttaaaaaaaagaattagattatatcaatgtaaatataatttcttaaaatttatgaaattcattgaagttgtgtctaggcttatgctttaaaaaaaagaattagattatatcaatgtaaatataatttcttaaaatttatgaaattcattgaagttgtgtctaggcttatgctttagaaactttgatcagatttgattttttttggatttggatatttctggtagaagaagagactattatccattggggttttatgattattcggttcgggtaggtgtaagatttggaatggtcggaaaaaacctacaagttgttcaattttaataaaaatggtttcaattaattaaatttggttacattttgcaaacaattatacatttttgacaaaatataactaatccgactcgaacccgaatttaatatgcccacaaaaaatccgataggtttcgggtttagtgggtaaactcgaaaaaacctagtaaaatctgaataatatgtggatatctaatattatattaaagtttttcttttttttcttctttaaatttataagtatctttattttttcatatttatctataccattataaactaatttagataaacactccataacaaacaatttaatttttttttatctttataaattaaaggatcctaaattaaattagaaagaaaaataataagcttagcaaaaaaaacaagaaacccttcccaacaggaaaaagaaaaaaaaaaaaaaaaaacacagaaaccctacgatacattgagacatgtgatcttgtaaattaactcgcgagattcccaaagaaagtgaatattaggttttgattttgaaaacctacccacgaagcaatcgattgctagaaacaaagtaggaaacctagcctaaagtgctctgtttcagggagagtctttcaatcaaattgggagaattagggctagtcagttcgtagttcgtgtttcattttttaggttgaaaaggtcgtaaaacattaactaattaacttaagaaaaatatttgccaacttaaaagataatgacgtaaggaataagatagttgtgtgcaggagacccaatcaaaattatccccaaaactatgatttgacggatccgtggatgatacaccaacaatgcttgccgttgaattgaatttcgatcggacattaaccgggaagcaattccggtacagtcctctctctcttgctttctgtacatatgcaagtgcttgtttcatgatttgatctctccttttctcttgtcaatcccgccaaaatctaaacacatttaaaaacgaaaggcaatgtgcgttgttaacgtccctctctatcgctacctctctagtggaaccattacggacactcatcagtaccttcttctcacttctctttggactttctcccattagtgagcttaatgtcactaagctctctgtgtcttcttcttcttcaacttctcttgaagctgcgaaaagcattgcttcctctatgatttcttcacttccattttggtaacaactttctccaacgtccgttattgaaccggagcttgtacccccactggtagttgtagttacatcagaataattgtctgtacacaagctatgatcaacattagtgtgtgaatagatgagactaaagccgcacttgacgacagtgcagtttgtaacctctcttgtcccgtccgtaacttggaatcttagtgaagcctcggttgcaacacatcctatactgtcgtcacttttcatgaaattcaaccagctggtgtagccgataaagacatgatcagacttgatctcgcgggcttcatagcttccatgttcagtccaaccaccaagaatgcaactaaactggaacaaagtcttgtcttcttttttgaactcaccgctacatgtaactaagagcctgttattctttgatatgtagtccttgaatgagaccacagcacaaagagctataccggcaagcccgcctgcgttccaatgtcgcggcaggttttgcttcaactctaatccaaccgttcgatgattgaaccacccgggcacttgccatccgggaaagcagattccgatcagaacatcgagagctaatccctgaaaaaggttggtgtcaacaagagaaaatgcaaggaaagatgttgtgaatgaaggggaataccttttcatagcgagctagtgcgtttgacatcaactggattttcttccgagggtaggattcgatgctattctcctcaactttataaagtttggtacagttagtgaagataaatgtggagtgcaaatgctctgtttccgccagaagaggatctgaaaggatggaaatcgtttccaatgaaatgcagccgtgtgcgtctaaccattgaagatttggtggaagcattggaacagagacaagattcttgcagtgcttcaagtcaagccagtttagatggtagagataaccaatactcctcggcaagattctgaactcattactgctcagagataaacgtcgcactgacgataatccgtagattccacgcggccattcacacaaatggcagtttgattgggaagatgtcaggccttgatcaggagataggtgatgcaaaatgtcaggaatcttctttatggctgttccgtctagtagtaaagtctttaagtgtttcaagttttggttaacttctgggaaactctcaaggcttgaacaaccagagagtattatttcttgaatagcttttaggtttcctatagagtcagggagactcaacagattcttgcagtctttcagtttcagcgagataagcttttggaggtctccgattgttgaaggaagttccttaatggcagtgccatctaagtacaattcttcaagattctttgcaatcagcttgaattccttaaaccttgagcagttgctgaggattaaagttcttagaccaaccaatgttatatctggaagagactcgaggctcgtacatcctctcagattcaggaacatgagactttccatgttctgcagcacttgaggaagcgtcttcagtcccgtgcagccttcaaggtttatactttgaagcttttgagcccgcgataaacccgataatgagtgcagcttacttgaatgattcagatccagccactgtaagttggatgtatcctgtgatcaaaatgcaacattcttgttatgatgttatagcattaatctttggtatgcataaaaattatatataccttctcctcctcccaaatctgctcaatctgactataaggcagcttgaggtcgataagattctttgggtcaaaatttataggaaggttcttctccggatatttaagccagttaagatatcgaagctcttgcggcaggaactcgagtccctcggggaagtttagtttgctgtcttcagcttcacattctctatgacaatgagaattgtagaacttcaagtatctgagatcatccattttgttgaacgtgtcactgtctaagcccatttcctttacctcgaacatgtcaaggtaaactcctctgaccttggttgcttcctgggaaaatgtaaaatagtaataagtgaagtggcaaaaaaagataagagtttggttgcgacttagtggagtgtgctatactcttaacagatttgtgttggtaataatatagagcttaaacttactaaccgctttgttcatgagaacatcaacaatctcagagtgctttgagagcctacgctcacttgttgtattttcagaggatgcttgcgaattcagacctatcgcgaaagtatacaacagatcattcatctcgacacgatcgccactaatgtcgatcaaaaacttatcggctagatcagttatttcactcgcatctgcgtgagccgaagaaccaagcaatctcctcacgtaactctcattctcaaacctgaagaaataggcaatgtcgaggaacacgatcttgtgctgctccttaagctcgtcataaggtattctcaaaacatcttgaatcgtgttgcttgggctattagcaagagcactaagcttttctttccagtaactctcgtctttactacgaagctcacgagcaagcagcttgagaactgatggatgtcccatagagtaatccacaaactgttttgcaagatccgtgaaacttggctggtagaaaccgtcactagcagaaaacgcgtgatagttgaaatggtttagggcatcacagctactcagccccgggacgagataagtgctgttgagtccttgaatcaccgatttgctgctcgttgtgatcacaattctgcttcctgcttttatccagtcacacccaccaagaatcttatctatctgactcttgtcacccacattgtcaagaacaacaaaaactttttttccttgtagttgagtctttatgtagtcaatcgataacttggctctatttccatctctcccattgtttttgctcttccataacccgagcaataggtccgtgtgcagcgtctcgtctaaaaaaggctctggcttctggctcacgtcatctagaaacatcttatgcaggaaatgttttccacattcactgaatagtctcttggcaagagtcgttttacctattccaggcatcccaacaacgccgataaagcgagtgacattttcagatttcaactctagcttctcttttagttgctctacccttgtttcaatcccatggagtagagaatcatctgaaggagtagtcttaggctctgcttctccttctccttctcctctcggcgattcactttctcttcctcgtggaatctcccctgaaattgttcttaggatttcctttacatgctccacgatttgttcaacctccgcaccctcgtcgcttccaaataagagagagagagagacaaataataatagtcagtcaatttttcttagatttatttaataacgaaacaaaagaaagaatacatgtaataatgcttaatagatgtaataactagcttgaattatacagaaaactaataatacatgtaataactagcttgaattatacagaaaactaataatacatgtaataactagcttgaattatgcagaaaattttacgtaccaatgttattaaccataatttacacaatgcattttcaatgagttagtaatatatgtggacatgtgatactctaactcttttacatatcacctaacctggatggtcaataaaatttgggcaattctcaaaaatatcaaacttgagtttttgttttccaaaaataccacaaaactaaaattaaatttttaaccttcgaaactaaattattaacataaacactaaaccatattcccaataccataatgttaagaaaaagttaacccaaacgtaacttaaaattttaaattatgaacccttgaaaactaatttttgtgtttgtgttattttatgaaaatcaaaaccttctatttgtatatttggaaacaaaacttgaaagtgttgtattttgcagaatttctcataaaatttaggaccatgacaacttttgtgtatctatattcctcaaaatataacactttcaagatatttttaccaaacaaactattaaaataataccaaaagttttggttttccaaaaatatcacaaacacataaattaatttttaaaggtccaaaattttaactttttaggtttgggttgattattttagggtttaagttttagttttgaaggttaaaagttttaattttagttttgtggtatatttgaaaaacgaaaacttaagtggtatttttggaacattaaactaataaagtaataaaaccaaacacatacaaccaaacacaactaaaagaatttcacaattattataaaattcaaaatgtccatatgatattccacaagtaataataaagacatttaaaggattttgtaaagatttaaaataatggttctcatataatttttgtttgatttgtttttataatttctttgaatcatcatataatatatagattactgaaaatccacttttttgcatatattttgattcaaaattttttttaagtagacatttattactcaattacatatgaaacaaaaagtttatttaacgttcatgtcaactaaaatgtttagatagtggttcaatcatgttataaataaaatcaaaatggatttaaatccaaatgagaaggaaatttaacttaacaagcatataaatttaaaagtttgtatttcgttaaatttgatcctctcgtccaactatttagtttttctccaaattaaagattgctcatggtcggaccatacttgcagaactaccacggactagatcatatatactttgttccctaactcgtgccatgctctgttttaacagctgccttattttccagttttgttaggttttcatatttaaactctttgtatatatttttctattttgataactacacattttaaacaaaatatatatatcattaacccggcgttacgacacgagttagattctcattttatattttgtgtataccaccaatattagaatatcagacatgcaagtattctatggtttactctacactctcccaaaagtggaatgtgttttctacacttaacactatgttctacgaaaattagaataactgttataaacttgacattatgttcttcgaaatttaattgtattatgcgacgtttagaattatgttaaacaaataaatcgaaacataaataaaggaaaatgaatatttttataattattttatctatgcaaatcgtaaatagttttaagattacgtttacaaattttagaaaacgtataattatatcaaaagtttaattaaattgttaatttccaaatgttaataatatccacactctaaacgaagtgcatatgtaattatgtgaaaacaagacgtgaaattagaaactcgttatgtatttctaattaaaataaaattaattaaatcacatggtagaagtgcatatctaaaaacaaatacttgcgtttcaaatttatccgttcggatattaatggagtactacatgttcatatgagatcatcggattaaaattattactcacagactttacaaagaaaaatgacaaaataaaaagtcaagtttttttggttttaatggcaaagaatgattgtattatactatgaacgtaaagttttcataaagagagataaatacctattttcctccaccctcttgcctgtcttcgaggtcacaaactctagagcctgcttccatggctcatatctttcactatgacgcaacactaatgtttctaatttttcaccaaacgatcctgttaggaacctcacgattttaacgtccaccttgtagaacactggaaataccaccaaggtccctgcctccacacactctttgatctttaccagctcatttaagcaccattgtgactcagtgtacctgcttgaaatgaccacaatcgcaatcttcgactcttgtattctctggaataggttttccagacctgtgcccattgtttctcgagtgtctatgaacacgttgattctttccctctccaaggctttcagtagatgactgatgaacttgtgtcgcagctcagctcctcggaaatttatgaacactttatgttgcggcggcggctgctgctggtgaaccactacgtttgaggaggaagtcgccatcaacgttggagttgtttttcctttcttttgtacaaaatgaaggacacaaacgttttctttttacttctttttgcaaagtggcaaaagctaactttcttttagattggtgaggaaaatcaatcctaaaattattatgatttatgaactgtagtgacaattgatattgcaccaccaatgtcttataaatatgggaacacgtgattatatatgcttggattgcattcctccgataaaaaagttatattttttaaaacaacacgtcattggatattcagatctacgtcgactaacttcaacacgtcactcatgcatataggttagtagattggcataaagatatctccactcgagcgcatacctgtgagtatgttggcacttggcatatagatgtttcttgtagtttttacttgggagttgtcttatctatgcataagatgaattaatttgttatgcgctttcttactcttaatggactcactatgaaagatacttctgccttctggacttattacgatctctctagtcacttaacaacactcccgatgagaaagttcaacctaagatcagttgatcagtcaaatcccagtgccttaagacttaagagcccccccaaaccttgtagtggatcagcctcgataatgtctcataattcataggagcttccatggttctagctacatcatcatgcgggcttatcagggttggtcatgaaatttttagtgcgccatacggttacatcatatgatcatcatgtgttcatgccggcttgtcgcataatttaaacatcacataaagtgaataaaacatcttaagttgtctagggagtttgcaccaccttttaaatattttgtggtctaactgctcgaaggagttcactaatcaaatccaaaagggcacttcctagttatacaaaggtaaacatgaaacaaatgcaatcgactttaagaaagaatcacctatgtagaattacatatatataaatgtatttaaataattagtatccgaaatttaatagatatatgttgagcataatatatacgagcccaataaaacgtcattttgccttcttgaattggggcgagtttagatggtcacatgatcaaacataaaataagaatgacaataaatcaagacaaataagttgacgatgaaccccaagcaatcaagaagacaagagcttagatactgtccatgtgtagtttttacctacgaccatccatcaaatatgtataccttttatctgtaatggacaattacaaagagataatttttgtaacaatgcctagggaggagtatgtgatcgagagttttctggattttgccgttgacggctcagtcaaagggcctcctttgaaaggcttctaaagctttttgccttcgtagctttgctctttcgttttgcaattttcctccttctcgagcaaaagatatgggacgaacaacaactaaagtccaagaaacgtaagttaggtaatcacgtgatcaaacattaatacaagaaataaagtctaatgagtcagcgatgatccaaccgatccatgtgtagtttttaccgacgactaccgaatatgtatacgttttatcagtaacggacaattattggacgattatttatataacaacgcgtttaaagtaaaaccgtacatggaaaaagacctaaagcgccatattaacattctctttactgaacccaatgaaacgtaaatttacctttagtttgtaattttgtataatcgaatagtagttagattaccacgtgattattataaatttcgaacttccaacaagtaactggcaaatttgagatcccactatagattacaccttgttgtctttgtcgtattaaagagggagagaggtatctttgaaaattggagcgagattcatttgaaactgtaatacaattgtttgagtaggttctagccgagttgtagtttttttttttgtttcgagaacataaaactcatgggatgactgtaaagaaagatctcacgttggaaaaatggaagcgacttaaacaatatacaacagacaataatccacatattagttttgagttggaaaacccatgaaacttaacatactattaaaactacaatgatctaacgatcgacttctacataggtgattgttacatatacgttttatatgtaatggacaacctctacataaaacttttaataaataaggcagtttcctcaattccacgatctctaccttttttctatgatttctgagatccaaccaagagtcacttataaaattctcagttgatcaacaaaaaccaggaaatgaggaaaaaaaataaaagcgcgcgagtttaacattctctttatggaacccaagaaaatgtaatttgtacctttagtttgtagttttgtatagtcgaatgttagttagattaccacatgattattttgaaaatttgaacttccaacgagtaactggcaaatttgcctgtagaaattatttggcaatcctctgtgaatatttgctgattatataaatggatgattaaataatttaaatttacatttatcaaaacataacactaaataaagcaaacaaaaaaaatctgaaaactgacgtagcgcaataatcaactattagtagtaaattctatgtagagcacataaaatgaaatgctaataattttctagtataacagaataaatagaacagtatctatttattgtaaaaaaaagaattacctatgaactaactatattaattagtacacaaaagttaaatattatatatatatatatatatatatatataagatcattaatattttattttacagagcctaataaaacttcgttttgtgcgagttacctacttacgtagtcacgtgatcaaacaagaatgataagaaatcaagacaaatgagtactgacgatgaactccaagttgtgcatgcatgtgtagtttttacctacgaccatcgaatatgttcgtaatacgttcaataacggacaattactaatacgtttagttaactgtaagttaaacacctaaagctccattttttaacagtttcttgacagtccaataaaacgtaagttaggtaatcacttgatcaagcattaaaacaaaaaatcaagactaatgagtcagtgatgaattccaacctccccatgtgtactttttacctacgaccatcaggggcggacccattcaaggggaagggggttcacttgaccccccttaaataatgatatatatattttcgtatgtagattgcctaaaagttccagcagttcagttggtaattttaagggtagacacctcaacccaggttcaaatctcattgttgacccttttagtatttttttttctgatttaacttaaatacatatcttttgttttatatatttacttaattttttcaaaaatcgtaacatttttatattacttttttaattggttatgaatttatttatagtgtttgtattaaattaatataaaattaattatatgatttaatttttaaaaaaatattgagccgggtaagaattatttctgggtccgccactgacgaccatcgaatatgcatacgttttatcagtaatggacaagtattaaacgatttttataaactaggcgtaaactaaacccacgccgatttggaaaacaactaaagctccagttttagcagagttcaatgaaacgtaatttcaccttttggttgtagttttgtataatcgaatgttagttagtttatcacgtgatcaaaaagctatgacaactcagcaagacaaacaaatcagttcatggacatctgattaggtgtagcaagctattctttaaattttttaaaaaatttgagttgtcaaattttaaattttgactataatgaatgattattctcaatttaaaattcagattttttaaagattattactaaatatttcatatttattatttgagttgataattaaccaaatattttgattagtgataatcttacattttcactaaataaatattttttttctatctaattaaccttacaataaatgattggttcttttattgttgtattaaaatggatataaagtagttgtatactagatactagatagtaagcaacgttctacaaaataagtgcattaagcgaaacaatgagtttgtggtgaatctgatactttgctaaatcaatatctttctttagtcaaactttgctttttgggtcacccatagatgttcagtcccataaacgctatgttttgatatatagccctgaccctgagcatgagaatgagaagggtgtacacaattaaaattagccgatataaaaaattggaagatttctaaactaatataagagtgtgtgacaatcttttacggttgaattttggatatgaggaagacttccacttgctaatctgatatcaaatccttgtttattgaccaaagtttaatggtccctgaaggatttattactggtaggtttgcagttcataaatattttttggttttcaaatttgttgtccaacaaaaagtcttcataaacaagagaataaaagaatgaaataatgaaagaaagaagaaaattagaaacaaaaacttttgaaagctaagtggaggccgggaaccagccgatcactctccttaaccaacatcagcttccattgtatgcggagccttgtagtttatataaggtgtatttcaatatataaatattaattaaccaacttaaagataagtataattagttagaaataattatcattttgattttcaccaatttcatctaagttaacaatcgtaacaaaaaaaacagtgaaagatttatattattatttcaaattataaaaaaagcacatctatttttatgttattaaattatttatttcttacacttccatcgtaattctaaataaagcattgagaaaacatgtttccgtagaaatcttcatttcaaaacgtttttttttactttccgatttggtttgatctatctaattttagtcatataacaatgctagtggaaaaaggagtagcaaaaactataagtcacggaaagaagaaaaacacgaaattcaaaataaaaaatgtttacattaatataaaattaaaattgaaaagcagaaataatatgaatatttacatttatgggacccacatgtttgtatacttatatcacaagcacagaaaatacaagaaaaaagtaagaaaatcaatggcgacttcaaaggcggatgaagtatttatcgacttcagtggaatcgaaacgcgcaattcttttgtgagtcatctctcggccgctttccgccgcaggagtgtttccgtttgccttggtggagactgcactgacgtggtgacgccgcggaaaaccaatgaagggtgtaaagtctttgtggtggtcttctcagaggattacgcgttgtcgaaacagtgcttagatacactcgtggagtttctggagcgaaaagatgatgggcttgtgattgttccggtttactatggtggcgtcactgaatcaatggtgaagcaacagacggagagattcggtgtagcctttacccaacatcagaataactactcgtacgaccaggtagccaaatggagagactgtctgattcaaacggccagcttaccaggtcatgaattaaatcttcaacaagagtaagtccaaatctgatcaatatacacttttcattaagtttggaatcgttaaagtaatgccagtggggaggagactagttagccattttttttataactttttacgttacatacaatttaatgtttagttaaagagaactagttaatgaaaaaattactgaaatataaatagtaacaaactagtatggattttgtttttgcgtagaaacttacaaattttgttagaaaacatgttatattgtgaaacaaataaaatggctaagatatcttataatatgaaacagagctactaatagatgataaagtgaacaaattttttaatttgactaattgagctaaaagcgttaggtataacggcttactttttttttaattgtatttttgtgactagctgtatttatagagttttatatgttatggtgaccttttttttttatgaaggtaaaatttattcatcaaaaaatctgtgtacattagtgcatccctattttcactgtaaatttaactttttaagaaaaatattgaaactaatttaacatccctagaaaacagaatcttttaaccttttatagccatcctttggtagaatcttttaagtaccttctagagaagaaaatattttttttattgtgaaaaagttgacctttgttttggaaaatttgtgcagagactccgaatttgtagaaaagattgttgctgatgtacgtgaagtgctggatgcaacaggtaagatcggaatctactcgaggctgctggagatagaaaaattgctttgcaagcaatctcttaaattctattacctagggttatggggtatgcctggcataggcaagaccaccattgcagaagcagcctttaagcagatgtctaaagactttgatgcttcgttctttgtggaagacttccacaaagaatatcataagggacgtccgtacaaactgcgggaagagcatttgaagaaggttccgaaaggtggatccattaggggaccaatcctctcattcaaagagttacgcgagaagaaagttctttttgttcttgatgatgtgcgcaacctgatggatttcgagtctttccttggaggaattgaaggggttagccctggaagtgtaataatcctaacatccagagataaacaagttcttcatcagtgccaggtcgaggatgtattcgaagttccgagtctgaacgaggaagaagctgtacggttattcgcccggaccgcgttccataaagaagggccaagtgatgctaaattaatggacgtatcaaagaaggttgctagatatgctggtggaaatcctaaggctctatgcttctatgggagagagctggagaagaaaaagaagccggaagaaatggaggaggagtttgagaagatgaggcaatgtcccccccaagaaatactcagtttattcagaagcagctatgatgcacttaacgacaatgagagaagtatattcttggacattgcgtgtttctttaatggtgaaccgtgtgacgatgtaatgcgaatacttgaagggtgtgggttctttccacacgttgggattgaccgtcttgctgagcggtctctactgacgatctcaaaggaaaaaagagtggagatgcaaggttttattcaagatgctgcccgtgaattcatcaaccagacttcgaggcgtcgcagacactgggaaccatcaagaatcagattattactagaaaatgataaatctaaggtaggtgatacattctgttatctataacaatgtttatttaaattgtttaaggtcgatttattcggtttttcaggggaatgaagttattgaagggatttttcttgacacaacaaaattaacctttgatgttaatcctatggcgtttgagaatatgtataatcttagactgttgaagatctatagtacacactccgaaactgctcaagaacttcgtcttactaaggaacttcgctctttgccttatgagctcaggctactccactgggagaagtatccgttgcaatcgttgcctcaagattttgacactcggcaccttgttgaactcaatatgccttatagtcagcttcaaagtctctgtgttggaactaaggtaaaggttacattccgagagaaccgcaaattgtttttttttttagttaagctatttatgtgctttgttttgttttgcagagcctagccaaattaaagatgataaatcttagccactctcagaaactacttgaagttgacgaactcgcgaaagcgtgtaatcttgagaaaatagatcttcaaggttgtacaagcttgaagagcatcccacacacggatcggctaaagaatcttcaatttctgaatctatctggttgcacgagtatcaaacgtacggaggctataaagaagataaaaggaatgaatcaagaaggctgcttaagagaaactacatttgaatcaatggtgttcgaatactatgttaaagaatcttcttaagcttccgttctagggaggggggagggaaatgttagtgctagaaactcagatcagatgttattttgtttacttaatttttgttttagttttgaatttattaagcaacaaaaaatactttttacagcccagaaaaaaaaacaaatgctaagaagaagatgagaagatgagcagcttaaagaagatggtaatatactattggatataactgtggtatttcaaaatgaagctaaccccaatatcatttaaagaatcaatgatcagacttttggtaaaatgacaaagaaacaatgatctctcaagtttttacttataaagatttttttttacaaagagacataaccagaatccttaagtccataatttactgataagaaattactcggtttaagtaaaataaaatttgtgctgttaaaaaaaggtaaataaaatttacgtattgaattaccttttggtgatcttcatgtgtgattctttaccatcaaaattgagcttcaggctttctccgcacaaaaagaggattggctactttccactttgcatatggcttgtagaattttcaagacctccttgacgatagtttcaacaaaatcaatctccaatgcgctgctacactttgttaaaaaggtcgagatgagttctttcaaattccacacacgagcgtgcacatacatatgtaacgatgtgtctaacatttccgaggaactacttaagtaaatgcatatatgttgaaacatgtcaaacttttgtttatagattagagatttctttcgcctctcaacaaaacataatattaaaagtatagatagacattagtaccttttttcatccaaagtcagggcaaacctatgggagataaacacgatcgcctctttccatcgctttatcataggctcatcagactcgtacatgtactctttatctctgaaatggtcaccaaactctcccttaggtcttttcacattggttggagtcaccttatagaagatgggaagcacctagtgatagagagtaaccatattcccaaagttagtaatatgtgatcaatagatgtataatatgcaccctttaatagtaagtaataacatcatgtttattgatcacaccttgagaaggccttggtgcacacgttctttaatcttcacaagctcttccaagcaccattttgattctgtgtacctactcgaaaacacaactatggcaataccagaatcttcgatcctcttgaaaagagtgttgaggtcttcacctctttgctcctgattatctatgaaaacgttgatctcacttcttcgaagtgcatcaacgagatagccgacgaaattgttgcgcaactgatctccgcggaaattgatgaaaacttgaaatttcggtggcttgactttaccgtccattcgcgtgtcagtgaaagttctttacaccaaaagatacaacatactgtctggttaagttttaaaaaggataaaaggtttagaaaaaaccaaagtgtctccataagtacctatcaaggagatcggcatttgttttaacgtcagaagaagatctctcgggctttgttccatatttaccagtatgaaattcagtatatgtgtctcttggtttctctgttccctcttcaggaacgtactcccgtatttttggtacattgtccgcaattctatcgatggcactgatggcaccgatggcaccgccctcacctctagtaagaaagtgagagaaaacataaagttctctattccagcaataaattttaggagcaaatgaattttgcagaaaataatacttacattaaacgtgtgctcgtataagcactttgtttcagaacaaaaaagagaaccaaaagacaacctattaccattcctagctgacttctcattttattgagatccaacttgtctttaaattctttcagtctttctttgattccaaaagtcctattttcttcgcccgaggaagttagtcgagtgtcactattttctaatggatctacagaagcgttatggcttccctccgatggaattctgctcaacaccttcttcacaactatttcgattctcttggccttggggctgcaacaccagttaggaaaataaccaataagatcaaaaccttcctgaaatcccatcgagcttaatttggtttactatctcaaccacttgggcaaaataagttacctgctcttatccaccctgatacccggtctgtcggaaatcgacttcaaagcttccttccacttttccattaatccagtactttctctcagatccctgaatgcatcaccgaactgtccgctcaggcctctgacggtggagggatccaacttgtagaagatcggaatagccaccagatggtctttctccgcacatttattgatgtctaccagcttcatcaagcaccattttgattctgtgtacctgctggtgaagataaccagaacgattatcgactctattctgttcgatagtctttctactggttcgcatatgcatccattgaagcccacaaagacgttaatgttctttttttccaaggccatgatgagatggtagatgaatcccatgcgtgatccgttataaaggatgaaaactgtatgttgcggtggcagttctaccgaagaagaagaggataaagtcgccatggcgagaagccggcgaacagtcctaattgggttgttccgaggtcattgcaagttgaatcgtctagtaagacaacattagtttttttttttcttttacaaattaatcaaatggcaacttgatattttcattagatttaattcattaatccgtggctgtcgcacttgaatgagcgacgtggttgtaaaagtcataaggaaaataaaatacctaaaacgaacgagactttgtcgaagagctagctggcagaaatgcgtttttaaattgacagtggacgatctcgccatggttgggttcgattgccgagttttttcattctcctactttttggagtttatttacaaaacgcaaaaagttacaagattatttgagcatcttactaatatcaaaggaagaattgttagaaattttcatttccaatatgattttacagaaatgctatttaatttttttttatcattaatacctttgtttttttgttttttttagtaactaaaaagttttagatctaggcctctataaatacatagtaaaactttataaaaaatgatgttaaataatattttttatctatgctataagaaaagataggtataggaagatggggttagttttagactttagtccatttggattgtggatatgactcttgtctttctcttgctcgatttgtctctgtggatgacaagctactgttagttgataaataagagttcaacaacagctagaattctcaacgatctaaatgaatttaatgaaatccgtttcaaaattattgaattaaacacagaataaaacattgtaattataaaagactcactcttttattgctttataaaattactcaaaaaaactaaaattctcacaatctctcaaaactcaaaagttatgccacaatttggcatctccttatagaagtctcaacaatacctaatctcattaggtaacatatttagataactcttaaacaattatttagaaacagtatatataacttggtaggattaggataagttatgactcaagctatctttaagcttaaaagtcaacattttccaccttaagtttgaaatcttctttcacacatcttgaactccaacgacatctctcgtctccttaaatttgattcttccaagtgcatttttcaaaatgttagccttttgctcatttccgggaaaatgctctacttcaacttgttcgttctgaaacttcatttggctgtacttcctcatacccacgtcaatctgcttcggaatcttaaaacttagagtaatttatattccatacccaagtatcttgaaacaaagcttcaaagaaaatgtgatgttttgtttgagttgcactgcggttaagctcatgaccgtgttattaccctttttttgtaatagatgtatctctccccagaaagtaactgaacaaactattgcccttcttagaatccgctgttgttggagttgcaatggggcagtcatcaccttctccagttttaaaagagattctccggtcttgtctattatcctccatccttggagtttccttccaagatgtgctatcagcttcattaggctcatacaccaaagagaagccacactttatcaccttgcatttttcgacctcgcttgtaccatttgtcacttgaaatcgaagggaaatttcagtagctaatggaaactgttgacggttctttatattaagcaaagtggtgtagccaatgaaaatatggtctgactcaaccgtatgtgtctcatcgccttgttcagaccagccaccaaccatgaagctttcctggctcaaggatacattcgtaaactcacacgtgcactgcacttggagactgctgttttggtctctatactccttaaacgagactacaacacatagagctatcccgattatcctacttgaattccaagcttgaggaagttccaggattaagactgatcccagtgcttggtgattaaaccatgcaggtatctcacatcccggaaagcaagtaccaatcaaggatttgtaaacaaaatcctgaaagtcaaaagtaatgcacaatgaaaatcataaaatgtggatgtttgaggatagatagataatttgagaaacagaggattcataccggactatatcgatcagctgacatcaatttgctttttttctgaacgtaagaaatgatagcattctttgagacttgttctagttcgtgacagttagtgaaaataaaggtggaatgaatctgctctgttggtgtaggaagggtttgcgggctggcgactgttcttagtgaagtacagccatgtgcatttaagcactgaagatttggtggaagtatgggaagagatgtgagattcttacaatactttaactcaagccacttcagatggaacatgtgacccatgtcaaatcgaagggtgcggatattatcattcctgcttaagcatagacgtcgcagagaagataagtgaaaaatgctgcatggcaactctgctattgatgtcccatcgagcagtaaaaccagcaaactttccattttcgccgtaacatcggggaaaattttgagctttgagcagcgagagagtttgagttcttgaagagatttaagctccccaagacaatcaggaagagtcgctagatttttgcaatctttcaaatttaaaaagataagtctatggagattaccaatggctggaggaagtccatttatctctgtgccgtttaagtatagagactctagatgttctgaaatcacctcaaatgtctgaaagcttgagcagccgctaagaatgagagtcttcaaggaattcgtagtgatctttggtagagacaagaggcttgtgcatcctcttaagttcaggaaaacaagattcgtcatatctttcatctcatcaggtaactcctttaaacttgtgcagccttcaagatttaatctcaaaagatttggtgcttctgataaacccatcaaggaattcaagttactcgagtggctgagatcaacccacttcagattaggtgcaacctgcgacaaccaaacaaaatttaacaccataagtctcatacactatgcaagtccaattaaattgactggagaaatacaaaccttagtacagctccatagagtggtaatattgctgtaaggtaacctaagatcgatgagattattggggtaaaagtctggtggaagttctgtccctggaaatttcacccagtgaagacatcggacaatattatcttttggaaattcaagtccatcaggtaagtgtaacttgcactcagttttagagtgagtaggacaaagagaactgtagactttcaggtaccgtagactgctcataccgacaaaaactgctctctttaagggcttttcctccatttcagacatgtctaaaacaattcctctaaccttgtctcttccctgttgatcaagagacaactacaacaagttattgcaaaaacacacatatatatgaatcagccaacataaaacgtttttaacttttgtcatctcagtctcacctctttatttttcaactctgcacaactcgacagcaacaatcttgatttctctgcagtagcttcaacaatctccttggccattgtaaataatagatcatgcatctcaactcgaccatcacacacgccaatcaagaatttgtctgcgaggtctctaaattcttgaccagattccgcggattcagggtcataagaatcaagtaaacttctaacgtagctctcatcttgtgacctaaagaaataagctatatcaagaaacgcatccttctgctgctcgtttagttcatcataagagcttcttagcttctctctgatcgttggattggaatgctgtgccagtgtcccaagtcttgtttcccagtgagcctcgtctttcccgcgaagctccttaccgaattcctcgagagctaaggggttgcctcgtgcaaaatccacaaactttctagatagctccatgaaatttccttcaatattacaacagacttgagccctaaagagctctaagccgtctctctcattcaacccagggacttcataaagatcagtgactaatccctcagtcaatgacttgtcccgtgtcgtgatgacgatcatgctccccttcttaatccagtcgcagatacccttaagtggttcggatatctgttttttgtcactcacatcatcgaaaacaatcacgactttcttgtcgattaagctatccttccaaacctcaagtgcatttgtatcggtgcaatcttgaatatccagcaaaccttccacaagtctcttctgtagccactctgatccttgctccgctgacatctcacgcttgaactcgatgaacacacaatggttgatcttcttcttaagcttggcgaagagtttcttggcgagataggttttgccgattccgggcatccctacgacttcaacaatacgagtttcgttgtcattgcactccacattcaactttactgctagttgcttaaggcgttgatcctctggttcagtaatgtttgctgctctgctaagaattttttggggcttagggtttcctgctcctttctgtggtttcgggttttctcctctttgcggcgtaattttgcttagggcatttttaacatgtgtggcgatcgtagacacgaattcctcttcctttctgcaaaacaaaaagagtaataatggcgagggagtaagttttgatgttgataaaacaggacatgtaagccagctccgtttgtcacggaatcagtccatttattcatttaactagaaaatttctaaaactgattataaaacacttaacatttttcattagttatttttttttataacaaaaacaaacatggaaatatgttttgatttagtgattttaagaaacacgaaaacaattgtatatttttatggaaattgttttttttaaatggttattttctggtatttcctactagttactattactaaaaaagaggtaaacgacgtgtatctttgtagaaagttttctatagtaccagaactatataaaattgggatctcgattccagtccatacaaaataaaagttaaagtccagtttcttactaaattgaaagttcaaatcctttagtttccatatattcgaattttgtagtttatctttggtttactttgttgaatccaatgctaaaccaattaaaactcgactcgagttaaaccaaccaactcaaactaaattccaatttcaagaattcccaaattgagaattctaagaaccctctttttttttttaatcagatagaaaatttgatctagcatctcttctaacaaaattttgtagtgtgttaggcaataccgatgacttcactccttacttcttcaataaaaaaaaattaaatcaaagttgaaaactttctaaaaacccaacaccagaaaaatcagaaatctcttgtgatgtctttaattgacaagcatttcacgacttaaaacgagaaactaacaaaaacctgatctttacaaaaaccttaaatttatcgatttgggattcttgaaactagtatttattttgggtttggataactcgaagcaggttttaatttggtttaatctattggattttggtttggcataggtcaagcagaataaaccaaagacaaactacaaaatttgaacttttaattcagggggaaacatgactttaacttctatttcgtgtggactctaatcgagatccgaattttgtgtagttatagtgctatatgaaactttctaagaagacatcggtcgtatctccaaaaattcgaactttcaatttagcgggaaacatgactttaacttctattttgtgtggattgttatcgagatccgaattttaggtaattataatgctatataaaactttctaagaagatacatgttgtatccccaaaaatttgaactttcagtttaatgagaaatataactttaacttttattttatgtggattgtgatcgagatccgaattttagataattatagtgctatatgaaactttctaaaaagacaaaaaaaaaaaaaaaacaagagaccaatttcgttggaaaaaagagaccaattccaaaaccaagaaataaattgaatggttggaagaagaaataacagacgaaaaaattactacgaagatatatagttcacatcaaaagtgagaagagacttattaggtttggaatatagaagaaacgggagtcaatccacctattgtcgttaatttttaaattggaaactcatgtcccttatattttagttcaagctgattcccactttctatataagttacattcttcccacgtctttaggaaataattgtttatgctaaaaacatttaagggtttattttccaaatatttatggtactgttaaatatttagatctgtacaattggcatgtactctttatgttaatttaacagtataagagatatgtgacttatttagttatgactataatctacattttcttatctttcaagtttcaatgacctttttcaaattttttttttttggtgtataataattgcaaagaatcttctagctatttcttttttgtttttgtagaaaagatctagctgtttcttctatcgccgaatatttccatctaacgaactataagtgtaaaatatctcctaagaataattctacaacatatatagctagcgtgctcgtctggaataaatattatgaatctatactaatgaaattcgaaaagtaaaattaaatattggttaattcctaacactaatccatacccagtttctgaaaataccaaggcatttctgctgagaaagtacttcaaagcctcgttccacttaacaatccggctgtctcgatcacgaccgcaacccggcttcctccagagatcccacagattacgaccgaaatctccatcaagctctttcaccgtgtctatcttcagcttgtaaaaaattggaatgaccaataattttttattgcatccttcacctttcatactacattccatcatcttaactagctcctgcaaacaccaatgtgactccgtgtacctactcgataaaaccgccagtgcgatctccgaattctcaatccttttgaaaaggtttttgagttcttcgccaacagcttcatcagagtctataaaagcattgatcccatcgcgttgcaatcttttatggagatgggagatgaaggtcttgcgtagctcatctcctcggaaattgataaacacttgtggttctactttgacgtcggaagatgtcaccatcgtgaattttctttttggaatttgctgtttacttagattgaattatacgactgatttgcaaaagatcatatgattagacgtcatataaatatgtctcatatatatatctagccaattcgctcgaccacgttcttcatcaagagtacaactatagtaaatcatttattcttggagacaaggtcttacaatgttaataatttacttctggatgacaagttgaaactcaagaactttgttagactataaacacttgtctatctgacttgctattacctttttaaaattccagctttagattctttaaacaaatttcaagagttgtagaattcgatgttaagtggcaacgtgatgagtcggaagaattacaggaacaagtcggccgtctaaaagtttatataattaagttatttatatgttattataaaataatgaacactagctagtaactaaacatataaataactgagactatttctatacatcatctttaactacatgttattctatactgctatacatcaactacatcggtttagaaaatgatcaactagttgaaaaatataattttctgcgaaataaaactcttgaaatattctttgcgagtttaccttacatttacaaaaaaaagataggttaaacccacaaattcaagtttaatccacaaatagtttttatgttcacgtaaactaaaaattctaaaagcactgtctaattggtaggaaacaaaatataaaacaatattcttctaaattatcttgcctttaaggggtataaaacctaactaaaattattgagtactcaataactcaaatgtgcttgtaacgttgtaaaactacatcataagttttaaccttaatatatatcgccagtgcactcattagtattaaggaatctaaatctatagataccaacaaaaaaaacaatagattcatgaagatttaaactgtgtttgaagttagaacaataggtagatagaagaactcgcttgaaattttagaaataaaatacatgattaaataagaaatgtgatatagataaaattgccttaaacttactttttcaaacaagacatcactctaacacttaaggatcgattttcacaaagtttttttgtttacagagaaagttattgatttcaaaattaagctaaaccaaatatgagtaaatttaaaaacaaagaaaacaaattagatgattaaaacatcatgtttaaggaatttttcaggaaatagataaacaatagaatagcaattaattaggattactagcactgttctagaactcaaatcacaagagtataatcaaccaactttcgcatgtatcgattaactaagcctagcaataggaagtcccaactttcgtgtgtaaactcctaaaactagaaactagaaagcattaaagagatcatgtttgatatgttcccaaaattccttataccaacttctcatgtatctagttatttctttccacctatgatacttcagataatagcatcctttcggttcttgcctattatgctaatatcaagttctagttaggtattctagaactagtgaagaattttatagataaatcttaacagattatcaatctactgattcatctaaatctctaatgagatgaatccctaaacctaacaagagaactagtcaaacatgatcatgaatgcacaaaacatatttgaataagattacataaacagagacaaaaaaaatatagtttaagaaaatcttttctttacaggattttgaaatttctgaagaactctctttctttctggtctccaaaatcacaatcaatagatgtaaatagttataactaacaaattatggatgaataaacccccacgttgtgcggatgtcgccttagaatgacttaaaagtgcttttgtttaggttaatcacttttaagaaagtcattattaactaaataccctaaagatgtggaagttcttttggcctagtagttaagggtttaaaggcttctctaccatgtttggggtttgatttctagagagtgtacattcttgcagattaatgatgcgagactaattcaaagtttcgcgcgatcgaaatattgcaggtaaaacagttcgttgtgatctcaaaagtaaaactgtccaataatgggtatgatgcagataaaaactatatctaatttatagcacattattgaatcaaatatgtgcaaaaaccaataacattttatttgaatcgtgcaaaaagattgacttttaattaagattttcccatttacttatacatattcattgcttcttctttctttacagctcatggctacttaattaacttttctttaaatatgggataacgaatgtatcataattgggcctaatccaacaaatatagttcatgataaccaaattcataatgtcattcatttgttatataaatccaacaaatatttgtttctcggggacggcctatctaacaagattttattaattgaattgactaactccattgggtaaagaaccaattttgagacggttgacacctagaaagatgatatttggtgtagtatattgcaaatacaaatattcatatacaaatttcttgccgcgtcttcgaataaaaacttgcaaacggataggatattcaaaatctaacgcgtgggaaaattattggggttgtggtagtagttagtttattgggtttttgtagagtcgtctctttagacttattcattagacttaccaaatcaacggctattttctatgcggagaatcaatcccgattatcatttaaaaatcgaaaaatcctattaaaaaactttcaaagtgacgaccatttgcattttaaatattcaagattttaattctcacaagaaaccatcagcatgacaattttgttacttaagaccttcttttgttacctacttaagaccttcttttgttacctacttaagaccttcaaagtggcttttgtattggtcaacaaaaattaacagataaattgaatccatcgacagaaatatatatattttttttttatcataatactaacgtaaccttaataattatttttattttagtaaaaaaataatttaaatcaaatttttatctatcataaataatttatttttaaaattaaaaaatgcaacaaaattatttgtagccttaataagtacttcttttgatttttcaaactttttattaaagtaaataaaaggatttgtaaaattatttacaaaccaaaaattcagcccatttccacggaacaatagaaagattacaccaatccaaaaaaaaattcttttcaaaattctttaatatctccaaccattaagaataaagcaagaaccaatacatattttatcatttacaaaagaagaagaagaagaagaagaagaagaagaagaagaagaagaagaagaagaagaagaagaagaagaagaagaagaagaagaagaagaagaagaagaagaagaagaagaagaagaagaagaagacaaatattcatgtaagcccgcaaatatgcatggcaagaactccaagaaccctagatccaaattcattgtagcctactagcattgttgactttaagaaaaacttcaaaaacaaaatcggcaattttttaacatctaaacaaactttattaatgtgaattagagtatacatgattatcaataagattacaaatacaatcaatagtttgcgtaacgaaaaaaatgatgaagcaatacgcgctgcattcttattcaagtactttatcatctttacattttcgtcaatctgatatgactttcttgcttgggaatcattatctttttactgatgaaataccggtaatgcagttgaaagtcataggcaatgatccatctgttacatcgcaaaacttttggattgatcgaaactctcatatagaataagatgtcattggtgttggttgtgtttaaaacccattgttgtttgcatgacacaaaaaatcttctcatcattctcttccatagatagttgcttattgtcattatccaatcatccccgaattgcctctttttccatggtgatttccattttctccaaaacagatccgtttgtactagttgtaaagacaccaaaacccaatatctccatttatatttgtaaatttgcgagaacaacactacatcacaccgaatcatgggcttcggtatggggataactgccgaagggtgggagagttaacgattatttttttatttataatgatttatattgcttcaaaattattttcatatgtatttatattatatgcaaaaacaaatattggagaagcccctaattacaatttcgcctcaaacccgagaaacttgagcacgacattgcaccaatcgccactgaaaatagaactaacctcgaacgaagaatcattggcagaacaaaacaaaacaaaaaaaaggagaaaaaaaagaaaacgagacccctctcgcagttccaaaaggtataattaattttggttcttctattccctcaatgaattaagaataattttggaaaataccctatttttgaattttcatttaaaaaatatcctatctttttgtcttttttaaaaaactaattttcaatatagaaaataccaaaataggctcatttaaattttttaagaataactaaaatgatattaaacttaaatcagaacaaaacatccataaactaaaatttgatgtaactcactattttaaagatattattatcttaaatatttataaataaaaaattcgtcaaaaattaaaaattaacttaattaagtgataaagtttaaaatatttttaaatattatttcattaaattctaatagaaaaaataaagaaagtctttatttcagaaatagttgaaaaataattaagaattcaaatttcattcttatctcacatatgtttaaaaaaaattcctacaaaacaataaataaataaactttattaagtgataaactttagaataattttagatattattttgttaaattttaatatctaaaataaataactctttgtctcaaaagtagttgaaaacataatgagaattaagaactcgaatttattttatttttaagtgttttttctaaattttgttttaatttattatgaaaacatcttttattttagaatctgtacaaaattgtattcaaacatattaaaaattataatttttattttaaaaataaagaaaagtgtatttttcaaataaaaactgataaagagggtagttttcaaaatctcccatgaattaaccaaacagaactggtcaactggaattgaccgcacgtctcatgcgtttactatttctaatacacatatttactttaaataatcttgtcagaagttatgaggaaactgccttacgattaagatagcttctatatagaggacattgggtttgaggctccaataaatcaaacatggataaaaaagaagaaaccaagcaacccgacaacataatctacgacaaaaatgactcatcagtggcttccttcatcagctacctcatggcgggttttggctgcagaggaatcaagcagtttctcggaatttatttagtgattctctctagagactacgcatcttccgtgttgtgcctagagaacctcgaattatgctgtgacgacaagaagagctatgaggtggttccggtgttctatggtgtaagtcgatcggacgtgaggcaacaatcggggccgtttagtgatgcgttcacaaagctggaaaggtcaaatcctgcagatcatgtgactaagtggcgacgcatgtttgcgaaaatagcagaactaaaaggccatgagtatgatgaagaattaaggtatgtgaaaaaaaaaaaaaaaaaaaaaaaaaaccttcactgtaattctttttaacccctaatttgacttttgcttgggaaataatttgttgtccaacataaaaacgtatagtcgtataaacttggctcataactaatcgattattgctggaaaaaaaaatctctttgattacaaaattatttataaaagttttattgtttataaatcagtaaatgtcacgatgggacgttcgaaccaagcatttataaaatttcataaattataaacatagaggccactagacctttgcctataggatttcatactgaatttagaaatctgtgttttattaaagattttgagaaattcgcttggggattgatttattgatcggtaaacaatatatgcggacgattgggtgacactaaaaacgctttgaacgatttatctggattgtttttttcaccaaaatgctctatatgacatccatctaaattgataaatcttcaaacattttttcttcttaaactacattttgatgatccaatttttttttttcttactttaataaatgaattaattttttatacgaaaatgtttttcagtatttgtattttataaaaaaatgtgttttgtattattggtacctttagatttcaaacactttctcttacatttttttttaacactttaatcaatccagtcgttattttctcgcaaacacacgattccaattgttgcatcattcatcaaatcccacaatcgccactgataagatatgaaatatttacaaataaataggaaaaaacaatattttagttaaaaaaatttcaatttatcacatataagatattaaaaaaaaaaactgaaaaggaaaaaacaaaacaaaattaaaatctttaaattttcttctttctcttcttcgtgatccatatatcttcctctctttccaccgtgaaaactccatcaccatgaaactttcatgctctatcactttatcatcacctcaaacaaatctggatctcgatccatcaatctccaactagccagtaggaagctggattgggaaaagtcgaatgtcaaatatgataaagtgatataacatggagcttttcatggtgatggagttcttatggttgaaaatttatatgtgtaaattctgaaatacatagaataataaccttaaaataacttctttaattttagcgaagaatccgaatttgtggaagagatcgtggaagatgtgtatgagctacttaatcctacggaagagattaggatccacagccggcaactggatatacaaaacttgttatgcaagcaacaatggggccttcgcactctaggcattttaggtaagcctggcattggcaagacaacacttgctagagcggtctttcgcagaatggttggaggctatgatgcttctcactttgtcaaggatttccacacacgatatagtgagatgacacttgagcctttgcctgctcatttcttgtgtatgactcaagtcgaagagtttgacctaaacaattctggctccgagcaatgccatcgccaaaaaagggttttgattgttctagatgatgtacgaaatgagcaagacgcgatgtcttttcttggagaaattgatcagtttggtccagggagcttgatcatcataacctcaagagatagacaagtacttgagaagtgccatctcaacgagatttatgagcttaacggtctaaatggtgaagatgctaggaagctattcacgaggtgtgcctttgggaaagatgtgatagtgaagaatcttccaatgattgttattaaaggttttgaagggaacccgtctgctcttcgctcatatgcgaataaatttaagggaaagaccacagaagattctatgaggatcttgtttaaggatgcagtttttaacacaaagaagaacacatctatgtgcatttactccaatattgtatgttacactgtgacatatatattttcttttaagcgtttggatccgagttttgatgatttcctaaatcctaatcattggtttggatttctcttttgtgttttcaggctattcatgaacataaaagtatatttttgaacaagactgtcttgcatgccatacagaacattatatttgatctggaggagcacccggatttggatcttcctaaccacgtcgctgagtctatcagtgacctaaggagtccttgtgtgcatcatccatccgtgcaggtgcaatccttgcccaaacattttcacagaaggcaacttgttctactccatggacttgcttgtcaattttacaaactttgggaaggatataaggtatgggaaacacctagaacacaaaaagcttattacaaattgaaatattattatcaaaacttcaaatgacaaataaatagtattagatacgaatttatgtgctgcactaattaataagttcttcaaaaaaaatttgtccatatatacaatcaatgaatcaaagataaaaatttcaggaaaatgcctttaatttgcttgcttggtgacacaagaaatagatatatctgatgtcgaccactttcgttttatatcagaggttctcgaggttgaggaaaatcaatcttgggcactgtgagaaactagttcaagttgtggaactatcaaacgcatgttaccttgaggaaatcaatcttcaagactgcaaaaacttggatacctttccagacactgatcagctagagaatctccaatttcttgatctctctaattgcagtgggatcaaatattttcaagaaaatgtaaggacaattagagaactaaaacttgaaggcactgggataagagaaataagatctgatacgacgaagttctctaaattagtaaaacaacaaagtactacgtacaactttggaatttgcacagaggcattcgaaatttcaaggattttgaactaaagttgataaagtctagttcatggtttttttttaaaaagtgatactaatctttttacttttctaaaagtaatttataggatcaaaccctataaaatgaaatctgatttccgtaactcgtttttaagtttctatttaccactgtgtgaaaaaaaaattcaaaattgtttgtatttgtgagtttatatatatatgaatttacctgttttcaatttggtccgattcttctacagtctctcccttagctctaaaaaaagtttttttttttttggtcaaataattctactccctataattgtgtaataactaataaccaaacaacaagtcaaaaataaagaatataactatttgaagttggaatggacgaaaatgtccataatataaagactaatcatcgtcttatccttatttctttctgtaccgttttaagagagaagtcaatgtgcacttacctcatggcattgattatctgtcttgtaaactcagactactgcattgggagacattcccaatgagattcatgccttctaacttttgcccaaaagatgttgttgaactcactatggaggcttaggctagcaagcttgagaagctgtgggatggagctcaggtacgtgttgcgactaaaagttgccactaaacacagaaattgttgttgatgaaggcatccgaatatttatagtttgttttctcatgttgatattttaaacagttcgatgcatatgtcgaaatctagtaaacgcaagccaagccatgatattaccagaagcctggaaactaacattaaatactgatgtctgtctttctatctatgttcagccgcttggaagtcttaagtgtatgagtctacggggttccttatacctgagagaaatcccagatccaccaatcttgagagattagatcttagcgtttgctcgagtttgatgttgcttcctccctctattgggcatctccaacaattgaaggatttgaacatggaaggttgttcatatctcgaggttcttccaactggcatcaacttggtatctctttattgccttaatcttaattaatggatgcttacagttgagaagttttccagaaatttcaagaaacatttcatatctctatcttgataaaactgcaatagaggaagttccacaatggatcgaggatatctctgggctatctgacctttcgatgagtggttgaaacaagttaaagaagatctctccaaacatagctaaactaaaacttctcgtagagatagatatttcagattgcagggcactgactgaagatagctggcagaaccaccctgaggagatctccacttctctcatgagagtagacatgtctggtaacagttttgaaagacttccagacacatggacttccattcaaccaaaagatcttatccttggtaactgcaaaaatctcgtgtcactaccagagctccctgcaacgctctctctgctaacggcaaataattgtgtatcacttgagagcttatacggtttctttaacttcctacggatggc

SEQ ID NO: 836 - DNA, 62052 bp, Arabidopsis thaliana
tctccaatttatgaatgcttcaaactgaatcaccaagccagagaattcatcctacattcagattacctggtgatgaacttcctgcatatttcactcatcgagttcatggaaatgttctaaccgtctctttacctcgtatctctctttccaaacaaatcttgagatataaagcttgcattgtggttgaatcaagacctgggcctggtttgactttggtgtatattggcaattcagaggtggaaaggataataaatattttagttgtatgacacacacactatctttgatgaattccggatttgagttctctctggatggagtcaatgatcctccagctgagttgagctatggcgatgtgcagtttgagtttttatgccttgaccacaagaaggaaataataaagataaaagaatgcggcatacaactcatggaggtttatagtaggaaaagatctggaactgaagacggaaacaagcctgcagagaacgacgaagagttaaggagaatcaggaagcaaatgcgtgtacgcatgaccaagcattggtaatccaacaaacagttaaagtgtctttgtatctctttttcaaggtcaccccaaaaactattaatgtttttttcttcttcttctgcagatcacataaagagcagctcaagaaccttctggttagaatacacaactttgaatttcaagattcggttcagtctagggggagcgtctagctactgcggtatcttatggctgagataccacggctgactctttaatgccactcttctgtcaacagttttttttgcaggagagatttctagtttgatctagctatagcagaacaatgacaaaagtgataggaaactagaagagtgaaagagctaatgattacggatttacgatgatgatgataaaagtgataggaaactagaaaatggtgaagctgattagctgaactgtgtggacactgagcgaaagtaactgatcaatggagaaatcaattatgctttctgctataaagaagaacgttttgatgaatttcaatgttttatatttgcttatacatgacactagatgaaaatactatgaaatatttctagacatgaagaaagtatatggacaaaaggagtagagacgagatatttcaagttgctcttatacactggccagctaactagctttttcaaaacacctgatacttaaccaagtgctcatcgtcgtgttggtcattttccttatgtctgaaaggtcccagttacaactactgattacgtgccctcttttaatcttcttggtcctttgatacatcttcaaggctactgcttgagctgtatcacaaaagaatttgttagaatcatggtaagatgtttcatcatgcaacatcagcatcagcaagtcaagattcgaaataaataagagatgcatcatgaatagaggatctggtaattaggttctcatcatgtgcttatacttcagagcggtgtaattggattgtggttgaggccttatgaaagacgaaaattttacttgtttctaaagcaaaaccctagttatttttggtttcttggtctctaggttcagtgtttaagaattcctagtttttataagacaaacaaagttaaattcgagatgagaaaagtttcagattcgcacatcttcatctttcctctttcttatgttcaggattgcagcttcaacacttctcctataccgacctctcttgaatcgcggcagtggttcccggtgtgaagaaaaacctcttggatccatagctgaagcaactggcctctttccacttctctctcttttagtaggagaacaactgttcttaaactagacttgtatcaccgcttgcattagtaatcacatagactccacaattctttacttcacaactatcagctaaaacctcattctggtttattgacaggacggaattcaaaattcaactagttcatcaaaaatgtaaaggctatccccttcgctggcatcagaaggaattatcgcatcgtagaagacacatatgtgatcctttttaatctttgaagcttccttagcagcccaaaactgaaaaactctatctagcctatgagaaagatcattcttcattttccttatgcaggtgcatctaatgctaaaaccagcagcattgtagtacttatcgcggaatgaaactaccactgacatagcaaagcctaagtaagtcttttattttattttgtttttgtttttgttttttggcctaagaaagtctttctcagggaagcagttagttagctgtatcacaacagaagaacctttttgcacagaggatttctgacccacagatgcaagcacatcagttgaggatttcagacccacagatgctgatagcagttactgtgatgagtttctgttacagcaagacaaaaataaattagatatgctgaagaatgcgagtttatgtttaaatataaacctggtgttgggttagattacctggtgttgttctctgttcatggttttaacaatagcccgagcttttgctaaaaatcttctgaagacttctggagacagattaaaacaattactaaatgtgcagtgaagccgtttgaagctccaaggaattgacttcatagacacgcaaccgtgcacattcaaatgtactagactttggggaagctctgagagggatttgaggtttttgcaatggcgcaaatctaaggctttctaatttagggaggagattgatgctttcatgaattgtgctgaaaccgtttccgccaagatccaatatgtttactgacggaagcccacatatctcttttggtatatccaccaagcatgcgtcagaaaggcataaagatacatgaggttgttgttttggatttggcagtcctgaaacgagacgatagcacatatagcagttccaacagttccaagaagcccacattccctccaatgtcgagggtgaatcattccattacacacaaacgccaaacccaaataccctcgtttcaattcccagacagtcaaaatgaaactcaaacacacataaacaaaaaaaaacaaaaaaacaaagaggccattcttacctggcacgacggctagagagctaaaagttgatagtcaagctacacatcaaacgaaatcagcagcactcaacaaaatgagtggggttaaaacaatcatcatgcacgaacaaataaccatttcagattattaacgtgagagaaaattatgaaaaagattttcttcgtacaactgaaaaggagtcttacagagagcttaaatactagagtcatacatacaagggccaaaaactattttaaaccagaaacagccaagtaaggtctaaaacaaaagattaactttctgctcttaaacttgacagggctcccactcagaaattcttaaccgtgtgcatgatcactgaatttatatttccttcttggagttccacttgcatcctagtttgattatcatctcttcctgatctctgcttcttctttggccgtccattatccattcttgtttttttctttttatttactcttccatcaaccccttctgtagtttcttgaaagttcttttcaacaggcataacgtactttcctttcgttttctttacccttccatcaaccccttctgaagtttcttgaaagctctttccaataagcatatcgtactttgtttcaagagcactatttttgtctttatccttagcatacaccaaacttaaaccacacttcaacaccttgtattttccattctcacttgtacctcctgtcacagtaaatttaagagaggcttcggtaggattgcattcatctgagttaccttcttcatgacattttatagtatgtgggcaactggtgtatccaatgaagacatggtctagctcaatcttatctttcccgcctccatgtctggtccaacttcctactggacaagtatatgcgacccaagacttgtcttcatcttttactttaaaggtgcaggtcactgacaagcggctgacttgatcttgggggtcaagacatgagactacagcacatagagcaatcccggcaagcttcttgtcatgccaatgtgggaggagttttacttctaactcagatccaactgtttcatgacaaaaccaagaaggcacttcacatccaggaaagcaagtgctgaacaaagattctgaaacaagaccctgcaaagttcaaataagtaaaatcttaaaattgcagagtttctttgaaatgcaaaaatctgagagagggatacagagagagaggcaaagcgatagatataggtatagagagataccccattgtagcgtttccgagcatatgataacagctggcatttcctttgagcatacgatgtgatttcctcctttgcagcttgttccaggttctcacagttggtgaaaatgaatgtggaatgattctgttcagttggcatgatacgggccaaaggctttgaaactgtcttcagcgaactacagccgtgtgcatctaagcactgaagatttggtggaaactctggaactgatgtaagactcgtacaatacttcaggtccagccatttaagttgagaaagctgactgattccaacaggaaggcagctgatcttagcatttctgcttaagcacaaatactgcactgagggtaattgtggcatcacttcaatggctgtcccatccaaaagtaaaatgtttaaaaagctaatgtcgatttctgggaaaatcttgagatttaaacaatcagagagtatcagttcttgaagagctttcagctcaccaacacggcctggaatttcctctagcattttgcagtctttcatattcaatacaacaagtctctgaagcttctccatgttcataggaagctgacttattgctgtgccatctaagtatagagtttctatattatctgaaatcaacggaaattccttaaaagttgagcagccgctgagagtaagtgttttcagagaaatcaaattcatctctggaagagattcgagacttgtacaccccttcagattcaagaaagcaagcattttcatttttttcatatcatgtggaaacgctttcagtgttgtgcaaccttcaaggttcaacctttgaagcttttcagcttttgataaccctgacaagctgcacaacttacttgagtgattgagatcgacccaccttaagcatggtgtgtcctattacagaaaaagaagaaaacaaagtttagccaccagtcaaacaaacctatccaggtaaattaaccattcacaaaagcaatcaacagattattcagagacacaccttgtcaccctcccaaagttgttccatttcactgtagggcagcttaaggtcgacaagattaattgggttgaaatcgtttggaagtgtctccaatgggaatttcagccagtggaggcatcgaacttctttcaatggtagcttaagtttatcagggatgttgattttattgttggttttacattcctgtggacaatgggaattgtagaacttgagataccggagatttcccatatttatgaagtggtcgcggtctaagctcgtttcgtcttccacttcagacaagtctaggaaaatacctctaacattggcagctttctaagcaccaataacaaacacgatcagtgaagagaaaaaaatgtaagttcttaccaataaaactctagaggaacttctggtctcaccattttattttgcaatacattgattatgcctcccttgattatgtgttgatggagccacagcctccgttgtctgctaccatcctgattagatgccttcagatcaacttcccttgaaaatttatataatagatcatgcatctccactcggccatcacaagtattaatcaggaacttatccgtgagagatttgactgcactcattgcttcagccgaaccaaggtcagatgaagccagtagactttctacataatccttgtcctgtgatctgaaacaggctatgtcgagaaatgcatctttctgcgctgtagtcaattcatcataactcacttggaagacactgacaatattagggctggggctctgtgcaagtttcttcattttcgaattccaatgatccatacttttcttattaagctctccacccaatactttgagggctagtggatggcctctggcgtaatgtacaaacccttctgacagcttcatgaaatctttcttttgaggattggcttgatcatcaataaaggcatgatagtgaaatagttgtaagctatctctgtggttcaaattttgaaccatgtaagtatcatcaaccaaaccatttgttaaggacatgtcgcttgttgcaatgacaaccctgcttccctccttaccctccttaatccagtctagtatctcacgaagagcatctatttgttcccttttactaacatcatcaagtacaacaagcactttgcgttcatgcagttgactgtatggatctttgagattgtctacgtgaggatggtttaacttggacaactcgcctaagagcatttgaggcaagcgatccaactccaagtgcttggactttacacggatttgatcgattagcgcatgcctcgaaaacttgccctgccacgtcttatatagctctttcaggagtgtggttttaccaattccgggcatcccaacaactccaatgatacgagttcccttgtatttatcacgatccaacttctcttccaaatcttttaaccgttgttcgtttccaaaagtctcatgctttttgtctcctgaggaagttccagcgttgctattacctaaagcacccacgacggcgttgtgacttccctccggtggtattccggtcaacgctgtcttcaccgccttcacaatttcattgactttctcactctccacactgcaatttcaaggctaatgagatcatgacctccctaagttccataaaaggttctagaagtattcatagatctgtctacaattgtaatctaatcactactgtgtctaggtttgtaactgagtcaaaaaaaataaaaaaaaatggtaccttttcttgtcaatgatgatgcccataatgttaggaatcaagttaaaagcttccttccatttctttttcctctcatcacccttagccatactcctaaatctatcaccgaactttcctttcaaatctctaacggtggatggctccagcttgtagaagattggaatcgcaacgagtgttccttcatccgtacaatctttgatcttctccagctctctcacgcaccagactgactcggtgtagttgccggagaagatagccaaaacgattttggactcctctatcctcttcagcagtacatctagaggttgacctctgtcttcatagtcgtcgataaagacgttgatgttgttcaatttcaaggccgttacgagatggctgacgaatctccggcgcaaatctgccccacggaaattgatgaacacctgatgctgcggtggcttgtcttccacagtggaaatagatgatgtctccatggcccaaaagctttttcccggtgtacttggacttttcctcactggtgtgcgttagagtagcaagaatgtattgttgactattcttttctctttttttaaatacctttttgttattttttgctgttggaaaaatatcaaatgtaaaaaaacaactgagatttgagtggttgaatgtccaatgaaaaagcatcgtcggcataaacaaaaattccggcgaaatcaaaggttagttcaaagtatcaaagcgcgaaatcatgaccaattgtgaaaaggatgaggaattcgtgtgcatcagctgcgtagaagaggtacggtactctttcgtgagccacctctctgaagctctccgtcgaaaaggcataaataatgtggtcgtagatgtagatatcgatgatctgcttttcaaggagtctcaggcaaagatcgagaaagctggggtttctgtgatggttttacccggaaactgtgatccttccgaggtatggcttgacaagttcgccaaggttctcgagtgccaaaggaacaacaaggaccaggcggtggtttcagtgttgtacggtgacagtctattacgggaccaatggcttagcgagctggatttcagaggcttatcacgaattcaccaatccaggttttcgctttattctactctctgctttttttttccttatgttgaaaattggtaaaactttttggatggctagtgtagtgttttcaatatttgatgaaatatggtgcaggaaggaatgtagtgactctatacttgtagaagagattgtgagagatgtgtacgagacgcacttttatgttggacgaattggaatctattcgaagctgctggagattgaaaacatggttaacaagcaaccgataggcatccgttgtgttggaatttggggtatgcctggcataggaaagacaacacttgctaaagcagtctttgaccaaatgtctagcgcctttgatgcttcttgttttatcgaagactatgacaaatcaattcatgagaagggtctttattgtttgctggaggaacaacttttgccgggcaatgatgcaaccattatgaaactgagctcgctcagagacagattgaacagtaagagagttcttgttgttctcgatgacgtgcgcaatgctctggttggggagtcctttctcgaggggtttgactggctaggacccggaagcctgatcatcataacctctagagataaacaagtgttttgcctttgcggaatcaatcaaatatatgaggtccagggtttaaatgagaaagaggctcgtcaacttttcttgctgtctgcgtctataaaggaggatatgggagagcagaatctccaggagttgtcagtgagagtaataaattatgctaatggaaacccgttagctatcagtgtttatggaagagagctgaaaggtaagaaaaaactctcagaaatggagactgcattcctcaaactcaagcgacgtcctccatttaagattgtcgatgcatttaaaagcacctatgacacactcagtgacaacgaaaagaacatttttttggacatagcttgtttcttccagggagaaaatgtcaactacgtgatacaactgcttgagggttgtggtttctttccacatgttgaaattgatgtccttgttgacaagtgtctggtaactatttcagaaaaccgagtttggttgcataagctgacccaggatatcggccgagaaatcataaatggagaaacagtacagatcgagaggcgcagaagactgtgggaaccttggagcatcaaatatttattagaatataatgaacacaaagcaaatggagaacctaaaacaaccttcaaacgtgctcaggtttgttatattttgatagtttcatattttttctactttatgagccaacggcctaatatatccacttccaatattttcagggctctgaagagatcgaaggcctgtttctagacacatcaaacttaagatttgatctgcagccctctgcctttaagaatatgttgaaccttagattgctcaaaatttattgttccaatcctgaagtccatcctgtaatcaatttcccaacaggctctctgcattctcttcctaatgagctaagactcctccattgggagaactatcctctgaaatctttgcctcagaattttgatccaaggcaccttgtcgaaatcaacatgccgtatagtcaacttcagaaactttggggtggaaccaaggtaagcaatctctgatatgcgtcgttcacccttatcattacttgacaaattttgttgttattcatttagcttgctttttttttgtcttctcagaacctggagatgttgaggacgatcaggctttgccattcccaccatctagttgatatcgatgatctcttaaaagctgaaaatcttgaggtaattgatctccaaggttgtacgagactgcagaatttcccagccgcaggtcgattgctacgtctacgagttgtaaatctctcaggttgcataaagattaaaagtgtcctagaaattccaccaaatattgagaaactacatctacagggaactggcatattagcattaccagtttccactgttaagccaaaccatagagagcttgtgaattttctaacagaaattccgggtctttcagaggaacttgagcgtttaacaagtctgctggaatctaactcatcttgtcaagatcttgggaagcttatttgcttggagctgaaagattgctcttgtttgcagagtctgccaaacatggctaatttagatcttaatgttcttgatctctcgggttgctcaagtcttaattctattcagggtttccctcgttttctgaaacagttatatcttggtggcactgcaataagagaagtgccacaacttcctcaaagtctagaaatcttgaatgcacatggatcttgtttgcgaagtctgccaaacatggctaatttagaatttctcaaagttcttgatctctctggttgctcagagctcgagactattcagggttttcctcggaacctaaaagagttatattttgctggcactacgttaagagaagtgccccaacttcctttaagcctagaggtcttgaatgcacatggttctgactcggagaagcttcctatgcattacaagttcaacaattttttcgatctatctcaacaagtggtcaacgattttttattgaaaacgctgacttatgtaaaacacataccaagagggtatacgcaggtaatactctctctccttctgcctctctcttgtctacttacctctccattagctctctttctttccatcaccccctcaatcctttctctttctctgttcgcctatgtctcccgctctctatagtgcctgttatgtacacccaaccacaccctcctcatatcatatctgacttatttgtattgcaacaggaactcatcaacaaagctccgactttcagcttcagtgcgccctcacatacaaatcaaaacgccacatttgatctgcaatcaggatcttctgtaatgacacgactaaatcattcatggaggaacacgcttgtgggatttggtatgctggtggaagttgcatttcccgaggactactgtgatgctacagatgttggcataagttgtgtttgcagatggagcaacaaagaaggccgctcttgtaggatagaaagaaaatttcattgttgggcaccatggcaagttgttccaaaagttcgaaaggatcatacgtttgtctttagtgatgtcaacatgcgcccaagtaccggtgaaggaaatgaccctgatatctgggctggattagttgtatttgagttctttcctatcaatcagcagacaaagtgtctaaatgataggttcacagtgagaagatgtggagtccgtgtaataaatgttgcaactggcaatacaagtcttgagaacatagcactagttttgtctttggatccagtagaggtttccggttatgaagtattgagagtcagctatgatgatttacaggagatggataaagttctatttctttacatagcgtctttgttcaatgacgaggatgttgattttgtggcaccacttattgccggtattgacttggatgttagctctgggctcaaggtcttagccgatgtgtctctcataagtgtatcatcaaatggggaaatagtgatgcatagtttgcaaagacaaatgggtaaagaaatcctccatggacaatccatgctgctgtctgattgtgagagttccatgaccgagaatttgtctgacgtaccaaaaaagtaagttctctttttctatcagcttcatatacaaccgtagacttaaataaatttgaaaatatttgagtacataaaatcacattaggtgcaatgaaaaaacgtgcaatttattagattgaactaaagtttacaaaaaagccattagagatgtaccagtatgctaccttttccaagttgcttaataacataggtttttcatgtttgtactttttagattaatttaaaaatccgttttttactccattcaagattttagaaaagtttattttttatttaatgaaatattagatttgttgtgaaaaagacattaatttacaatcagaggtaaaatctctagagacatttggcatttttgctcggctttctttgttaaatccttttttcgtgaggattttagaaaagttgattgtgagctactcaccaaggtttcatctttttgaaaaatactcttacataagatgtgtcaaggaaatgttagtttatctaacaaaaacccacttctcaacgtttccatatctatgtatctttttactttcatgaaaccatgagagacatatatgcattatgaaattttctgaattcttacattccttatagaacttctctcccacccacaaagatttgggaatcattagtcttttttattttttttcaattttcaattgatgtttgcttttgttttacttcttattatcatgttaaaaacttttttgatgccataaaaataacctttatacgtatgttgtaatcgtttttatggtaacatatattagatttttaaactttgcaaaaaaaaaaaaaaaaaaaacattagatttttaaaattctaaaagtagggttaaactccgtgtcgatagcaaaaaagggttacattacgtgttactttttactttgtgtgattaatttgcattttagaggtagagggtaaaattgcaaaaatttggcgaatgaaaatttttttttgcacaaaaccttatcttaaaccgaactgatcatggcacacactaacattgatcacagaactagctataaatcacaatatataatcacatgggtttcgatatatgttatatcgacgttggatgcaggaagaagaaacatagcgaaagtagggtaaagaaagtggtttccataccggctatagacgagggagatctatggacttggcgaaagtacggtcaaaaagacatcttaggttctcgttttccaaggtacactcatgtatttttgtatatacatattcctatatttgtgtatatattatattctttacaaacataataaatagttatacatataaacaaattatttaaatccaacaaaaacaaaatagtattttacaaaaggaaagttttgtaacaacttgcaaaacaccattttttatacacaaacgtaatcatcctaaacttgctggtggcctggtaaaccttcatatgttgctggaaaagtgaatatttctaagaaaaaacaaaaattattaaccattgaaaaagtcacattaagcagaatactgcagctttgtaaaatagaaagttcatttaattatctacggcgcaaattataagcctttaaattcttttttatgatgcagacttatcttataatcacaatattccatttgaaggatattatagatgtttttttttttttttaatccagttgtgcgtaagtgatcaaattatggttagttatgacttttgatggtcacttgatgacttaattaattatttgttcctcaggggttactacaggtgcgcttacaagttcacgcatggttgtaaagctacaaaacaagtccaacggagcgagaccgattcaaacatgttagctattacttacctatctgagcataaccatccacggcccactaaacgcaaggctctcgctgactccactcgttccacttcctcctccatctgctgagccataactacctctgcctcatctagagtcttccaaaacaaagacgaaccaaatcaaccccacttgccttcctcctccactcctcctggaaacgcggctgtcttgtttaaaatgacggacatggaggagtttcaggacaatatggaggtggataatgacgtcgtagatacacgtacactggcattgtttccagagtttcaacatcagccggaggaagaatacccatggtcaacattcttcgatgattataatttttgtttttattgagctcactctcatcactgcaagacaagaaaaaataaccagtgagatccaaggatttatgtacacccaaggatttagtttttgcagtgtcaatgattttcagccaataataaatcattaatttcaattaccagtcctccccaacctgtaaacccatcatgcctccaacatatggtgatctcgacaaattcgaaagcctaataccaaggatacatgtatcacagtaggatttctcaatcctgatgcactcgaagaggaatagatcttaagaaatcattaagccttatgaaagcaaggaaagaaatggctgagatgtcttacgttgattacaaatagaggcaatcaacacaacaattgttttgttgtgggttttgtgtcgatataccattgcggttaagagcctgccaaatgggtatgtaagctagagatctctctcatgtgtttattctctttgatttgtgtaaagctttgaactttcctattttcaataaaaccatagtctgaagaggtgaatttctttatccctattttcaactaaagatgtagtatatgaaaattacctaaaatctttttcaaaatcctttcttaaaaggtttgataatttttgaataacaatggatttgatttgagtttcacaaatcattgattgaatagaagaaaaggatggtaaatgattttgaattattttacataaatcaataattaataacaggtgattaataaaaaagactctaaatcttcaaagagcatctccataagagtatcttaacaataaaatgatattatttctatagaatttagttgtttaattaaatttaaatttgttacaaaattaacccaacaatcaagtgacatgggtaaaatagagtttctaaatcataagtttctcaaaagttacatgtgtaatataccggctatgctttggtttctgttgtctgtgaagatgatccttctggaaggtctcgaaggcttcctctggactccccttcgattcatgtttctgtattgacgcgatgtctagatcttccgtttgtgacatagtgaatgaattaagaaggggtttgtttctttcagtagtttaaggatgcgttttgtaacctcggaattagtttggactcggccacttgtgtatttctaagttcttagtatttgatctttggcttgctttgtggttacctttccttcaagctttaggattttagtagttgagactcttgcagaagtttaggattgattggattgcactcatggctccgctgggtcgcgcgttaagtgtaaaggttcctaggacgggggttaagtgagagatttgatttgtcctctcttagtattttattttctgcttgaactttctgatatatctcctctatgtctttgatccttcttagtttgatccatttcttttgaccttgctaagatggtttcaaggcttaatttcatattttggcaaaaaacagatggaatgcagtgttatagtgggttgaaaccggagatattgagttaatctctcttccaccggttgttgaaatattttcaagcctatggtaggttttcatgtgcccctttctcgtaaaatcaacaagctgaagcactattggtatctcatgtagtgtttgaactactctcttatgtggtttaagattattaagaatttcacaatgcaaatcacagatatgtaatcgagtagctatgtgtttggctaaacaagagtttcgcattccaatgtatggttcctttgattgatatataaaagttacactttgtgaaaaaaaaaaaaaaaaaaaaacaggaatccttcacttttttctattacttttgaaattttttattgtgattttagataccctaatgaagatgctataaagcaaatccctctttctttttatttctgctaaacaatatcaaaaattctgtgcacgaacacatctctgcacaagtttgggtcgccattttcaattatcccatattcattggaggaaatactaagaatagagcatgctggaagttatccgatcttgttcaaaacgttgataggctcgtctggttctcagaaacaagacaacacttgaagctagtccaatcaccgacaagcatccccaccacataaacgtttggagataacagtctcttcccatacatataaccgactcggtctttgacccagccacgctatgggattcatagaccaaagcagctaagaaaccgtagaccaacgatcctatcggtatgtttgtgatgaggatgttgtggttaaccccaacgctattgggtccaaaaagctcagatgttatggaaaccgctgctgcaaatatgaaacccgaacttagaccgattagagcagttcctgcttgtaacgctgccaagcttcctgatgatgccaacaagaaaagagcaattgtggttggtaaaagagcaacggctagccacccagttctagcaaaataaaccttcctgcagaaattcacattacaataacatcataatcttctcatcacgctagaaccagaggtgtacaaaggcttgtgcaagggacttacgctctgatatagtctggtgttgctgaaagtaatctaccgaagaatgagaaagacgaataaagcgtgacaagagttgttgtctcagagctttgtcctaaagattgtgcaatctgtcccaggttgttgctgtaaaccagtccaatcgtgccgccgcaaaaataggctatatagtaaagccagaaatctgatctgcataagaggaaagatagaggatgttcctctcccaacattccaagctgatttcttgtaatgacctttgtgcaacaacatccgtcgtcatcttcaatgaaactcttctgatcaggagtattgacagctcgcactacatcatcgttaagcaactggtagccttcaaggctggcttcacgtgtcaccattcctttatgcatctcaagctcatcaacatcaacaagaatgaaaccagaaccttctaaacggaagctggagtggatgttgtgtagataccaattgcgagcgtagactagaccagggaggcatagaggaagaatcaagagaagtattgatccaccaaagagaagacgagctgaagttacatcagaagtctttgaacgaaagagaagcagataaacaccgttcaagaccgctaatatgttaagcaatagaaacatgagagagtctcttcgaactccatctggtggaagaggttcaagaggcggttggcgaagaatagggatgagtgcagcaaatgagacaaaaagaggtacaagagcgtttaagagtaggtatagctctgtagaaacaggattgattgcgttgtaagcaagagtgtataaagcagcacttacaccattaaagctcactgtgagagaaagtgcaagtgatctgtttgcagggaagtttctgatgcagagcacaaagcagactgtgttgaaccaacagatacttagcccagctagcaaacaacacagaaacacctgcaataacatcacaaattcatagttagtcgccagttcagtgagcaacagcagttttaaaagattcaagacttttataaataaaaaaaattcctaacaaaatttcagatatgatcacaatcttctctccaagtaagttaatcattcctcccaggaaaaaagactcattttttttaattgcctagtctcaatggaagataattcaaataatttcatatagacataacacttctatctgaaaattcaatattatatttaccacatgaaaaagatcctcaaatgcctactcatcaaaaagaataattcagaagaaaaacccaactgccattttctgcaagaaagaacactatttaaatgaattggcgacaaagaggtagtattatacacagacacacaaaacgaagatccgatcacaaggaaacaataaagattctcgagatagtcatcaagccaagccaaatcagaacaaagccaaagaaaacacgtgagaccaaccagtgaaatgttacctactaatcaaaacaatcaaccatcaccgactcttcttctgaacttccaaagcttgatttcttcccattagtaaccaagaaaatatttatatcaaaaaaatacgaattttaataacatgtagaactaaactactaataaaacttcaaacatttctcgaattgaactatacttcattctatgtattaaaaagaaatgtatgaattaagtcatgaacaacattagtgtaaaacttcaattaagaactccgttttgagaaaagagacaaaaactattcaatggattatatattcattagagcaataaagtaactaaactacattagttttcatctataatgattaaccatactaataatatcttaaaaataaattcgaaatttctgatttggttttccacaaattgattcatgatcaaagaaacagagacaaagaaaatgttgagaaaaataatttttaccagaatataaggcaaagagatgacgttagtgatgacgagccattgaacaccataaccaacgaaacccataatcgccgccgcgaaaagaaccgtccaaagagggaaatacaagagtgcaagtcccgatgaccaaccgaaaactttaccaagatccgaagcgacggcgagataattcaattgtacttgcgaaatccctagaaccgatttcaaattcgacgaatacgtcgagaaatcgaaattcgtaccggtgaatgcttgaatccaaatcgtcgctaccagaatcatccattttcgtgattgtcccgccatctttttcgaccaccgtgttttcacaatctccgacgtacagttcctgattcaccggagattttgattttgttttttgtgttctctctcactcgtttgattcgagcttcttcacttgtttcgacgaatcgagaaaaaaaaggactaaatagagaaacaaatcatgttggtttacgtggcatcttcatgtcaggtataaatcaaccgatatcgaatcaattttacccggtttagttttgtttgtttgattttcattatgattttggttcggtattgagaaaaaaagttgaaaaccgaggtcacatcaaataaagtagtattacattaatatcaataattgatctcttctttggttggaaacattaataattcaccataattcatcacatgttcttttaatagtaataaagttgagaaattttcatttaatagattaccaactttttgataatttacaaaccagtattgctaggtttgggcaaaaaactaaaatccaaaatctgaaatcaatccaaaaaaatgcggttccaaaaccgaaccgaatcaaattgtcataaaactcgaacaaattataaatgtttctactcaattatctgaacctaaaaaaccgaatagtacatctaaaaatctgaaataaaattatatatacaaaaatattagttatattatagttataattttcaataaaactgagattaaacattttattgttcatattccataaaaacgattctagttccacatgaagttgtgagaaacatcgtccggatcctttcaaaccaagttggacgattcatttgttggagaacttggaagctatatataatccaaccttagcaactctatgtatgtatctggcaagatagcaagtttgtgtaattttccaaaagacgaatagagaatttcatgagtaacttgtagaaagaatttttcaaaatggtaatttctttgaagaatttttccaagaaatatctacaaaaacattttacttaataatgaatcttggtgtcaaaatgaactattaatagtattacattaatatcaataattgatctctattttggatcgtttaacagcaaaaaagagattctttttttttacagcaaaaagagagcttttttcgttggaacattaataattcatcacatgttccttaatagtaataaatttgagaaatttcatttaatagtcagcaaaatattttttgcatataattttcaaaatgatgttttttagagtattttccaataaatttctacaaaaaaacagttaataaatcctggtgtaaatatgattgataataaatttggttcagttaagtcctttcaaatattttcaattgctttggttttggttcggttcaagcggctcggtctcgattcaaaatgcttagagctcacagatgggaactcttttcgtttacgtttgggatggcaaacaaagccctaatcatacgtatatttaccttctccgacacgctaccataacacaacccaaagaacagtgacatagctacatgaatacttaccctctctaatataagtcaagctttagatataacaagaaccaaaagtggaacaagtttatcaaacagacaagcaaccaacttggaacaagcctattgataattgagagagagagagagagagagacctagtacaagctaaattggttcctactagagcgttaacatataatgagtatctgacattagaacctaccatttgttgatgggttcacgaaggctttagtctctcgtttaggaacctgaagtcccacccttgaacctgaagacccaccatttgctgatgggcttggtgcttcaacagagcaatgaagctcaggtggtgttgggttttctttatgaaacatgagtttggcaataaggtccgctgaaatatcaatgtcaagcttataatctgctgcaagttcaacgatggctttcaatcttccaacatctttgttatcagcctaaaagatgaatcaaaaacatatacacatgagtgagcataaatgaccaagattaatcacatgaaccagttcttactttttccagcgcagagcgttttaaatcgatgaccgctttcattaagagattttgggctgagaagtctttaaggtcgaacaaagatacaagtcgggctgcaggtatataatgacggttgtttatgaggcctataacataatctgcaaaagataggaaaagagtcagaagaccttgcttcatacttctgtttttatgtatcagaaatgtcttagaacccaaccggggatctttagtttaagaccaagggaatgaaagagttttggaccctgtttgtaattagaaacagatgtgacaagtagagcagtcttttcttcattgatcaaactctttaattcatatgccacaatgaacaacaaaaacgccaaagcctcgagagatgatcttggagcttcaatgtttatcaaccttttccaaagagtagcaacctgtgtcgccttgagctgcagttgagactggtcccatcttttaatttctgctagctcttcaaaaaacagaaccaaattcttcagcagtaactcccctaaaccagattctttttttcgatgaacatccataatttctccctccactaaattcagaacatatcctcttggattacgtttagctctaagaacattggaaacttcaaggtgaccaagattaactgatgagatttcataacgcatgagatgatctccactaaactgctcagcctctgctgcaacaggctgctgctcgtgcttaacaaatacactactcgtcgttctcaactctttcttcttcagctcaagttctctttgagtattctgcactgatttcttcagctcaatgagtgttgtttcctctgacttgatctgattccttagcaaatcaagttactttcttttgtcacctgcttcaatctctgctgctttaatctctcgctttttagcttcaagtgcatctgtttgtttctcaatatggttttcctctgacttgatctgattccttagcaaatttagttccttttctttgtcacctgactcaatctctgctgctttaatctgcttctggactttccccaatttcaagctcagaacttgaagcttgttctccttggtttcaacttcccgagacttcttttcgatatcggtttcaagcatatcaagatggtcctgtacactcctcaatatcccagctgaatcagctttgtatttctccaaagacttacagattttccgtctcttagactcactgttgagtctagtgacagtgagtgttaactcatcctcaacacaagtcttctccatcgcaacaagtaatggcttcaacagtaacaacaacaacaacaaaaccttaacacagtgaacctgcaaatccgattacaagagaaaaacaaaatgggtaaatgcaggaaacaagctcttagatctaaaacacaacgttcttcagaaacaaaacacattctccatagccaaaaccgaccaaacagagtaagattttaggcaaatgtaagaaactaagccctaaacgaataaataacaaagaatcaaacataccctagaagctaaacatcagcagtaacacaaaattcaggaagaaatcaaaataggtcaccgaagagaagatcagaagaacatctaaaaaaagactaactttgaaattacgaaggtaaggaagaaaaagaaagagcaaaaacaaattagagagagaaagaaagagtaaaggaaacgtacaaagagaaaaagtagctgacttgagaagttggcaatttcgtgtgttgtagtgagagtctgcactgaagaagactgacaaaagaagaaagatggacattaatggagccaagaagatacttttttagtgaaattgttatagccgttgtgatgggcttactaagatttaaggcccattgggtttttatcaagtttacttatcttttttggataaacttgttttcttatagatttcgatggagattaatggcgtcgcctctcaaattgttgtagccgttgtgatgggcttactaggattaaaggcccattgtttttttcatcaaatttagttatctttttgtattattgtccactagagaagttttttaagaaatttatatttattggtttttacattttatacagagtgtgaaaacaaaaaaaagttgctttaaatgatttttttcttaatgatatttctttaagtttacgccgttctttaattatatacgttattaagaatcgaaactgataatgaatttgtagaattaactcttagaatttccttttattattcatgagaacagttggaaaagtagaacgtacgttacttaagaaaactattgaaactgatcaagatgaaaaattgagttatgaaaaaagaaaacaacgtagtggatcatccgacgagtagacggttttggacaggaccattaggacaatcttcggctggaacatagagaataacacggttgcaacaattgatcgatggtaaataaacaccttgagggtaaatgaaagcagtcacaagtggattgtcactttctattgttgcctttgcttgaagtccactcactcctcttagctctggccactccaccttcattcctagacacaccaaactacaaatctttaatctttggtattataataaggtttgtagaaacacatttggtcaattagggttacattaggtttttggtttcagttttcttagaatgttccaacgtactttgaacctagctagtgatataatccaaaccgaatctaaaacatctagaacatgaactttgacaaatggaaaatataaatcgatttgttagaatgattggtagagttttctcaagttcatttgtagaagcgagattcgcatccactgcctgagcattcacagatgtcacatttgggaccaaggatgggacaattgttttgcattttgtgttttttgctttcgacagatcttactactaaagggaattggtaatctttcaaatgattttcttttcattttacctcttgatatatatagagagagttaatggagcatatcttaagtttaaagacacaaatatttgttttcgcagttttgttactagtaatttactaaaaaaatatctttatcatttaattcagtttatcttttgatcgatatacaattattaacatgccttgtattattgatttatctttttattttcatttactttcattaataattaattaggtgatttttatggaggagttgtacaaattaattgaaacacaaaaataggaagcagatacaaagacggaaatataaacgaacaaatcaaaagttaaaaaaacgggtacatacatcataaagataacaactacgaaaaattaataaataaataaattaattaaaatagaaaaagtcctcataaaatctaaaatcataactcgaaacaaataactaaattttctatgtttaccttgttttggtaattttttccatttaatataaataagctaagaaattgtttaatacggatataaactcatatgatccaaactaaagatcattttaaaacatgaatttatttggataatttttattttttttcagtataagaataatacgggaacggtacaaacattctaaatttaagactacaatttatatacttgcttagtggttttcatgaaactaatagttttcatgaaaccatgttgattagaataattaaaagttatgagcatctgctctccttcaaccttctttttgatcaatagaatacaatatatgaattcaaaattaaatggtaacctaggaagtacggaagctttgttgaaggtccgcttcccacttcagaatcttagttgaataagaagtttttgaaatctcactagtcacttcacttctaaaaattctactttgaaagctcgtttgaagattacaattctattttgaagtttgcatttctatttaaaaaatttgatgtcatatataaataggaaacatgaaaatatcccaaatatttttgatagttgtttttacaaataaaaaaccaaaactaattttgcaatttaattgcatactaattttgtactttagttttataagatcatccttaaaaatatgaccaccacatgaatcattatttgataaatcttggaatgattaattaattgaattaaattaactttcaaaaccttgaatttaatgatgtttttaaaaccgaatttgaaaccatttctatttgatgaattaagaagatgagaatgaagatcgtgatctaaattttggctttgaactatttgatttttatttattgtgtaaaactaaactatcttgtttttatttgtagttgaggtatttaaaattcatgcattagacttctgtggttcattatattttttaatatgataattatttgatttaattttttgtatacgcttttaacacctattcactttttaaaaattttataaaacttgtttttatatttttaaatgcttcgcttccgcatactcatttctgatttcaataatacaaatatatataagtaggtaattaaatgatggtggtctagtgattgaatgatttactctaaatattctctttggcagattaaaaattttcatggtagttttaattatttatgaccattcaaaaaagtttttagtaacaaaataaaatctaataaatgtctacacatttcggaaggttagtatgaaactcggattttgaaattctttagatttaaatattatagactacatgttatggtctatcacatattcaaaattttcagattatttaaatacaaacatcatgtgttcaaataaatgtaacaaagtcgtgactcaaaagtcaaagtcaaaacctatatgctctctctgtattatttagtacttgtattattaaacgcgttttggttttggaaatatataacataattctcattttttctgtttagagaaaaaacaaagaattttaaaaattggtaaattgtaatcgacagatcttccaggccactttccttatccctttctcctcctagtcccacggaccctaccttcctcttacatcatttggtaatgatctttcccaaattcatttatttttatagttagacatactacatcaagattcatactaattacagacttatcaactatacattaatcaatatgagataatttttctcttttcttgaagtagtccgctaaaattatagtaataaatactaatatacctatagacatagacagataattgtaatatccaaacaattttaaataagtttgatgttcttttgatcataaatctaccttcataatgaaacatcctccaccagcatatcataaatggttttttgacgtatattgaaaaattcaccatgttggtacgtaaatttccattttattttaattggttatgagatacacacaaccttctcaatgacaagaatatatggttcttctatatataaagaatctttttaattgaggataaagaacgccgattcaaggattatagtaagctacttaataatttgacttctgcaccgaaacaatatcaatcattttttacaaaaatataatgaagagatataaatctgtttaacttctaccctaatattcatttgtggagaaagaaggtaaaaaattaaagtaatgattcatttattcaagttattgaatacattatgaagacgaggaagacaaaaagtcagaataatgtaagtaaattagcattaggtcttaaactctcggcattccgcattaacttgattcggtgcatttggaggaggaccgacacaataccacacgtggcaaattaatttccttttgcagaaataattcaatgtcatgtaatttcaaattttaaaagttttgaagacaaaaatcatctcatgagccgaattgatatggacactagtacagcagcttccttagattccatccagacataacttttgatttcgatataggtcatcgctattgtaccaactactacgtataaaagaaatactgcatcctcataataaatcataaaactttataataaactaaacaaaaatagaattcatttttctgtttatttattgtaatattcttatgtgaaactattaataaattgaacaaaatacttaaaggaattagattatatacgatatgtgaatactggtcatattactacgaaggtagttttcttgagagtctttaacgttgaattctcgtgacctggcaaatacatgaaagtaacaataaaacttttatatttatttttattaaatgaagcaaaaaagaaaaagaaaaaaaaaaggttttctttcgacgtgtggtattctgtatccatctatataacagagaggacatcaatggctttctttgaacttgtaaaccttactctcgaagagtcctctgttactcatttttacattgtaaaaaaaaacttcttttcttctctacgtgaataagaatctgaagagtcattttctcaaggtaaatcttcttcgtctcttttcctaaaaatgaagtctctattagaatttgtttaaatgaagtttctgttattatttctttgatagtttccagttctttcatattgatctacgagttaaaactcagattttcttactcaaccatagcttattagatatgttttgaaaactagatatgttaattgtgagtcatttcttggatttaaccaagtaactattagtagagaaacaattacggtcatataatcgtgatggaaaagatcttgcaatgttttgatttcaatcctatttttggcattttttttcttccaagaagtggtttaattttattttcccccaattagttggcggtccaataatccacttacaacaaattgcaatgtttggtttcaacaaaattgtttttgaatttaaaatgatataagtcgtaatctcatcatatgcatggttctcattttggccctcccgacgccatgaattgcggtctgtttaagtttggtctagaagggtattttcggatacactcacattttaattcattcattgttcatagagctaccattgtaccatctaaatagcatttaatacaaatatatagggacgaaagattactaattgaatattgcaacttatccttctaatagttgttcgtgtcttcactgattataactatgagtaagtcgttgttcctaatatgattaatattgaagggaatttatttatatatttcgtatttatagtaataatattataaattatttttcggtggattacatcaatcgaggaaaatactaatgcacacacatggactggtcattttgtttccccaactttttgaatggaccaatggtgatattttcaatatagaatatattttctcaattcattaagttcttactttgatacagaaacaacaaaagataagctttatattaaaaccatgtgcaagttacacataacacatgtacgattacttgagatccgaacacatcgcttgatctcaaagctttttgttagagtcaatcctctacattatttgggagataattaacattctattcgattttgtcattatagccataataaattatgtttggttcggacaagttcatttttactaatttgtgagttataactttttttcttttgttatagaatgacgtggctaaaacaaatgtggtcaagcattttagtgctagccgtggtggtgatcggagccagagctgtgcccatcacgtatcttgaatctgcagtggctaaaggagctggtagacaataattttattttcaattgcttattaggaatcaggttcgagaatggatagtatgaatagatagaaaaatcgaattaatgatgaggctttatagtaagaaaaatagagccaacattggaaatggtcttgagtcaagtttctaaaaatccaaaaaaataaattgtgtcttccaaatttcaaaatggtattcaatataaatgttcattatcttggatacttcagattaataaaacctttatcggtgtttactcatgagactaacttggattttaaatttggtagataaaaccattgttataactaattatctactatgtttgacaaacaaaaaaaactaattactgtatatatattatattttctgtagtgtgtttggatggtagcgcgccagcataccatttcgataagggatcgggctcaggagtgaacaattggatcgttcatatggaagttagtattatttttattttctcattttattagatgttatcataaataactacgtacaaaatataatgatattaattaaatatgtatatacttatgtgaatacattagggaggaggatggtgcactgatatagctacatgcgttcaacgtaaaagtacaatgaagggttcttctaagcttatgaacaaagactttggtttctccggtatcttgggtggcaagcaaagcaccaatccaggttttcaattcttttttatttcttttcattttgttcagcgaattttttatttgttttcttatgcaatgagactgaatcggattttgggtgttttgcagacttttacaattggaatagaatcaaagttcggtattgcgatggttcatctttcaccggtgatatagaagctgttgatccggtaattcacttgaccattaccgttaaacttaactacttgaaatggggacatggatgatttttaatcatttatattgaatatcacataacgatttagttgaagttccaaatttttaagagtgtaatttgaatattttcagacgcacaagctgttctttcgcggtgctagggtttggcgtgcggtgatcgatgatcttatggctaagggaatgagcaacgctcaaaacgtatgaaaaatgataatttcaaatatgtttctctaattgttagtgaatttttgaagtgttggaatttaaaatgtttggttacatgaatttcaggctatactctccggttgttcagctggagcattggctgcgattctacattgcgaccagttcaagtccactctccctaaaacggctaaggtcaaatgtgtttctgacgctggttacttcatccacgggtaacattcataatttctagagagtcacacatacaattgctagcatcctagataacaaataacaacctttgttattttgttgtttgaacagtaaggatatcactggaggatcttacatccaatcctactacgccaaagtcgtagcgacccacgtaggatacatctctcttttccttggccatatttctctaatatatcaggtgtatcccatcacgactaatctcgatcactatttacagggatctgcaaagagtctacctgcttcttgcacctcaagtatgaagcctgatttggtaaatttatcgaaaacatacttgatatacaaggcataaatttttccgagttcgttatattgtataaacgcttatgtttatattttcacagtgtttcttccctcaatacgttgctaagaccttacaaacaccgcttttcgtcatcaatgccgccttcgattcttggcaggttcgattttgtttttatgattattgttttcggtagaaataataacactagatatgatttggatttaaaaattttattcctttttttgcagatcaagaatgtattggcaccaacctctgttgataaaagcaaagcatggaagacttgtaagcttgatcttaagaagtgtacggccgctcagcttcaaaccgttcaaggtatgttttacctaccggaactaatgaacaaatttggttaatatcttctagactaaactgattggtttattataatatttcaggatatagagaccaagtgttggctgcgttggcgcctgttcgatccgcgacgacgaacggattgttcttggactcgtgccatgctcattgccaaggtggaagcgctgccacttggtccggcgacaaaggtcccacagtcgcgaatacggtaatcacttgattttcttgtacaaagtaaaaataatattggaaaataccacaaacttttgatctaagaagggtttataaaaatttacaaatggtttctatgacatttaagactttttagaatctttcataaacctgaaaataaaacataaatatgtagtatatttttcattattgttttggatttgttattttcagaaaatggctaaggcggttggagattggttctttgagaggagtacgtttcagaacgtagattgttcatcgcttaattgcaaccctacttgccctgcagtatctactgaagactaaaatttattcattgatgtcttaaaatttattcatctttggaatattgttcttgaaatttaaaagtaaaataatataattgatacaatttcattcgaataaataaaatcctttgcccttctacaatcgtttaagctgttatatataatcaatctctcttattattgggttcgcaatttcttaaattctttttaataaagaatcaatcttataaattaaggtttttttaatatgtttttgaacataagctactaagtttgactacatttacagaagttgcaatacagaaacaaagatgctcatgaaacacacaacatcaatggattaactttcttacagatatgctggatcaaattggtatacaagtttacatcttttaaactgtcacttttgttttccattgtaagctacgaaacaaaaagcaaacacacaacaatattgattcagttgcaggcaaaaaccgatgaatgttcttggtctcttgtagaatcaaaatctttcagcattatgtctataagactgtaatcaatgttgttccgatgatggatcatgtctacaaatatctcctcgacacagcggacatactctgcttcgccataaaaacatcatcagataatctagtacacaccaaaaaggcggaaaattagttgtcaccaaacttcacattatatatcacattcatacctgtgaatctccttgagccatttatctacacaggttttgtggaattcatgatgacaaggaagtgtccttatagagtctgcttcttcatattccacaaggcatatgtaacatctgaggttccaggaaaaaacatgtttaaccattaggtctcgagacttttgagcatcacaattggcaaaagaaagatctgagaatttagtatgcattactgtgatggatcctcgctttgtgacttagtataaagttttatcggtaataaatccacaacgtcgttaggtgcaggaacagatcctatagatgatactgatggttgttgagaggataagacaacagattgctgatgaatttcatcaagaacctaaaatgaatgcactgtagatccttagcatacatgagaaagaaagatagtggcaaaaagctgttagtagggagaccgaaaacatgtatttacctcgaagagagcttcagctagcaatactatccttgagatgctagctcttgcatttgtttcatcggttgttgctgttgtcgaaccacggttagtaactgcacggcatgtgcagcgacctgcttgatcttgacctgataagacacaagatctatcatgatggactgcgacattctcaaaccggcttcctaatctttgaagagcgcgaacctgtggaattagttatatcagttagttagatcttgagttgatcagacacatcaaggaagagagaatcaatgagtttcaaacctgagatcttattctcctccttctttcaaggaaatctgatctgtgttctaataaaccttgatacctcccttctctcacaagagcagctggtgtctcatgatcctgaatgccgaataaggtccttcgaatgctagaagcggaacgatttagtatagacgttgaagtcacaggagcatcctctgctgctgcggtttcagcagagaagagatcagtatcttcttctccctgatgtggcgagggacggaatgcgaaatcagagagtgaagatcggcgaagaactctatcacggagtcttccaacactcagagttctactaaatctaacattgcgctcaatagaaggttctcgtacaacatgtcttctatcaagaagtccagcataagtactatccataccattaactactctcggagaacgtaagctaccatcttccccaaatctcatggcatcaatatctctaactacattgtcaatcacaggaattctcggagactcaactctatcattgagcctaatagcagattctgaaggtgaagtaacaccatcttctctatgagaagaagagactggataagtcgtgttgaaggatcttgaacttgaagctctgctaagtctagagcttatgttaccaggaatgaatttgaaatgcgaaaaaactcgacctggagtagaagattcttgaatcgaaccgctaacatttctcatctgtacattgcttacactagcttcctcttcttcttcttcaacaccacactcatcatcaagctcaagctcatcacaatgtctttcgttttcagatttcttatcatctttcaattctttatcatagcaatctgatgcatctcttctcgattccattctacgccgtgtaacacttccatgactcttcctcatccatccattacacacctgaagaaatcaaaactcatgaacttgacctaatttcagatttgaccaaaataaattaaatatcaaaaccagacctgttcatcattatcatcatcactgtaatgagaagtagaagatgaagcaagacaagaagagtgaagaccacaaaaaagactctttgatcttcttctccttccaccaccactagaagacgacggaggaggttgagccacgtcagaagcttctctcgccatcgccgacgagcctagacatgatttgctccggccagatcccatcttcttctcaaaagcaaacaactttctgctaaaattacatcattgacacaagacccacaagtcttttccccatcttcttcaaatccaccaatcgaagaaacctccaagtcaaaatctaaagatcgaaactttttcctcagatctttacattgaaacccgaattcgtcattgacaatgcagaatcaaaagccctaattattgaatccccagatctgaaactcgatcgagattgcaagaatacctcgaaatctgaactttttttattgcgagaaattaatgtaggaactaagctatgtgtgttgtctttgaatcaaagagaaatgctttgaagaaaaggaaagatttttaggtgatcggagtaatcgaagaaggagacaaagcacctatctgcgatagagagagagacttttacgggaagagtgtgtcttgatgttcgaacgagagggaacaaaaaaccaaactcaccatttctttatttttctttcttttctttttcaaactattataacattcttttgttttcgttcgattttttaatcttttttgcaatcataattggacttcattgaggactataattgagaaaaaagctttgaaatggtcattgaacagtgatcacttagatgaaaaatagttgtaaccaaaccaaactagaatattcaaactatactcaaaactgaaattttgttgacaaagccttttggttttataaattgcgaagcagaaatacaaaatcgaaccaaaatcgaaccaaaatcgaatctatattctcaaaaattaaaatataattgaactacactaacttcaaagaaagaaagaaaaaagatatattaaaaatagaaaaaaaaaatgagttgaaaaaagtaaatcacaataaactaaaatatacaaatcatttttttttatgaagtgattgttttcagtattttacaatttagatatagtggcattctagcttcagaagatttttgttggaccggccctgtaaagtcgatttaaagaccaaacaaaaactaattttaacatgataaaatcgaatcaaataaacggaaattcattaacattttatttataattataatgttaattttactaaaacctacctaaaataaaaacctgagtcaaaatatgtaaactaattttaacatgattttggtttgatttactaaaccaaaatcaaatcaaaagacaaattatgtatttatgttattcagtttttcttttctaaactaataaaaccatgaaaaaaaggattggaaacaaaaccgtaaaacccatcgtgtcattcctaacaaacccatcagtaattcagtatcactttgtcaaaactggtcacattggctattgttgaacaaaaaaaaaagagaggtttttgaccaaaaaaaaaaaaaaaaaaggaggggttaatattgacgattttgataatgagagacttttaacgtaatttataataattaccgacgttgatttgtaaatccataaagttacaaaaaaatctcaaatgtgggaacagcacagaagcgagcaacttcaccgcacaaaaatgcatactctcaacaacaccatcaccaccaccaccggttcgcaagatccgaatctcgacccaattccagacccggatcaatttcccaaccggaaccgcaaccaaccacaatctcgccgccctcgcggattcgccgctgcagcagcagcagcgtcgatagctccaacggaaaacgatgtaaacaacggaaacatcgccggaatcggcggtggagaaggaagcagcggcggcggaggaggtggaggagggaaagggaagagagagagggagaaggaaaaagagagaacgaagcttagagaaagacatagacgagcaatcactagtagaatgctcgccggattaagacagtacggtaattttccgttaccggcgcgtgctgatatgaatgacgtaatcgctgctttggctcgtgaagctggttggagtgttgaagccgatggtactacttatcggcaatcacagcaaccaaatcatgtggttcaaacttcgaaactctctctctcaaaattcaaactttcatattaagctatttaagttagggtttagtggaaagatgataaatttgatcccaaatatgtgtgaagctcttaaagttataagctttgttctgttattaatgtaacatagattgtttaatattattggattaggtacagtttccgacgagatctattgagagtccactttcttctagtacattgaagaactgtgctaaggctgcaattgaatctcagcagcattcagttcttaggaacgatgagaaacttgctcctgtgtctcttgattctattggtattgccgagagtgatcatcccgggaatggaaggtatactagtgttagtcctatcacctccgttggatgcttggaagccaatcaggtgaatgataaattcatttccttattaggagaattgactttaagctggacgttgtttcatctaaccactttgtttttctttcagcttatacaagatgttcattccgcagagcaatgtaatgacttcacagagagcttttatgtccctgtgtacgccatgcttccagtgagcttctgatgagagaactttgtgttttaagtgtatatatatggatgttgcccaataaaaaagagtgtacatatatttcttaccagttttgccgcgatccttagttttcctgtgctaaagttctgtaccttgtctttcaggttggcattatagacaactttggccagttggttgatcctgaaggtgtaagacaagaattaagttacatgaagtcattaaatgtcgatggagtagtaatagattgttggtggggaatagttgaaggatggaaccctcagaaatatgtatggtctggctatagggagctctttaaccttatcagagacttcaaacttaagctacaggtgtgaatatttttacttgtagagctttgttaaatacatcctatgtgaccaaactgtgactttccctataaaggaccgtctttttcataatatcttagcaatcagtatatggtttgtttgaaggtggtgatggcatttcatgagtatggagggaatgcatctgggaatgtgatgatttcgttgccacagtgggtgttgaagattgggaaagacaatccagacatttttttcactgatcgtgaaggaagaagaagtttcgagtgtttgaattggagcattgacaaggaacgggtattgcatggacgaactggtatagaggtactcaaagaacactcattgctcagaaattgttcagtattttggtatattatgtctcatttcctcctcttttgtactgtctagattcttatttcttccttttcaacacttgattatccaggtctattttgattttatgagaagcttccggtcagagtttgatgacttgtttgtggaaggactaattactgcggttgagattggtcttggagcttctggtgaactaaagtacccatctttcccagaaaggatgggttggatttatcccggtatcggtgagtttcaggtatttttcagattgctgaactttacttctacgttctaacttatgactagtgaagttaacatatcaatttactatttttcctattgcagtgttatgacaaatattcgcaattgagtctgcaaaaggaagcaaagtcacgaggattcactttctggggtaaaggaccagagaatgctggtcaatacagttctcatccacatgaaactgtgttcttccaagaaagaggtgaatatgacagctattatggccgcttcttcttaaattggtactcacaattgctaattggtcatgctgagaatgttctgtctcttgcaaatctcgcatttgaggagacgaagattattgtcaaggtataatccttttggcacttatccttcaaacccagtgatgcctataacaatgagactcatacaccaaaaacaacaatgcagataccggcaatatactggtcatacaagacagctagtcatgctgctgaattaactgcaggatactacaacccttcaaaccgtgatgggtactctcttgttttcgaaactctgaagaaatattccgtgactgtgaagtttgtgtgccctgggccacaaatgtctcccaatgcgcatgaagaagcattagctgatccagaaggtttaagttggcaggtaatgacactttttattgatgactatagctttttttacttctcagcaaatgtaatcttaaccctaaagttttggttatttgtggcaggtgatcaacgcagcttgggataagggacttcaaatcggtggagagaatgcgattacttgtttcgacagagatggttgtatgagattaatcgatatagctaaaccaagaaaccatccagatggctatcacttctccttcttcacatatcgtcaaccttctcctctggttcaaggatctacttgctttccagatttggactacttcattaaacgcatgcatggtaagatttacccgcacgcttgattgtgccttccctttagattcgttgtcaaaatctttgttcttacaactatatttgtttctttgcaggcgacataagagataaacagttttaggatttgcatggtcttaggattcttttagtaagtgtcttttgtttaaaacttcaaaatctgttttgttttgtttattctctcctcaaggcctatatttaagacgattgatcttgtaatctttaaacaccttaacacttcactagttgaagatgaactaactaattaaattcttaaatgcattctaatccgactcgcgtaaagtagacacttgtttagttttattttgaaaaatacaagaaggtattgatgtctaatgaatacaaccgaaaagtgttgcctaactcttatacctttttgtctaaattattcttagaataacctttttgactatatatgcccgaatccgattacattaatggtattaataatttttgttcaaagttacatttttcttttgtatcattcaaataatattctgataaaatcctgatttttcatgattgtatttgacattttagatccaaccaaatctttgaagaacaaataaagaggggaaaaaaagaccaacatgtccttttgcattcagtgttaattcatggacaatataatgttggtccgtacgaaaatttgattttgtatctaaagaagcataagaaatagggttagttaaccacaacgaacaaagcctctattatacatatctaaatgtgggataatgaggcaaaatgtccaatatgattaatgaaaaagatggaaaaaaagtcttaggtggtgtgtgatttaaactgtgttttaattactttaaatgatatgaaaaatctgttattatttaatcaagattctattaaattctgttaaagttttttttttagtagtagaggggaaacaaccgtctcccgcaatttattgaaactgaaaagaaattacaaaacggtaggcgggtgagcctcggaaacgcagttcctcggacatcctcccttacaatctcctccaccaatgagggagctaaatcaaactaatgaatacctaaagatagattaaaagcatagttcgctaacccgtctgcaaggctgttagcctccctatatacatacggttagcttctctgttttagtttgatgttattagtttttgatttattaaaaaatctttaaaactcttaataaatttggatttattggaattatattttaaagtcattgaaaattttgtgttattcaactaaaacaaaaaaaatatttgattgttaatgaattaaattattctgttattggtttatgattttctatatttttactaacaaaataaaatcataaaaaatataatcgaatgtttgacaaaaaaagtataatcaaaatagagatattgtttgaaaaactttacaagattgtgaaaaattaatttacatgattatagaaaactctctagcaatagtttatcaacaatgatacattttttttgctttaattgaatatcacaaaattttagctataaaaacatgaatctgataattccaagagtatgaatattttagattatattttataaatcttaaaactaataaaatcaaactttaacaaacaaaaaaaaatgaaaatgttgattaaataacaaaagattttacataatattagaagtcactaaaactctatttaaatcacaaaccaataacatcatcaaaataaacaaaagaaaaatatacgtcatcaacggcgtttactattctgaacgaaattgtataaatctcatcatcactaacctaaaaccagcataaaccctaaaattttctcaaaaccccataaacggtaaaccataaagcttcaaaatttacagagtttccatcagaatctgttgatatctaaattcatttacccgttaaacattaataaataataactgataaagaattcgaaaacaatatctatatagctcaaaaaccctagatcctaacatttcaaaaacaaaaacattattcttaaagcttcgaaactaaaacaaagacttaaaaagtaaggaaaaaaacaacaaattatcttgatttagataaaacccaataccgaatcaatcaaatcacacagttttcaacaaaaaaattagacgaacaacaaacagaataattgtgtcagatctgatagttggatccttattttttcacctcggactccgattcagttgatacaagacgggagctcacaaaccaaccatgacaagacacgtgtcggtgtcagccaatcagttcccgacctgcaccaagcgaatccgagaccgccggtaactttaacaatcatcgcatctctctctcatcagaaaaaggtgaaagagaataaggaggagaaaacagttaccaaatccggcaaatattttttctgtgatttttaggtctttctcaactatcgataatactttagcagcctcctttagtggtatttaatgaaaatgataaaccaattatttgtctacgcgtgtctctttgaaaagtcttctgtttctatatctgcacgttgacctaacgtcggaactcgtcacctgtgactgtcacgtgcatgcgtctaaatcaactatttagatttttgagcattactagtgactatgtgattatataaatattgacatagggaaaaaaatcacacaaggatttgtataaacaaaactttatttattaccaaatacatacaaatcccggttcagtccggtttggctagattaataattacattcttagagacgattttttgcttaaccaacatagttcacaaactctggtggcgaggggagtgagccaccatggagcaaagcgaagaccgagccgacggtgttaaagactcgtgggaccacaattcgagcaactcttggtagagtcgggtaagtaagagtaccaacgataaaccagttgagactcataagagcaactgcatctaaagccggtttattcttaaccgtagagaaaaattgaaccacacttttcaaagagataccaaccactgtgaagagtgctcctataagtggagtacacagctcttgttctttggcttcatacattactatacccaccactagagcgagcatcgcgctgaatacgcttcttgaaaccgcaatgttcttctctaaaccgaggactcttggcgtcaattcttcgtcttttggaattgtcgatttcgcaaacgggtaaagaggtgatttaaccgatgtaaactcggcttttccctttgatgcataagggatattcttaggcttatgtatgctacggatttcgcttggttcttcacttggtttaactttgcccttcttgctcctatagtcttttccattaacttccatcagttgaagattttcctcctttagttcttgtagctgccaaaatccaaatgtttagaacatatgtatatgtggttatgcaacatgtctactaaaccagtttttgtacctcggcctctagcttttctattttggaaatggcttcatcatgttcatcttctagttcatctaagtcctgttccatgattcgatattcttttattgcttcccggagattcttctctatctcttttctattccattcaagactctctagctcatacctcaaatcataaatactctgctcaagctggaaatacaaaatatcttcttcttttttgttaaattatacattaaaagatctagctcaatcaaaatgtaaccattattatgactcctcaaaagggtaactataaaaacaactgaaaatcctcaattttccatttattcataaccaatcaaaggttactgaaactactaaagtttacctaaccttaaggatcaaaacaatcaaaggttactgaaactactaaattctcataaatctttaggatcagtaccaaatctttgcacattcaatcaaagtgaataagataacgaaccagtctttcccttggtatagaggcgaaaaagcgaatcgggaacgtaaaaagaagaacggatccccagatagagccccgtacagctctccacagcatacttaagttgaaccaaattgcagaagtcaccatatcagtagatacaaaggttgtaacaagagctgttctaagacagaacacacatgcgtatatgcagaaaaagaaaggtctggtcataagatataatgaagatgagaccaacccagaaatcaaacctccaagatccatttgtcttaaccaaatttttttcccctacaaaaatatgaacacacaaactttgagtcactgctcaatggaatttccaaaataaggtcaagatttttgaaagttcaaatttccaatcttaataaagctaatgaaccaaaatgattctagtttttattgaagcgatatccaaactctgatagaatcttataatagaagaaattagaagcttaccttttttaaggtaagagtaagagccagaagttgtaacagagtatgaagtgaagagaagaaaaatgatagggacaaaaacagagaggtggcagagagaggaaagcaatggacgacacgttgagtgatgagtgtatttctcaagtcatttggataaagatcagagctttgaaattcttctagttatcagagaaagtcaaaacttaaaatacatttctgttataaaaaaaagtacaataaaaatgaataattaactataaaatataaaaataacaaaaagattaacttagattaatggtatgggttttgtcggaattgataatcagtcaatcgtttttctttagttatcaaagatgtgcttttgtttacaaataaggctttttggttaggacaagtctagtatcgtttgaattcagataactaacaagctgtttcactgttatacaaacaacaaagcattaattacaataccacttacaaaatagaggatgcacatttgcagaatgatgtgcaataagtgaatgttgaacaattcaccaatatgatcgaataataggagctgacgttattgttgttgtaataaaaaaagcaataccaaatagtcaaatactattgtaagaaaatcaaaagtgtctacatctgtaaatgtacatactacttgtaaaaaattcaaacatatcacaatgggacgataatagcttttttgcttatttgctctgttttaaaagctatttcctatctttgtaagtctctgttttactgccgtcgataaaaacacttgagttttacatatttttccccattttgatcaatgaattacacattaaacaaaaacaaaagaattgttaaacagaatccatgtagaaataaagtgacattatatacaaaagctatggggtcattaaactgcttaaaccaaaatacaaatatacataaagttcttttttaaaacaaacatttgtgcccattcaccatttttgctcaatttcattcattccctccacttttcctaacttattaattttatctataatttaatttttcttaattacaaaacattaaaataaatccatcatttgtgattttagttgaaattaaaaaacttacaaaaatatattactctttcattattattccaaacaatcaaatacacttcaagtcaaattttcgtgtaagcgaaaatatcgaaatttcatgaatttctttcatattcatttgatatcattatgaataaattgtaatactacctacagcaattattttagaaagaaaaatatatatgaatcccaaaaagtaaaataaaaactaattaagtgaaagagaaagtaaaacaaatgagagatagagtttctaatgcttatgagcagaggtgcaaggagatggaatgtaactatgatcagaaggtctaaacctaagctgacagctaaggttacactcaaacttaaccgatcctaatggtccgactcgccaccgagttcttgagccacctttgagctcgaaagtaataacatcttttttaaccgcatagtctacagcttgcatcattgttggattcaatggtattggatatgactgaaccaagtaaggaaggaacattgatttctctttaacaacttcaaactcaggcgcttttaaaatcgcaataggtttgccttcatagcttagcttgaactcagtttcatcaaacaacgcatgagccttagcgttatcattctctacgcgaatcacaatcgttaactgcgtttgcaaaactccaactatatcatacctgatcaatcaaaccgagaaaagaaaaagatatcgatcataaatgagagccaagattcatcatgatcaataaagggaagagttgcggaaaatataacaagtactttaagaagtcgaggtgagcatccgcgacactaatgatgggaactcgaggatgaatgaccaggtaaccaacgaagactataatgccaccaacgattacaacaatagagattatggcacaaatgatggctgcacaccagatgaaaggactggtaccatgacgagaagtcaatctgggcattattatggggtttaccagatcggattttagttcgggttcgatgagacagcattcaggctttgggaccaacgttcttggccttttggttggtttggggtaatgtttgagagaggataatggaatttgaaggatttggtacttaaccctacttggtggggaaagtcttggtatctttctttactttggggtaaaggcaaaatgggcttagcaagtaacatacataattggataaagttgtatacttgctaaattttaaggaatcttcttcttctgtacataatgtctaacgtaattcttaacttgtaagtcttactaacttcgctaatgtgtacatatgtaaatcaaataataaatatcagaacatatgatgcatatatatacttaatgatttgcgtttaccaaaaaggttcgtagtactttttgttttctctacatgaacaaacattctctcctgaggctaaagttcatcagattaaaaaaaggaacatgaacttgccaatatgatatgcctacacatctcgcgatgtggtaaccatacaactgtttttacccaaaaagctgaatttaaaactttaaagaagggctaagagtagaaatgtgtgtacgcgagtgaccaataaagccttggaagatagaaactcagcaggtcagaaatgtgtgtttctgcctcggcctctcccaccagagtagtaaccataacccgagtttgagtagtagttgttgttgttgttattatggtatccgcctctgtaattggtttgtgcagcgagatatgcaccctgacctggttgtagtggaggtggcctttgaaaattattaccaaatgcctgaataaaaagataaagagagcaaaaactccatcagcaaacactattgcgattggagaagaatagtttcagaacttgggttggtggctatagaatatgtgaaacaaacctcaggaacttgtctcatgtgttcgggaaactggttgtgctgttgtccgcttcttgccacacggtcaagttgattgcacgagattgtgtcaaaaaagtcatccttgttatatgcaggctgcaacaatcaaaaaacagatatcaaccgttgtttgaaatatcatataaatcattaaatatgtcatgttaagagcttgaactagatctcgctgagatttaatcaaacttagaaaatacatgtaccttcccttctgcgtttggctcaatcgcagtttcttccccataatcattttgattcctctggttatttcttccaagataaccccatagttcactcttcttgaacttctcattcattgcttcaaaatcaaattcttcagtgtactcaatgctagaactagggatccgagactgcaacacatttagaaccaaaggaaaaacaaatgagaaatagtgaaatgtgtgaaaaggatacaaaccaaagttgcaatgctttgaatttaacacttccaagacaaagagagaggctaaatgtatcactactagtgtcaatgacatcatggatttaagaaccaatgcaatcatgaatgctttttatgataatcatgagaaaatcatgcataagtgtgatatctacaagaaaacatcagaagaagaattacataggtagatacctgatgagctgaaactggaagaggcagcaatggtgcatgatttctgggagcaaaactttgtgatggcacattcgctgatgccgggttagttgcagcaaacatctcttgacccctatataccatctgctgcctagattgcagtgacggatccatatcgaaaaatgactcaggcgattttgacaatggaccaggaatcacaggagctgaattagaagccacagcaggtaactcatgaggtatagatcggtgaggatgattagactgagggtcatagacaactttaccaatagcctggggtgcactggggtaaattttctgaatatttggagcagaaagctgcgcttcagaaggtggagaaaggttagaggatactgaagcaaggccaggtggagtatggagttgtgtttgaccaagaggagaagggttggaagagtatgattgattggaagagacgtcaggtgaacgagtaacaacctgtgatgaatcatccactaaccccatgattggtgaagaaaaataatcaataatctgcggaccattgggtatggtcgaggaggatgaaactggcttctgcatcataccaagagggacaccactggaagcaaatttgttaccttgcacaaaagaaggaatgggcatcgaggaaccagcattactttgagttgaatcaattaagctcactggtgattctgtcaaacttccagcattagctgaaggaggctggaagcttaaagggactgatgaatgttgtgtgacaggaaccggtttactactcaaagcaggtgtattgatccattgtgatcctctccccaaaccataaccgctatcatagccagaaatcggagagctcatagtcatagctggcctagagtgaggggactgtaaaaagaaagggggaataacagattgaaaaatcatgaaaagtgataaatttagtaaacaattcttatttccatgttctaagtgaatgcctttacctgattgacgtcttgttcactttgaatctcttgtcttgattgagcagatggagatgggttaacttggagatcctaaaccaacaaacaagtatcaacataaatcattatatatagaccaactccaatacatcaaacatagaatgtctaataaggtaagagtctgaacactaaccttgatgtcacttccacgaaaaagaatgtaatcgtaaactttatcacatggcggaatttgcggcccatctttcttcctcccctccgttccacatgatcttactgcacaaccaatcaatagacaatcattgaacacaagaacgccacacttgaatagcaatacaagttaacatttgcttggtaacttcacctctcatgattcactaacatagaagtttccagattttgcttagagtcaccaaattttttaactcttcactaaatatcaacacaaatttggaaactacactacatagaaacgattgctcaagctctcttacatctccttgaatctaataccaaatccagaaaacataaacaaccacaagaacggaatcaaaatcaaatttccagttccaaacgcaaacaaagtgatgacaatatatatatactcgatgttttggttacgaatacacaacgcataaacacgtaatctctgcaatgttcggaaaactaaaataggaatttcgatatcgcataggtttcgaatccgtaccgttttttagacctagcgtcgagtcctgaacgttgagatggtagagaatgccttcgtaacggatctcgtacttagaaattagactgatgaaacttcctataaacgtatcgccgacgttgttacccggcgacggagaaggtacagatgacggaggttgagatgacgacggcgaggaagattgcgaactctcactcgccattttttgagattaatcagtggaaaaagtagaacgaatcagagcgcgaaatcgattagggttcttccttttatctctcttctgttgcaatttgatttttaaaaaatctctctctcggagaaccgtcgtggcttgagtttatctccgtcgtgatatataaaggcggggagatctgtgtgccgttggtccatctttgataatatttgggcttttattaggcccatgttcttcttcttttttagccaaaattaggcctatgctcttaaattcacatacagttctatagtgatcaagcccaaaccacataggcacatatatttctgagtcttttattttcttattttcgtatgtatgtgccatgcatgttaataattaaaaagtagtaatacctcttgaatcaactaaaacaaaattaacaacatataacattctctcgatcgagtcttgactcttgatgatattttcccctacactatttataatagagagtttactctttaaatatattttcgaacatgcaattgtatgaatttctatgatgaacctgtttatctaattgatttcgttatagaattctagttgatgtcttcttgtgaactctcgatttggatattttgtatcttcattcaattcttccttcgctaatcacaattaatttatccgactaatttttattaaaccgtggattacagctaaccaatcaaattaatattgtagtgtacagtcacttctgcactatgacactgttttctcttcgcaatcaatataaccataaaatttaataactcatcacctaataaggatactatccttaggaattagataatattcttccggttgtcaaaataaagatactattcttacctaataacgaaagtatgaggttgaatattggttgataagatactttaactaaagaaactataaggaagaaaaaaaacattttttaggagtcaaatacattgattttgctgggggatagagttctttgttcgagtcaaagaatacaaatatttatagatgacaacaaaaatctgttaagctaattacgaacccccaactgacattcaattagggttataatctaacagtttcactaaatcagtatgttacaaattctgattttgttttttggtttatttaagtaaaagggtaaaataaatatataattggtaaataaagatgattatgaaagcaaccaatggaggagactagaaatatgtattctcgaaagaaaaataaacaaaatgttaattagaattatagtagtcatctgacgatcatatccgtagcagtaacttcatgtaagatccaaaattcatacaccagtaattaatcaatataggcggaatgggcacataatttacgactaaatggtcaaagtcgtccgtagaaaagatggaatcgacttttaccaattcttacgttattttataaaataatttcaaaattggtttactcaaagatccaaatgtctttgatttgatattgatattttagtcaaaaaaaatttgtctttgatttgatattttttaacttttcacgatatgttttaattttctttttttgaatgtcaaaaggtatttaattctttacagttatcatatctttttattgtctcatgataatttgttacgtaagaatcaaactgttacatcagaaatcaaatgaatggtaaactattagacatgatatattaggcgacgtcatactgcatattataacctaagatcctgatcactaaaaaagaaatcaaatcgcgaacatatttttatgctactgcagttaaaattaaaacatttgattaagggtgtaactaagaacaataaagttatggaagtagtgggaaattatgcgatcatatcgtattttagcacctcactttacaactatttctcataaaatagcataaacaaaaagattagtaatattgttgtagtgtgacccaaaaaaaaaaggataacaggagtagttaatttactgattactgcaaatttcaacgtttgattttagttaaagtctagtaaacatatcgttctgttacttaaaacgatgactaatgctgaattgtttttatttttttttgttaaaagattaattctgaaattctctatgagcattccatcagtcattacattcgtaataaaggaatttacaatttgagaaaattacaaaaataaagatatagaggcatgaaccaagttacatacacatggaacatttatataactaattctcttttttctccgaaaatttaattctctacattttataaactaaaacttatatacacttggggggtcccacttgggatttttttcttctactttcttttcatttctattataaaaaagaattagattttcctcttaaataagaaaaaaaattcctcactttctaatttaagaaaggtaaatggtattctcgtaattcatctatggttttcgttccaaggcaataggcaatccattctgaggaagagcgaacggcccatactgaattccatcgctaggccctacgattgaccatctgcaaattaccaaaacaccccttatcagaaaacacttctcaaaataatgtcaattcccaaaaggactattatcattttgaaggtgtaccaacctgtacttagtggtgagatgatggattagaacagagatttcaagtttagctaactcattgcctggacaagaatgaatcccactaccaaaaggcatgaatgtattcggtttcggcgcaacttcgaatctcgacggatcgaatttccccggatccgaaaatatatcagcattgtgatgaatatttctgaatagtggcagtactttccatccctttggtatcaaatatcctgtaaagatagtaaaatacaattattaagactttagcttatttcatatgtaacatattgatctaacatatcgtttatttgtacataccttcgtattcgacatcttcgacagcttctctaaatgtgaaagataagattgtagcagctcttaatgtctcttggattactctataagttaatggcatcttctttgtatcttcccaagtgagactctctccttcttttttatctttccttattgccatttgctcttcctgtaatacccaacaaaaacccattaattcacggaactgccactcccttatgagattctcaaatgttcttttgaaaaaagtgtacttacagtgacagcttctagaacagttggattatcagctaagtacttgaggatccacgtcagaacactcgccgtcgtgtctcttgcggcgaagattactccgatgatgttatcggcgatttgttcgtcggttaatcctgctttgtcttccatgaatgatccgaggagatctgtgtgtgatgatgggttttgtcttcttttggataagatgttagcgaggatttgagctagctccttgcgagctttcatggctttgtggaataatgttcctggaagattaatcggcatcgaattgtaacctttctctagaatgtagtagcatcgttttagatcttctcggtaataaacttcgtctttgccgagtattgagattaacgcaacattgaaagtgtactgatgaaacaaaaaatgaacaaaatttagtcagaaacagttttttcaagtgtcagttataaaacagagtatagtgatagagaaaaacagaggatgctctgtttttaagacagagaaaataaacaggggacactctgtttttaagagagaggggttggggcttactgttttcatttcctggtaagtgttgagttgagttccatcccaagaattgagtgattcttgagcaattgattcaatgtgagggaccatgtttctgattgcatcaggcatgaaagctcttaaaacaagctttctaagtttggaatgataatctccttgatggaagaagatggcttgttttccaagcatcctctctttactggccggaaaagtcggtttaaacaaatgagactttgtaaccaatacgaatttcgctgcttcagggctcgagatcatcacacatggacatcccaatacatgagtcttgaacaccgatccgtatctgttttatcaaaacaagttatataaagaaaaaaagtcaacttttttgtttgtaagacaacaaagtttgaattttgaggattttcaagaagactctgtttttagaccttctctgttttgctgcaaagaacacattagggtcttgtgagtaaagttggaatgtttcgccgacgtaaggataacccattgttcccggaggaagagggagtttcgtggaggagctacggcggactccggcgataaatcggagtaaacagagaaacagagccgccgcggagagagtgagaaacaaaccggagaaatccattatcttcgtcttttaaacaatgggaattcgaagtatgttttgtgagttctctctctaatggattggtttttgtgttggagatgaaaaatcaagtgggagagatgaattggttttataggcagtggaggagagagaaggatgaggaaacaaattggagaagggagtttcctaaaaggaaccttttttggagccagctaatttgagagagagtgacgagagcacgtgtccaagagcatgcaaaaaaaaaaaaggagcgtgtgagattttgaccaaaaatttagccaccgttaattaaattatgcctctttaattaattatggattaagtcaaggaaaggggcaattttggcccttaagtatagacaaaggaaaggaggtaatgggcggtttttttttattagatgttttgccatgttaatggaacgctatacacttcatggaattatactattagttctttaaaaccaagtccaacactcttgtgtttatctctgtttaggattcaatagtgattaatgaatgatgatataagtgtatgtatgatttgggtccgagtatcttgaaaataagatttagagttgtatttttaacgaaatagttttctaaaaagtttttaaattattaaaaccccattgttaaaaaataaaaagattaataataagttttaagaatttacaaagattaaaattaatatttaaatgactatttgacattctttttctttttttgttgctaaaggaagacaatttgacatattcataattactatatagcattagatatatttgtcattttaacaaatgattacaattgtttgactgaaaaaatgtcttaagttaaaaggacttatgtttttcacttggttcatactaaattattctctggtataattctatgcgtaataagtcatttgaataacaaattttacttttgcactaaagaaaaactgaaactagtgattaaacggtaatgggaaaacccacgtgtggtcattgaaaacaaaagacagataatccaagttttcaggactaattacttatgatctagtagcttatgattatatatgtcagtaatagtaagcccacttgttatactaacttaattattcatagatactaatttctctcccacgttcgccctgcattacagccatatattattactttattagtagcttatacgaattaatcaaaacctatgtggttgaccccaacaaaaatcaaaacctatatatgtgcttagaacttaatcagattacatataaaaataaaacttgactttcatttttcttcttttgctaaacgtgactttcatttttcaaatcatagaagtaggtttaacttacaaaaattattgatgaaataagtattatagttttgataagagttttaatattcattgacttttgttttgtatctatataatacaaattgactttctgcctgtgaaataaaaacataaaatttcttgagggatctaggaccaaagacttgaatacttatttgtctacgtccttattaattttggaagttagagaagtctaactatcaccaaacatcttgtaaaattaatacattaagtagtacatattaattttaacaactatttcacctaaaatatatagaatcatgtgccccaccatagattacatattaagtttgaccccaaaaaatgattacatataatttacgaactatagtacgtaaagttaatgtggaacaatctgatatgcatggattgtgtaaatcttgaacttttttatagcttaattagaaaattctacttttatctagaatctaatagtgataatatttataatggatccagaagttaaagataacatattttcactttaacgaagcgcaaacgaacacaatacaactatacactttgacccaagaaaattaatgttgaggcagtcaaaatcggtcagagatcgacaaacttatgatcaacacatagtttagtgacatttgtcttatcaaggttgtggcctccatataaatctttttgaagataagaatatatatgtgacttttcatattcaagaaacatccacatctccccataatttaataaatacaaaaatcttaaatttgaaaagtattcagtgactatatagttggggaaattaatcatagaacgattccaaatttaatgtctttcaacaagaaacatatatacgcggttgaataaatatgtaagttgcatcgttacgcggcataagatctcgcctcttgctgctcattgtacgtagcagtgccgtggtacgacttcttcatcaaattaaattttgtattatagtatatagatacttaattatattatatgattgtcaaacggaatttatctatcaagaatggcgtgcaaatgtgcaatcatgctggtattattaattgtatcgtattaatatagagaatatattcaaagtgacaatttagttgatacattatacacttcataaaattaatataatttgtttacggtacattacaatacaagtacatgctttaagccaaatgttgtgatctagcagctttggaatgacactttaattatttgttttattttccatccagaatttatccggatataaatctatatgtattatgtatgttggatgtgcccaaaaaaaaaaaaagtattatgtatgttggatatacataaaaaattaaaaagtgaaaacatgattgatgacatttagtattctcttcattaattgtacgtaagtgttacaagtgtgttgtcgtaaaaaagtaagggaacccgcttatgtgtttgtttcacgacaaagcacaatttgcgttgcatttaaagtaatactttgtttgtgtttgagcaaaaacaattgtagcgcaaggtacacaaagaaagaaagaaagaaagaaagtaaacatgagcttttgatattccgttgcatttatattatttttttaaaactacacaattaaaaaaattattagaatatttgaatgcaactttttcattaggtttttggtatatatatacctatattattattacaattcaaccattcatacactcatgcatcaacttccaaacaagtataaacacttaaatatatattccaaattattgataaaaagtgttttatagctatagctattagcaacaccgtcgtggagtaagagcaggcttaatatttattagttatatataaactagaataatttctttatgttttctcaataaataatatttagaaagggaaaagttatattgaaatgcttacttccaaaaaatctatataaaaaaggataatcttacaattttacgtacatgggatagatatataaagtgttcaaccatactaaaataatagtagaaataattcttttttatatagtaaaaataaaaagttgaagtatatgttagatctatatgacaaattttcgaatagctatttgttaacgactcgaaatcgatctccctcatcattatgacctccctaagttcttttgcagctggaggttcattagtaactttttctttcagtttcaaatttaatttgaccaattttgctgtaaacaccacttgagaagtggacagtgtactatgtgtactgtatatttcacaatctatacacgagtgaaattttataatatatgaaaatattcacaaatagcaggaatgtcataagctcaatgctttttgtaccttagaccgacggtatcttttctgaacatgtgcaaacatgcctttatttgcgtgcgtgacagaagcttactttacttggatttacgttggctacttcccgatgaggaaatcttatgttcaaaaataaaataaaaaacatatttgcaatatactatattttgttaattcactttaatactataaatgtgccaaattttatctctttatttgtttgttctcgcaatggaaatcttctcttcccttcttgattcttgtccagcatctagcaatagttaattgttatataaatggcgtatatgcgtatatttatttactttttgggcaaaatatggcgtatgcacgtatacaaaatctaacgtagtaacaaattcatgtatatgtaatataaccaaatctcgataaatacaaatctattatctttacaaatgatgagtttcgtcatattcaaatgaaatattcacacatggaggccgcctgaaaattattgattttgtaaattgtaagtctctgaaccggcttacgtatagtcgtatatacatatatacatcatacattgttcatagataaatttcattttccacgtcatgttatttgtgtgtaaattacagttgaagacaattgtgaaataaagtagcaattagggaggctaacgcctaaccggctaaccgtagccggtgaacattttagagtcgtgcaatgaattgtaaacgtatccttatcttacacgtgtccacaactctcatttgacacgcctcttagggttttcgtattccaaacctattcttaaacatctccggacatattcaaatcgtttgaattgtgtatatatgtctggtttttacatatgtagtcatgtagctgtgtatatagaaaaaaggaatttccccacgatttgtgcttgtatatgttttccatgtgaaatttatatactcttcaaatttgttaagtgtgacgtcaacttaataataatgtttttcataaaataactttataagaaataggttaaaattgaagaaaagagagaagtatcttctttattacctcgaagcgtaaagatcataataatttttttaatgtgaaaactactttaagaatatagaatggttttaacttggatgcttcatacttgtttgaatttagctcaatgggttaactaaaccaaccttgtatagatgtgtttttcttatctatttgaatataatttcgatttatcatctcccatattagaggtatataatttcttaaattataatataagctaaaaaaaaaatgtgatatggcaatatatttgaatactattatatatcagataatatatttagttacatcattacaaacaaaaaatacgagcttaacatttgagagtggttagtttacttacttgcgacttttaagtactacaaatatcgttttggtaactctttttattttttttgggggtaagattttttttgttactctttatctctatctatgtcaccggtcaccgatggagttaaacaaaaaataatacaaacgaagggatataaattaatggtacaaacgaaatatcatcaaacgtataaatttttgtattgtcaaataattttttttttttatcaaaaataaacagtcaaatgtaataacaaaattaatcaaaataggtagagggtaaactatgggtgtaattgacataatttttgagtaattataataattagagcagtgaagataaatgaaatagtaaaaaaaagtaagaataacatgaaggttgagtaactgtttaaattttacacaacaaaacaaaactgaaacaaataactatatgcattgtgataaacagtaagcaatcgtaaaatagtaacaataatttttttaaattaacccaagtggtaatatattagctaaattcagagaaattagtatattaaattcatctataaggtgattctagtcaattagtcataccctagccctactacccagataactgtaaaaggtaattaataacgacataggtagagcaataagatgtatctttacaagcttggataatgatccgatttttatcatttccttaacgtgtggccgtggttttccactcagtcaacatcactcttgtgaatattttcgttttatgaaaagcttcactcattaaaaggaaaaagcaaagtaaagtttcattaaggaaaataaaaaatatcatgtaaataataatattatatgttacgacaacaagttgaggggaattagacaaatcttaaatactactaatttcctatgttggttccttttataaagacattcaaaagttattgtcttgtttgttttctgtatttgcccccacacggtatcaagttacagtaaattaaagtggaaaaataaaaatatgatgtgacaatgatgagttagattgtctgtaccaaacctgcaacttgtaactgtaataagaaattattaatattcttctttttgttcaccaacaaagattgctaatatttatcctaatgaatagtaaatcttattttaattaatcacatgagaagacacggtggaaatggattcggtagcctctctactagttgattttgcgagactctgagacaaaattgtgagcaacagaaaataatttgctttatcctgttctcgttatgggtttaagaaaaattatgaaccttagtatttggataacaaaagaagcaaatttggagattagagatgagaatgtgcctaaaactaattttatgagatgcatgttgaaaactagtgacacactttggctacactagagtaacattttgtgtagatttaatgccatctaaagcaatggcaatatggcatagcaataacctgatagttggatgtatcaagtcatttcaagtcattcatattttatatttgaagaaaatgggagataatcatcaagaggaatcttttcttttttttgttgataaagtaatcgagaggttgatcttttagctaaaacacaagaactcaatcttctcgatacatataatatcgggttctgtaatatcctactcaagtttgtttctctagattaagatggagacatactataacttattaaaatttctaaattacaatagtttttcatggctgtactatgagaatcaaattatcaagcagttagctagaagaaaagggaatctactttaaatggggtcacgtacaagaaggtaatgtatggagtacggacgtcgtggttcataattgaatattgattgcttcgggagcaaaaaaagaaagaaagaaaaaagaaacataaataactgaacccaatcatatcctatatttttctatgcattacattttacaatctatgcattttctccatgcatattatattccacaaaatattgaacacatattgaataccccagtcttgggcatggtattaaagtcaactcttggattgatttttttttccaataattattgacagaaaaagttttataaaataattgtaaataatagactttgattttcacggtaacaaaagtttaaattgaaaagttatccgtgaaatgctttttaatataaaaagtatgttaatgaatcgctgcttactacctacatagtaaacgaaaaaatttaaactattatagggaaaaactaaggtaagctgggaaacaattcaaaaaataacatttgcaacagttatttaaataaataaactttgccaaaattttgtaatttataatcaagatgcttaagctttacaatcacaaattaaatacttaagattcaaatataaaaggtgtatccataaacattttagtgtaaaattacatgtcaaaataaacatcctgtaaatacttttcatgtgatgtcagtcactttgttaaaaaaatcattttaagatattttcatagtaaaggtgtaaaaagtcaataaataaataaatatagagagataatgacgttcgacctaactaataaacaaaattcttgacaatatttgaaatatttatatataaaatctgacaaataacattaatacacaacatcgttcagaaaagaaaacattaataatatgcaatcaacaaaaatagccaagaagacaaaaacaaacaacagaaacaaccaaaaataatgtcattttttattatcaatatcaattgttcattaaattgaagtaaacgtatggatatggggaaataaataaataaagaacaacagaacaatgggcttgtcaaagcagttttgatcgaaaccagggactttcctcagtagtcgtggctcgtaagatgccagttgtcacaccaaaactattattatttgtttatttcaggaaaaaagtgtattatttaaatatagcgcatattaaaatccatatgctcatatgctatttttagtcaatgtctggttgttgtcgagtgtttttaatttacaaattgcattgggacgcatacttcagataaggtaaaggatgatactgtaaatagcctattatgttatgccattttaagaagatatttctatttatatctagatattctttttttgtttatttgtccaaaagacaaaaaataaaatctagatttttcaacgaatggtttataattgaggaaatttgtaagagcaccttaataatatagccactactatacgtacttcaattttcgatagcctcgtaaaaacattagaaaaaaagatatttataatgtgagtgctgacgcggcaaatcgggtataagtagatatccagcttagccaaatcatgtgattggatgatgattaatattaaaacatgattaagtttgtttagtttattgattgattgatgagcaatttgtttaaatgaatttccaaccactatcttatcctcttaaaataagtggttttcttcagcatgcccaattccccaccgctaattttgttgtttataatctaattgcattctattggattgacggatcttacttacatatataacataaacaagatttacattaaatagaatagtagatgtaaaacgatcttaatagtcgtatactgttcaaaaacattctctactctgttttatgtattttgcaaatttgagaaatctttgaatagatttcttttgatgattaatatatacttaatcttttccgtattaatcatgtaagaaattaaataaacaatttttttttgagttgaaacaattttttatgatctattaagaaataatttcaccactgtctatttgatgttcaaatacaaaaagtacttcagggttagtttatttttattttaaaataaccttcataccaaaaatgaacgttgagttttacagacactgacgatttcatataacttgttttcggacacattttttgaatctcacttggtctataatttgagcagaaatcttttcaaaaatttactaaaagattaatagttaaaacaaaaatagcgaaacattaagaagtatagtcatcataacatattggagctaagctatatttgatatcaatcaatctttttagattatatattctaaatttgtacgctatgtatattttaattacgatgaaaacgaaataaaaaataacgttgtgtcaccaaaattcttgaattattgtactaaaagtgactgttttccgaataaattgcacatacatatattgtgaaaataaagtttagtggtatgtcaacggattagtttatagaactccacattttgatatcttgatgatgtgattcatattttgactttataaagaaaatacaattaaacacaaagcaaaagtggaagacatctgattttctagggttaattatgataatgcaaaaaagtacgtcatacgtacaacgaaaggacgaatcaatacaaggaagccaactcattaattgattaaatttgcaatcactaattaattaaatgaaacactctaagtccaagattttaatcacaagaatattcctgctgtagtacctcttagctttctcgaaagccattattttgggtgatttttgttttctctacggttatttctttttacatgccaactttggaaaatccaat

SEQ ID NO: 837 - DNA, 85020 bp, Arabidopsis thaliana
gatctattcagaaagtctttacttttgatttttttttttgactaaacaagtccacgtgtcgaaatatttaatccacatttttagttttagaaagtctttggtttattccgaaaccatttcactaatttgttacttaatttttgtttcctcagttatttaatgttatttgattaattctaccaaaaatcaatagtccctttattcttagttaatccaattttttagattttttacacatagtaaaaaccaaagaagttgattataaatacatcattttttgtgattaacaattttttgtaactctaaaaccattagtattcattatcagtaactaataaaatgcataaaatatttaaaaaattatatcttcttgaaacttttttttacgtataaaagcttggattaattaggaacacatggagtattgtataccgaattttcattctaatcaatgaatgttatactattttgtacgttttgaatgtgattcacattcttgaacaatgattagatttttgctatacataaaaagcgtgtcaaaataaagaagaacaatcataaacaccatttatatgagttttttttttgattagttttttttgataaaaagcgtgtcaaaataaagaagatcaggtgatccagttacccctaataggaacgcaccgagatgctacatagtaaactactcttgtggctcaacgattcaatggatatgatctacgagcggactcaggttgaacggaccatgaaattcatgagatccgtgagatcctcaattgggccatcatattgcatgatccgagtttggagcgccttttaactaatgcagtggttagtcaagccgtctgcatttctaactatgtaaaccaattggaacaaaacccaactaacaaacttcctaaaaaaatgtgtttttgtttacaagaagatcgaattcggatcatggagtttcatcatccaccaaaactttccctcaactcaggtctggccatttatatatttttaataacaaaaacagagcatttcatatgccacaacaccaaagctcactcaaaatcaaagctcttttttccttcgtttattctttttttccttctggccaagtgtaagtagagaagttgcgatggaccaacgtaagttgattcaacccgttgtaaactcatcctaatctagctctaattgtatatatttgtatatagtatagagaataattaagtgatttgtctgtttaagataacaattaatcataatcatgacttctataagcttaagcaatgtaaaaaacagtatatacaaaaatcttaaaacaacacaccgaaaccagaatctgtcattataaagccaacgatagctttaaagtacacaataagatttgatactaattaagtttcaattattccaactcgaaccagcaatctaaccgacgaaagtcaacttatataatgtttagggcttatttgaaacattggtcagtccagacagattcacaaaaggtattaactagatcacttccacttcttgaacttgcctcctccaaacattccatgcttcccatgcttgaacttcccgtgcttcccatgcttgaacttaccatgaccatgaccatagccatagccatgaccatggccaaaaccgtgaccatatgcagcatgtccgtaaggaccgtgagagctatgagctacgtggtgagctccataggcagctgcagcacctgcaatcatacccccaattcctcctgcgtgtcctgaaacaagtataaataacagcatgaataaagaaaccaaagtgacatttaacaccaaatatgatactaaatctcagattttagcaatgaacatacagacaatcacaaaacaacatataaacaacttctcctattttaacttgtttgtacagtgaccattacaacacttaactggcaaactacatgggagaaaaaaaccattagcaaaagaaacacagtacctgagtgatgagcaggatagccagcaggagggtaaccaccatgaccaggtgcaggaggataacctccataaccaggagctggaggataaccaccataaccaggggcgggaggataaccaccaggagcaggtgggtaggcacccggaggataacctgcaggcgggtaagcaccgggtggtggagggtaaccttgttgtgggtatccagcgggtggataagccccagggggtgggtatccagcgggaggatacccatgaaaccctttgtctttgtcattatcattgtcacctcccatgttttctcaatcagtaacaaaacctacgaaaagataccacaagaaaacatcaatttaggtcacaattggacaaaccaagcatgaacttcaagctcaggggatcatgcaggaacaccaaactcaagtaatgagataaccaagcaatgtaattaatcactgattttggtcagagatcaaatgcagttaatcccaatcatattgcacaaaccaaacattaacttcaagctttcatcaaagaatcaagtacaccagagtcaagtaatgagataaatcaatcaaactgcacaaaccaagcctgagtttcaaactttcttcagggaatcgagcagacacaccagatgagaaatcagatgaaccagcaatgttatcactcattgattaggtcacagatcaatctccagtaaacccaatcaaattgcatacaccaagctttaaacatcaagcagacacaatataaatgagatcaatcaataacacatgacaggtaaatcaaagaactcgaatttaagatcctaagcataagaaagttctatactttatcactcacctcgagagagccaaacgaatgtgaacaattaaaacccaattcgctaaataaaaaacctcaattcatatttttgttttgttaaaatcgtaaatatacccatacacatggagcaaaacaaacaaaaaaatcaaaaatttctaggttttcagcagatcgaatcaagagagaagacaagcttaaagaacacagatcagaagagcgaatcgctgatcaaaaattaacgatctaaaagaaaaaaagatgagtttttttttaccttagacgaatcgcgaaatatgtcgaaacgaaattggaagagaaaaaaataagaccttataggtatttatacatgtttcttacgcggtacgatttccaaaaaagatatatttttatttttagtccttatattttactatgaatcacaggctacacttacgttgtcataattaacaatgctatccaaattttcagcacgaaggacgacacatgtaacactaccaatgttttgcttatagattgaatattttcatgaattgtttgttgtattttttcaaatttggaacggtttttaatttctcgtgggggtgtttatgaaatatattaaactgtgggggcaaaggagagaattatgagaatattttccaacgtaaatattttagcgttgcgagaacgcgcaatggacgcgtgattctgtttacgtaggagataagaatgtcttttaatttgcactttcgcaagagaatcgaatccaaaaaattcttattaacattaattgaattagtacatatttgattttaggcaatgtcacattgccaatgtgtattaatgaatttatttaataataatttcatttttctagttttgcttatgcttatctcactaaatactaaaattttctaaatccattcatactttatacttatctataaaatcaaacatttattaagattatcaattcatttttcattcaaacacatcagtggtgataattgatgtatagttattagaatatattgctataaacttcattttgaactaatcatcgatttgtcatcataatcagttctaaccaggacaaatttgtaatatggtttaaatgaacaaagaatggctataaaaattaatgagaaaaccaatatcgggagcaaattactagttaccaataggtttactgataaagttggaacgtaattactaggtgtaacactttttaaggacaatgttaatcacatacaatgatatatatgtatacgttacaaagctgactgattaaaacaagagctacatttgattcatttcaactccacagaacccaggcagaatcaggtcagagagagagagagagagaagaccttacagaaagtaggccttatgaaattggacaaaaggtcgagacttttgctcagcagaacctcagggtacgttccagttcctgctcatcatcgcagttgtagccaagttcaaaagctcgggctgcgatgaaaagaagacgcaaatagttcacttatgttggaaaataaaaataatatttggaaaaggaagtgtgtgagagatatgagaaagagatagatagatgtgtacctaatcggcttttatctgtgaatacttcagcttctagttcagcttcttcctcataacacccatctgcgtctggctcagtttgtacaagtaaagtatcagaacaaactcctgagatagtacacaccatgaggtcaccctctggactcagtattacttccttgcagttatcatcgcatactgttataaagaccataaaaactatgtaagtttagagtaaaacacagtaacaaagttacattttacagcatttcattacataccatgaacatttcccgtctctttgcatatgaacacgtcgtcaatctgatggtatgaacatttggttcccaaacaaatatggccagtgacagccttatcagtaagtcctttgcttttcttccatagagaaacttgttcaagtacagtattgtcaagaattatccggtcatccaccatctaaaaattgcaaacaagaacatgagaaaattcttcacgtgatgatttgtcctaaaacataaacagataattataaatagttacctgggacggaagaggtgcttggcttctctttgctgcttgcatatgtacgtaatactccttgaaatccgacggacaggttctgacaagttcaatcatgtcctgttcatcacgctaaaattcgacaagagaaaggaatcacttaaaaatatatatgatctgacttctactagcaacgcaaactaacactgtatattcttcagcaatgtaatactacttggaaacatctaacaagtttatacgaaaaaccaaggagaaactcacatcaatataaagcttcttccaagcagattcacgtaactttctacttggaagagttagaccccaccggatacagtacctgcatataaacaaaaaacaaccaataagatcatcacatcgtttttgaatacaaagtattgattttgaaaacaagattatcaacgacaataaggggtacaagaagaggcttacaggcgacgccataaggattcatcagccgcagcaaaattgagaaatttacaaaccaaggagcatgatacaagatcctgtaatgacattcaaacaatttagtttaaaagcaatcctcaaacatcaataaagttcgagtttgaactatatagtatatacctccgaagataagaacttgagaatatgacgaaacagctcagtaggaacattggtgaaaactccactctctattctctttgcatcagttttatctttgttaccattttccttttgatcttcatccttctctagagcctttgtttcgcctttctcaatacgttgccgttttgcctcaggttctttcgtttcttctttatcctctacctacaaaaaccaaagcatcaataaataatctaacctttcacaggacaacgctgaacaagagcaaaatcacaatggacatcaatcgaagaacatgaacaaaaattatgtgatttttcaaaaatttcaaatgtatgcatataagatcaaatttacagatcaaggaactgaagttatcaaaaatgaaaaaaaaaactaggggaacgggaaaatctcgacagaatttcagattcagctacaaaattcaaagattgatggagaagaaattactaaaccctaaatgaaatcgaaaatttgaataaacggagaaatttttataccgatgagacttctgattcgaggaatcgagcgaaacactcatcttcctcatcggaaacagacatacttttcagtcggtgaagatcaaagctccgacgacgatggttgcgtttatgcggccaaggaaaggattggagagagacaagactcgagagggttggcgtttggaatcggtggcgtgagattggagacgacctcgggccgaataattttgataaatgggctaataacctaaatgggccatatattaataaataagcccataacactaaccctcctccttgtcgttagcgtcattaatacaaattagctttctaaacgtgattaaataacaacatttttctgaattattattacgagttaacgacgttcgaactactactataattaaattttcttaaaacagaacatttgttattggatcagcaactactttttaaggagttttttcatttaaggaaatgttatattactagatccactaatcgacataaataaaggcatattttaccaacttcagtattacactgtaaaaattaggcctggaagttcggcataacccgtttaaaccgaaccgaacaaaccgacgatttcggttttcggtttcaaaccgattttctgttgtaaatcgttcggtagaattttaaattgatttcggttttcgggtttttcggttcggttcatcaaaaccgatcggttttgttcggattggggagataccttttaaaacagaaaaatcctagatctatcacttcatcttctttgttttctaaactctcctcttcacgaacacctttatttctcctcatctctaacccatttttatcttttaaccttctaattcttccttattcctccttcttctccttgtcttcgttcttcttctccaccttttaggttcgcagaaatattctattaagccaccgcgacatcgatcttctctggcaatgatttcatggttctctacatcttttctcaccaccgcacaatacaaatctattttctctgttttcaatgttcttcttcttcatctcacccttgtttttctttgacggccgtcatttccaaaaaataaaacaaaacaaaaccctagatgggtgtgatgggcttttcttgtccctggaaaaaaagaatttgggttttgaaaagttaaaaaccgtcatgggctttttgactttacttgtccctcaaaaaaaaagttttgggtttttaaatgtcaaaagccgatatgggctttaaaaacagcccactatgcctaatattgtgatctaaactgattaggttaaccgattaaaaaaaattcggtttaatttcggcgaattataaatcctagtaaccgaaccgaaaaaaccgagtaccgaaccgaaccgaaccgaatttttgttcggttcaattcggcagaatttttgaaaaccgaaaaacccggaaaaccgaacaaaccgaaccgtttaacccgagtaaaccgaatttttatattacaccattttttgtggaaaattttcatattttttaagtaggatatatgagcatatttaacaaatgtgttaatctgttaggcttcaatgtgtataagatttaagaaaataatctggcaaatttttttttgcctcaacttaacaaaaaatcatagttaacaaattgaagaagaccaacgactacaatgaccagagaagttttttttttttttggaacgaaaaaacagagaagttagaattacaatttacagagcaaatcaaaggatctcaatttctttagtcaacaggtgttccttctcttcttcctcgattcggaggtagagaagaaaaatggcagctccggcgatcctaaacggcggcgatgcgacggagagagaaacacgaatggctcactctgcaatgacattggttcaggtcataaatggaggataccatgtggttacgaaagtagctcttaacgttggtgtaaatcagctcgttttttgtgtctttcgcgatcttcttgctctctccattctcgcacctctcgcttttttccgtgaaaggtccctttttatcttcttctcaaaatctctctgtttctttatccttttgcttgaattgctaaagtctctgaagtctctgtttctgattgttttgatgagtttatatgcggcaaaatcagacaaatagtttgatctctctggaattggaattagggttgtttttctttgttaattctggttctattgtttaatgatggattgcaattttgtgtgacttggatttgtcttttgataaagatttgctcttttaatttcttgtagaacgatcagacctcctatgaatagaagcatcttcttttcactcttctttcttggtttagcagggtaaagtaatcagcttgtatctctttatcttttgaatcatgctaatgaaagattctaataacaacattcaatctcaatcttgataggatatttgggaaccagttactatttcttatgggtttatcttacacgaatccaacttatgctgctgctatacaaccatcaatccctgtctttacatttctcttggctgtcttgatggggtgagtatgagtttcctcaacattactgtaaaatgtgaaaatttgtaatataaagtttcaatcttttgatggtcttcttctttgtatacagtacagaaaaagtgaacttgttgaaagtcgagggccaaacgaaagttggaggtactcttgtttgtgtttcgggtgctatagcgatggctttgtttcgtggtccagccttgtttggaggtaaagatgcagcagattcagtgaaaagtgtaattattgatagaagtcaaccagagcttaatgggtggttagtctctagttttcttggtcttgggtttgatcaatggcacattggagttttatgtttgattggaaactgtatgtgtatggctgcttttctcgctgtccaagcaccggttttgaagaagtatcctgcctacctttcggttgctgcgtattcatacttcttcggtgcatcaataatgatcacaacagctatcttgtttgttagagagcctaaagattggagcttaacacaatctgaggttcttgctgttatattcgcagtaagttttcacaaccgagatgtaatatgtttatttgggtgtgtttgtgttttggagcttgagctcaaatcatttgaacttgaactcaaaaagattggaactcgattctgtacatacggattcatcttactagtttgtgtttaattgttttcttttcggtttttattcctcagggagtgtttgcctcagctctaaactatggactcttgacttggtccaataaaattcttggagctgctttggtttccctatacaatcctcttcagcctgcaacatcggcctttttatcgacaattttcctcggcagcccgatctatcttggaaggtttttaaattttatgcactcttctttgtatctttgattcatccagacacatacaaacctttctgtcttcttgtattggatcatataaacaccttggtttttgttctctccgcagcgttttgggtggaatcctcatcatttgcgggctttatatggttacttgggcatcttacagagagcaacaaacaacatcagctgggaatgagattgcttcttctagtgatgtaagaatctcggaacctttcatttacagagatgagactggtaaataaataagaaaaggtaaagaaaggatacttgtaccgttgtacgtagttaatatcagacaaaaacttgacaaatcatacaattttttcgagttcaaacattgattctttaaacggtaaataattcaaaataattacttcgcctcttttttggtaatgcaagttcaactatggaaacaaatctctatttttattttaagaattggttgtttcaatacgttttttagttgggtgacaaagaagcgtatattttaaattcaatcttagataaaaggaatcaagaacacttaaaaagtcattgtacctaaagacaagcacgattaacaaaaaggaaaacattatatatgtcaacggacatgttacatacttacatgtcagtgtgatataagctgggaagaagacaacaaaagttttagcaacatattatcttgaatttgtgaagatagtgtctattccataattccaacagagtggtatgtctttgcgacatacacacatagacgagctcatgagaatcaagaatcaatatatattatctatatctaacatattccacgcatttcgagtaaccaagatagatgttttagtagttattgccaaactatgtgtgtgcataaagtattaacaagtaggtactgacctagtaaaaaaatgaaaggtataacttataagtttcttacgagtacttagatcactcatgacatcattgtccaagtggaaaccattaatagcaaataaacaaaaatcattgacttattgaagtacgaaattattgactttctcccatttcatcatcaataatggtaacaatttctaatttgtgtggatagtatcttatacgtcatgacaactcttgggaatggtaatttaaccatagaagagattcaatttctttttctaagtttattagattcctttgtttgctaaatcaagattctttcaagttgaagattctttctaatagtatatacaagagggaagaatctttcaactatcactccctacaaattccatgagaaaattcacttttccaatcaaaacgtaaagaagaagaggaagaatggctacatgtcctcctttcgatttctcgaccaaatattacgatggtgacggcggatgccagaggcagagcagcttcttcggaggcacgacggtgctcgatcaaggcgttggctacgccgtgattcttggttttggtgctttctttgccgtcttcacatcttttttggttagtttccgtttctgaattacaaatactttcttatgaaaagcaagacgacttctatgatttgctcgtgaccacaaaaaatagtagtcatatggtttatgctaacaaataaaacaaaggatgctaattttcattgtttagtagacgttgattattcttttttgtttttttgttctaaaattttcattcttattaaaatagatattaatcaaattaattcatatatcaagtttcgatagaatcttttttggcctattaagtatgaaaattgtggcgaccgtgtgtaaattttataaatcatattataaataatatgtatattgtcctaataagtccaccatgataaataatatgtatattgtcctaaatgaatgaaggtatggttagaaaaacgatatgtgggagctcgtcatacatcggaatggttcaatacagcgggaagaaacgttaagacaggacttattgcaagtgtcattgtatcacaggtaaaactataattctaataattataattgatgatataaagttataaaacactccataatctttgacgtataatttaactgtagaattttacttaaagttattaatttgatttatgttggtcgatgggtgaatagtggacatgggctgcgaccatactgcaaagttcaaacgtagcatggcagtatggggttagtggaccgttttggtacgctagtggagccaccatacaggttaattccgaaacataaactatacaatataaatttttgtttctataacctgtatgcataattaatgaataatcgatgatgattgatgaacaaagtaggtgctgttgtttggtgtgatggcgattgagataaaaagaaaggctcctaatgctcacacggtctgcgaaatcgtgaaggctcggtacgtaaaaaccgaactaacctcaaaccaacaattattttcatttgcttagtcaagattattaaataaaattaaaatttataatactaattttatcagtatatcttaaatttatttattttgggttagttttcaaaaaatatattttgtggaccaaactaaacagaataagttttgttttgtttgagccctttaaccaaaaaaagaaagttttattttgtttttgttcttttgtataagggccaataaattttgattttttgataacatttccgaaacagtagaccaaattgctcgagcattaattttaggttagtattttactttgttttgtatgtttttgataaaattagttggggaaccgcaacacatatagtgtttttggtgttttgtttggcgacaaacgtcgttgtgacggcgatgctcttgctcggcggctctgctgtggtgaatgctctaaccggagtgaatctatacgccgcaagctttctcattcctctcggcgtcgttgtctatactttggctggaggacttaaagctactttcctcgcaagctacgttcactccgttataggtattgaattagtgacaaatgtgatattgctttgtcatataatctcatagtatgcatgtaaaagttttagagacgcaaaaaaaaattaaaaaaacataatactaaacttaaaaaatcaaagtatatgagttattggtttctatccatttatatatgtaaccccacaaaatcggagagacccttacaataaattgttgtttactatctttgtgttattcgtctatcttcagttcacgtggctctagtcgtctttgtgtttctggtctacacatcgagtaaagagcttggcagtccgtccgtggtctatgaccgactaaaagatatggtcgctaagtcaaggtcatgcactgagccactctcgcaccacggtcaagcttgtggtccggttgatggcaactttagaggctcctatctcaccatgttgagctctggcggcgctgtcttcggtctcatcaacattgtcggaaacttcggcactgtcttcgtagataatgtaagatgatttctctacagtgaagtattttagtttaattctcttttggttttcgttttagttttagtttttggcattttgccataggattttaatatgaaataccatttgatgagtttttggtttttgcatatattttttttaaaaagtggatggattattaatttagtcgtaaataaatcatgataaactctggatgggatggattccttaaacaaaaagttgaaatagttattttacggattatgtaccaatattcacagttaaatgttaaatgttttgtagggttattgggtgagtgcaatagctgctcggccttcgtcgacccacaaagggtatttgcttggtggactcgtgtggttcgctgtaccgttctctctagctacctcgttaggtctcggcgcactagcccttgacttgcctatatctaaggacgaggctgaccgaggtttggttccacctgccacagccattgctctcatgggtaaatcaggatccttgcttctactcactatgctatttatgtaagtacactctctctagatcatatatatataaataagttttggcataacaaagtttatgggtagatgttttggttctttttttgctttatttagttctttcaattgatttttaagaatcattttaacgcattactggtttagtttaacaaaatttgggtctgaaatttaatcagtaaccaactagtcaatttgattcgggttgattcaattatttcaattcaaattggttcgttcagttcaaatacgcatactacatataatgcatgaatcgtatgagttgtgatcataagccctctttctttacaagcaagaatttgtttataagctgtcttggttacttcttacacaagaaacctagttagcatacaaaatatacgcttattccaaatcatgatgtattacggtatttgttgatcattagggctgtaacatcggctggttcttccgagctaattgcagtctcatcgctctttacatatgacatctaccgaacatacataaaccctagagcaaccggtagacaaatcttgaaaatctcaagatgcgctgttcttggatttggttgtttcatggggattcttgcagtggtcttgaacaaagctggtgtttcacttggatggatgtatctcgcaatgggagtactcattggttctgcggtcattcccattgctttcatgctcttgtggagtaaagccaatgcctttggtgcaattcttggagcgacctcgggttgtgtttttgggatcattacttggctaactaccgcaaagacacagtacggacgcgttgatcttgatagcaccgggaaaaatggccctatgttagctggtaacctcgttgcgattctaacaggtcagattcctatagtttactcaataaattatggtttaaaccataaacaaagacctaatcttggtttgttttggtccgtccatgtaaataacatataggggggttgatccatgcggtgtgtagtctagtccggccacagaattacgattggtcgacgacgagggagatcaaagtagtggaagcgtatgcttcaggggacgaagatgttgatgttcctgccgaagagctaagagaagagaagctgagaagagccaaagcttggattgtgaaatggggtcttgtcttcactatcctcattgttgtcatttggccagttctctctctcccagctcgtaagtcttcccatacaaatgaaaataaagcttaaatactaacaaaacttagaatttatccgaaccatattttctatttttttttttttgaatagaaaaataaaatgataaaattaattaattaactcttaaacaacactagtttcgtcgttttctaaaagtaaaacagtctaaaataaaattttggttactaatatataatagcccttaattaatgatcatgaacatcaattaaaaatttgcaggcgtatttagcagaggatatttctggttttgggcaattgtggcaatagcttggggaactataggatccatcgtgatcattggtttgccattggtggaaagttgggacacgatcaagagtgtttgtatgggaatgttcacaaacgatagggtgatgaaaaagcttgacgacttgaaccataggcttcgagctttaaccatggctgtgccagaagctgagaagatatatttgcttgaacttgagaagaccaagaaaaatgatgaagaaggttgaagaaatatcatattgggtacacaaaaggttgatactctatttttgtttgtatgctttgtttggttgtcttttcttgttaatttgtgtgaaatcgcatcaaagctatctccgtttgtacaatgtgttcaacatctttgataagtgtatgtattatacaaacaacagacagtgaaagtttgaaaccatgattaatttagtaggtgtggttagttatggatttggctattttattcggtttggtttaattcgtttgattggttcaacagacagtgaaagtgtgaaacaattaacacgttttttcctccgtctaattaaggtgtagtaaaattgcgaacacttgttgaattcaattgatttagttttgtgcaatttgacatgattatatttgtaaatttgtacaataggcatttaaatggtttggtttggtttggggtgctttcgtcggattcaattcggcctggttcgcatgccaaataggccagggcccaataaaccgtaacttggattaggtagaccaattaagaataataacccgacccgtttcaattaagggtcggatcactcactcccgtgtttcttctttcttcttccaaaggtgtttgttttatcaaatccacatttccccaaatttctttcttcttcttcgcttcagccatgggaaccctatctctctcatcttctctcaaaccttcactcgtttcatcaagactcaattcatcttcctccgcatcttcttcttcgtttcctaaaccaaacaatctctacctcaaacccaccaaactcatttcaccacctctcagaacaacttcaccatcgccattgagattcgccaatgcttcaatcgagatgtcgcagacacaggaatcagctattcgcggagctgaatctgacgtcatgggtcttctccttagggaacgaatcgtctttctcggtagtagtatcgacgatttcgtcgctgatgctattatgagtcagttgcttctcttagatgctaaagatccaaagaaagatatcaaactctttatcaattctcctggtggttctctcaggttaaatttttatttcgtttctttgttttctcatctgggtttctgcgttaatggcgaaagtttcagtctttagtaacttaggtcagattttagggttttagtaagcattgaaacgtaattcagttgactgataaatttaagtataatatgcagattttagttgaaatgaagtgatttctctgctaaattgctgtgatagaactgtaagagctgaaactgttcactgaagtctctcttcagctattttgctaatgttactttgtggttgactattagtaatcttgttgactagtttgtatagtgtttgattggttttatattatacttcagacttaatgttgtgattgtttggtttagtgcaaccatggctatatacgatgtggttcagcttgtgagagctgatgtttcgacgattgctcttggcattgctgcatcaacagcttcgattattcttggtgcgggaactaaaggcaagcgctttgctatgcccaacacgaggataatgattcatcaacctcttggaggtgcaagcggtcaagctatagatgttgagattcaagctaaggaagttatgcataacaagaacaatgtcaccagcattatcgcgggatgtactagtcgatcgtttgagcaggttctgaaagatattgatagggaccggtacatgtctccaattgaagcagttgagtatggtttaattgatggagttattgatggagacagcattattcctcttgaacctgttcctgatagagtgaaaccgagagtaaactacgaggagattagcaaggatccgatgaaattcttgactcccgagatacctgatgatgagatctactaaagccaagctcgtctagaagcaggtgattgatcattttgactataactacgttctggttaatatttacccatggtttcttcatcgtttgctatttagtggtgaagattgaataatgtttgaatctttattgtcaagaagatgaatgaacataaacctagttagactgttgtgatttccattaaaggagaaatctgacatttctttatcttcagggatcttcaaatgtgactaagactagcagtttcgaggaaaagctcaatttcttctgcggttactggtattggctttgcgaaaccgaagctggtagtacttggcttttgtatctcatatttcagttgttcagaaaataattgttctttaaatcactctgttttgaggaaaatgacttaaagaagctgtagttatctcgtttatgacaatcccttcaagtgtttaatggattcaagaagtatcagtcagtatttttgtggtattcatatttaagaccatgaacttttacaaccataaacttttttatttgcaaaatatattatgtgaggtgttgatttcgagaaacaaaatgttagcaaacgaatagtatgttttaaggctgtaaaataccatgattatggcatacactttggtaaaaaacctcaaaactaacctacatatataaataatcgtatattaagctccactaaactatatatacgtcggtgatcatttagctaataactaataagtttttatttcttcttttatggattcaaagtttgtaaaatttattggatttgggcatttgacgtagtccttctcgacgtagtcaaaatgaaacatctttttaattgtaaggtttagcggagcttcatcgtgggccactatgtattccacgtcagcagttcaaaaacaagaagcttctacggtaagcttaacattaattccggtattatttttcaacttgaaaagattttttcctcattactacttaattactcattaatttggcattagttcattattttggtcccttgattcttcatttatttacaacttattcatcaaacaaaaactttctacatgttcattagaaatctacgtataattttgaacattacggacaattacgaaaatgggattttaatttaaggagttttatgtactttggggcttatttataattcttgtaaaatcaaagacccgatatgtaaatagtccaaaactgacgaaaacgttctagttttccatttccctctaaaaagctcccacctttacacatctttagggttcaatcattaaaatccctaattcaatttatcatcctttctctttcgtcttctcaatttctgaatcaaacccaattcccttctcgaaatctagtttctctacagtgcgaaaatcgaggttaattgtgttcgtcggaaacgatggcggtgagtttgacggagggagtggtaatgaagatgttgaacggagaagtgacgagcgagacagatatgatgccagtgctacaagtaacggaattgaagctgattcagagcaagcttcatcaaaatcaggaatctagcaatcgatataagtttttattatcagatgggactgacttggcagcaggaatgcttaatacttcattgaacagtttagtgaatcaaggaactattcaattgggttcggttataagactcactcactacatctgcaatctcatccagactcgaaggtaatattgcaatctcttaaccctagattcataattgtctaaagaaccaatcttttttatttttaaagtagttctgatgatgatgagttacaggattgttgttattatgcaattggaggttattgtggagaaatgtaatataattggaaatcctaaagaacctgggcatagctcgattaatccacaacgtggtggagttaacacacaaagcaatggtggttctgagcagcaacaagctagaaggagtgatgtgaatggtgggagatacggtgtatcggctaattcgcctcaacctcaagttgttcataacagttccgacgctggaagatactgtgtatcggctaattcacctcagcctcaagttgttcatagcagttccgacgctggaagatatggtgtatcggctaattcacctcagcgtcaagttgttcataacagtcccgacgctgggagatatggacagcctcaagttagtcaaagatatggtactggttctggttatccggaaacatcaccttccactagaccgtatgtgagctcaaatgcaggttatggaggctctaggcaggaccaacctcgggctcctactgcaacaactgcttattcccgtccggttcagtcagcttatcagccacaacaaccaccgatgtatgttaacaggggacctgtggctaggaacgaagctcctccgaggataaatccgattgctgctcttaatccttaccagggtcggtggaccatcaaggttagggtcacgagtaaggcagacctgaggcggtttaataatccgcgtggggaagggaagttgttcagttttgatcttcttgatgctgatggtggagaaatacgggtgacttgttttaatgatgcggttgatcaattctttgacaagattgtagttggtaatgtttatctgatttcaaggggaaatttgaagcctgctcagaagaactttaatcatcttccgaatgattatgaaatacatttggactctgcatcaacgatacagccttgtgaagatgatggtaccattccacgctatcatttccattttcgtaacataggtgatattgaaaacatggagaacaacagcaccactgatgtaattggtattgtttcgtccatcagtccgacagtagcaattatgcggaaaaacttaactgaggtacagaaaaggtctcttcagttgaaggatatgtcaggccgaagtgttgaggtaaccatgtggggtaatttctgcaacgcagaaggacagaaattgcaaaatctttgtgattctggggtattcccggttcttgctttgaaagcgggcaggatcggtgaattcaacgggaagcaagtgagcacaattggagcaagtcaattctttatagagccagatttccctgaagccagagaattaaggcaatggtatgagagagaaggaaggaatgctcattttacctccatatctagagagttttccggtgttggcagacaagaagttcgcaaggtaattgcacagatcaaggacgagaagctagggacctcagagaagccggactggatcacagtctgtgccaccatttcattcatgaaggttgaaaatttctgctatacggcttgtcctatcatgaatggagatcgtccatgcagcaaaaaggtcacaaataacggagatgggacatggcgttgtgagaagtgtgacaaatgcgtggatgaatgtgactacaggtatatattacagatccagttacaggaccatacagacctaacctgggcaactgcattccaagaagctggtgaagagataatgggaatgtctgcaaaagatttgtattatgtgaagtatgaaaatcaggatgaggagaaatttgaagatatcatccgcagtgtcgcttttactaagtacattttcaagctgaagattaaagaagaaacttacagcgatgagcagcgggttaaagcaacagttgtgaaagctgaaaagctgaattattcttcaaataccaggttcatgctagaggcaatagataaactcaagataggagatgcaaattctctccctataaaggcagagagttccaattacaggtctgatgcatttaattccggtgttggaacctcaggaactagagacaccgcatcagtcgatgcacgcagagaatttggattacctgcagcaaaccaagtgggtcaatatggaaatcagtacagtagtgatgcaaggtctcttggcggttttactagctgcaacgtgtgtcgcagcaacagccatgtttctgcaaactgcccaacccttatgagtgagccacaaggacaatacatgggtggcacaaatgcaggaggaggtatgccaaggcaacatgtaggcagctactgaaaaacttaagtgactatttcacctcatcattatcatcaacaatggtcagatgctgttttgaccgtcttaagtttttacttatctacaacattaggatgcttcagttccatttttcgtgggtcttttagtgtttctgttttctatttttttttttttttgtgtttttgttttctttgtataactctctttattactagatgaggttaagttttctgattgaagtaaagtcaataactttcttttgaattgtaagagaggttaaagagggaattattaaccttttatttagacccattttgaagggataaaacgacaccattgttatggtttacacaattcactgaattacaaaaaccttccctcacacacaaatatccaatccttacatagtaatttgtagtttctgaaatcaataagaacattctctcaataacagagtccagttgatttagcagactctccaatatttacattgtaataaacctgcttcactccctcccctataccacaatgtcccccagaaatgcctgagtcgccagggctctggttgtatccagaaaccatagcggttacaggaaccattttctcagctactgctttgagacggtaacgctcagctcttgacccaatcacctgtcccaagatcgaagctccaatggtcaaagccatggctgttttgggcatcagaacagatttcctaagcattgctataaaaggcacagcagcatggacagccaaaaaccatgcaggcgaaaacttctttgtgtgttctctccatacacctagaggcacatttgcagccattcccatgagagcgattgcaagcatcttttcaggtaaaggctgagggcgaagacttttgaccaaagcagtcttcgaaagtgcagctctagcagctactataggagctggacatctatatttcataccaggtggtagcgttaatgctttagaaataagaggcatgactttgcttgcagctctaaaagacttggcgataggacaattcccggtttttaaccattcgtctccaactgcctcatgtttcgaagagtccccagactacaataagcaagcaatcaagcaaaaagatatcagaaacagtaactccttgtaaaattctaaagttttacacaatctatcaaatcctacctgttggtttttggaaggtttaggtttcttctgttgtttcttccatttctctgagaaaggaccaaaaccaaaagggcctccaggaccaaaagctgataggcttattgtagctaccttaccagcaagtggattgaattgcagagcacgacgacccgcctcatcttcagaatcatcagcgaaaccagaaagcggcacaataccatctttcccatggaagagcttgaatgctgaatcaaatccaggaccatcttcaaaaataggacctttacctccttgcacctattatccaaggaaacataaacttcatcaccagagaatcaaatagcataaaaatttatagtttttttaaccgaaaaggtaagaaattcttaccggaattggaaaactcaaggaggagaaggacaaattggtaggcttgttgatgtttctcaggaaagggcatttctggattatgctttcggcagcaaagggacactcttgatccattttttagctgagcaaatgatcctgagagattgaaattgatgatcaaacgaataaatctcaaaacttgattcaagaataaacaaatccaagatgaaatcaaagaataaaaaatcgaaatcaacattcgaatcaaaccgaaaacaagctttgagcttcattttctgaaaattttaggattcggcaaaaaaaaaaaaccaaaaaaaaaaaattaccctaaacttaaacgtactatgaatcaaattccgccatgaaaccctaaactcgaatggaaaatagagatcccgcaacaatttcgtatgaaaaactcagcagaaaatctgcatcgcaagatctattttgttatagaatgaaaaaattgaatcatgtgaaacctagagaagagatctttttcgaatacatgccagttttatgaagaatcgatatgataaatcagaaaaaaacaaagagagaatcaatcacctgagaattttcgccggcaaatgaattgcagagtagcttagacttttgataaaacgtgtggtgaacacagacgtgctttgagtttctattgagagttaccggtttagtcggtaaacccgtgaaactcttttttataaaaccggtgatttccggtttagttgactctgtaatgtagcacgtggttgtgttcggtggagaaactgaaccacgaagactatttggtgttggataataatggatcgcatgccgtttatcgtcactaattatctgatccaacggttgagatttagtggggtagcttttgcggttgttgttgaagacttgtagtgataaaaatgttaagaatattatatgaaaattctagtttggaattttggattaagaatatatatagtctttttatatatttccctagtaataaaataggtgctctttggggaggggatacacagatgctcaagtcttgtaattcgaatcaaagcttgaagtaaagaagaactcataactttatgttaaattctttggcatattgagatgctttcttttcttctctctaaaagaaacttcctgcagaactctattcactactttgggcgttgtagcaataatctcaagcagcaaacacaaaattgtttttcctctcctggtatttgccttaatcccgtacagatgtcctgcgtcaaaaggtttatgtcagtaaaagattgtgtaaacataaattagagcagttttagactattttgactcgattctgtaaatgtcaacttgtgagtatagctctatttgatcacatacttgagcatacatttggtttcttttgcacatctcaaaggactaccaaaataagatagaaaatcatgaaatgcagacatattactttccctaagatcgaatctaacatgacagaggactccaagattttatagtagtttgtgaaccgatcattcagcaacagggggaaatttataccaattaaactctactagggatagacaccattaccagtattataaacctaaaccagttctatgtcaagttgacgccatctttctcctagccaaacatgcctttttcattattctgttcaaagcattgcattaccaaatttgaccagcaactagcaaatataaaagacagcaaagaagctgcaggaaactagcataaagcattcatgaaaaccgatggggtttgacatgacatataagaaacatggaaaatatgcctcaagagtctttcccctagctgttctcaaacgagacctctcagcaactagcaacctaattcataagtaacttataaaacatcagctaaagaatatgttatcagcatttcatcaacataatctttccatattaaatttataatgctccgtactaagcttaacaaaccaattaaagtatgcctttgggctttggcattattctgttcaaccatttcattccattctaaacttgagaaacatggaaaacacagtggctcagcacacttttaccaacgattaatcatagaaccattcatggatcaaaaagcaagccaccccaacatcaagaacatgagccaggactctataagtaggataactagagttacaacttagaagcttactctaactgttttcaaaagatctccttctcaattctagacagtaatttttttacctataatgttatgcgacctaattcataagtaacctataaaacatcagcataagaatacattgtcagcatttcatcaactcaatctctccagattaaaaatcaacatcttcagtgtaactcacactaatggagatatcaacaagcctaggaagcttatacagcaaagttgtagcaactacaatggaataaggctcttgtggcatgtttattaccttaataaagagtatctttttcaatcaaaagactctagtttatcaattacctctagttaattagctggagttttcgagctccgaaacccttttttaagctcagtaactctcttcatacaagctgctttcgacttcccaggtactgcagctgcaatcttctcccatctcatagctgcctccttaggaaaagcttttaaagcattgagcaatgcaatgtcttctccattactccaaatctccttagtaccttccgcatctccaccagctccagaattctcttcgttttcatcaaccaatctaggatctgaagctttcctattctttaaaaactgagcgtaatcatcactctcatagattttcttctcacctatctctttcgccttcttaatcacattctctgtcttgtatcttcctccgaacgctgaagccaccgtctcccatctcccaggtttaccagctggatgcttaatcaactgcttcttcaaaatctcgatctcttcagcagtccaatctttagtttcattcacagatccactctccttagactgcggaatcaccactttcctcgaaacttcagtcaccgcagaagcattttccggcggattatcgctcttcgtcgaacctttagatcgcttattcaccgatttcctcctggattcacgttcgttatccgtggatgactcatcgtgaatctgttctggctccaagatctgaccataaccgacgcgaatcttacctccggtgagcgagctaggagcgaaaggaccgacgaggaaagagagggaaagccataatagtagcgatttggcaggttcagattcgaagtagaagaaggagagagataatatgatgagggagattgagacggagattgaaatgaaaagcttgttagggattctagcttcttcttcttcctccgccgtgtgagaagaagaaggacgagattggaaaacgaatctaggcctgtcttcgtcgaaaaaatccattgttgctctgttgcactgtagaagaagctgaaacaataaataaaacttagaaaaaaaaatctcagaaataagtgtttttgggcttttgaaagtccatatacgaagatttttgggtattgtaaagcccatatatattaaaatttagcatatgacaaaattggttatacgaattttaattagttaattttagagtaagcaaacccttaattaattaaattttagtggaaagcgtgtacactcgagatcgcagatagagatagtaggactcagagaagattgtgccactaatcatgctcttgagcctttctgttcaacaacgaagcaattgcagagaaatcacacgtttgtgtacgacattttttttttttaacgtcgatttattggttagttttatattgcaactatattataaaatgaaaatattgttgacggaaaaatggaaattttaggagccagaaaaaagggaaggaaacaataattcactattacgaaaatatataaacttgtacgaaaagtcaaggaaaccatttatcacctgttacaacttggaatggaaagcggagaatatattaggcaaaggctagagaagttaaataaaggataaaagcttacggttcagattggagatgacggcatttatgaaatatcgacggtttatctgtggataattactgtaggttgagatgcaggagattcgagcttagcaccaacagacactaccataataaatagcttaataatatattcctttttagctgagatattataaagtagggtttaatttgttattatcacgagaaccacacaaatacgcggcaaagagagagaaagatagagagagagagagagagagagagagaaagcggtggagtcgtgataagggagaagctctggatacagtctcttcccgtcgtcggagacggagtttatgcctattggctcctgaggtaaaatcgagatcgcctttttttattttgtttctcgtgttttgactgatgcgcttttgattctctcttcgtttgtttgctttgagtatatttttattattggagtcgcgtttctgagaactttggatttgaacgtatacggattggtttttttattgaattttagggttacgcttttttgtgggtttttttttttttttatgttatcgtttcggtttgtgaatttcttcgttcattcagatctgagataaattgagtctatggttggttggtttttatggtaaaacttcagcagagttgaaattaggtactagaattttagatatgatgatagtttctcagagattatgaattgggatctttctgtacctctttgcagtttggtttcttagggttttgaccttcgccagtattggatttggatttcattgttaatatgcctttgtgtaagacatgttctagataacattatttgtacgataccttgaattgcctgttttcgttgcatttctaatgtctttatatactgcttttgtgctcattatcaggttagattaagcttcgtatttagtggattttcttcttttgagatatggaacaagattacatctgctcagggtgctaccagtatcgagttttttcattgcaagaagcactcgattggcggtttcttgtgcactcagatttccttatcggctctttcgtgaactgcacctagtggtcagaccttctgcgatctttacggaaggtgtgatgcaaatttctgattcaggtatgggtttctgaataaatctgttgacacttgcatcgtagctttcacaagatactttgaatagatgatattcctcagtgtaagaattgttattttggtttctgacatattttggtttctgtgtggtaaaggtagaatttattttcagtatctaaataagcaaatattggatttatcaattttctctaagcctttttagagtatgaacgcaatatgcaaatttagaaaaaaggaaaaaagtgctatcaagaataggaaaattcgaaaaggaatattagatgataagttttggaaaaacacgtcaaatactccatacttatagatggcttatatgactatagttcttctttgaaattggaacatgattgttcgtatggtatctttgttttctgcagggctgatgtttgcaagttatcctaccttcacacagtcctagagtgtcatctaaatctgttccctgcactcaaaaactagttggtccttcttccatatcctgttcttatgagagcttgttgaagaaggatgaatcagttttttttcaagttatgacttttcttagctgtgtcttttcctcgagtctctgaaccccttgagtgaaatgttgtgagcataagtttcgtccagctacccagaacattactttttgttagtgcgtcttccaattctcagtatgttttgtctttttctcttagcgtctttcttttgccttgttggtcaacccattgatgttcaaacttcaaagtaaataagggtcagtctacccagcgggagaatcattgatcttgctgccatacgaacaactggaagattaaagtgatagacatatttcagaagttctttacagagaaatacttaaggggatactttgcttcacctagaggcgatggagaggtaggtttgatttctctcatctttttctctattctttggcttccgagccgggtttatagtttgtgcttaattctcaatgccttatgcaattgtaggtatacattactcaaagaagttggtgacggaacatttgggaatgtttggcgagctgtcaataaacagacgaatgaagttgtaagtatttttcattgagagataaagacgtgtataatgatttgtgtatggtttctagggtactgaagttttctatgtacaggtggcaattaaaagaatgaagaagaagtatttctcttgggaagagtgtgtgaatctaagagaagtgaaggtactgtatctcattagctgaaaggttttgtttttttttttttttactgtatgttcgctgatttttttcttttctcattatagtcacttagcagaatgaatcatccaaacattgtgaagctgaaggaagtcatccgggaaaatgatatcctatactttgtgtttgagtacatggtatacttctttctactttttgcttaatcttattgccaacacttttttttctctaaatcttcttccctttcatactctgtcaggagtgcaatctttaccagcttatgaaggatcgccctaagcattttgcagaatctgatatccgaaattggtgcttccaggtcttccaaggcctttcttatatgcatcagcgtggatacttccaccgtgatcttaagccaggtaactaatagccttgagtttccaatcaacatcagcacatgtgcgatcgagatggactgttttgtatctctgtttcagggttgttcatcacagtcaatttcaattagtttgtcaataaaacatgtgtaattttttttctgacgcagaaaatctattggtctcgaaagatgtcattaagattgctgatcttggcctggcccgggagatcgactcgagtccaccttatacagaatatgtctctacacgctggtaagatttgctctcctgattgctctgtcgaaattacagaaaatcaatatatatatatatatataactcagtgatccatatattgatggtgattggcacatgtgttgatttgtgccatatcttttccttattcaccctaattctgttctgaactttccacaggtatagggcacctgaagtactgctacaatcatatgtatacacgtcaaaagttggttagtcttcccaatataccaataacagaagtttctttttaagatagtctagtgcggtgcttaacaatggttaattttaattgtgtttcagatatgtgggcgatgggtgctattatggcggagctgttgtctcttcgccctctctttcctggagctaggtatttgtcaatggttgattgaattagttctaattagacaatgtttcagatttagatgctaaaccataaggtcaatgtcaccttattaatccttgcagtgaagcggatgagatatacaaaatctgcagtgtcataggcagcccaaccgaagagacctggttggaggggctgaaccttgccagcgttatcaattaccaattccctcaggtatttttaattctatttttaacttaaagaggaaagaaagcgtcactgattttatagttaaggttactataaacgatctgtttctcatcttgcagtttcccggtgtacatttatcaagtgtgatgccatatgctagtgcggatgcggttaaccttattgagcgcctttgctcgtgggatccctgcaatagaccgactactgcagaggctctacagcatccgttcttccaaagttgctactatattcccccatctctccgtcccaagctgtctgaaccaagagggtctctcgagcagcagcaatccgtgaagcgtttaccagcggctccgacttataatgctaataagccgttgaacacctacgttactccaaagacgaatgctccttttagcaatggtgtcaacagttatgttactccaaagacaaatgctccatttagcaatggtgtcaacagttatgttactgcaaagacgaatgctccttttagcaatggtgtcaacaattatgttgctccaaagatgaatgctccttttgacaatggtgcgacccagcagaaggtggatacgactaataataataaccagaacacggcgtggaacaacaaacctgtgagaagttataacgttaaagattcaaagtatagaccaccgggaaggaagagtccacgtaagtaaaattcacatcttttgccttcacaaagatttttttttaatcatctaaatgaatgaattcaaactctgcagttgcagcatctatggaaaagaactgggtcttttcccgtggagcatcagagactgcaaataaactggcaaatgcaacaattggaggaagatggactcaaagtcaaaggcaacaacaaccggcgatgaaggcagggtgggtgggagaaagtggtgacatgttcctcagacctacacagccttccaatccctactctaggaaaatcgccggttaagctgaaagattctgttatggcgcatctaagttacgagccctcatcaacaccttcacccgtcgttgtgcttttgattatcatcatcacctatctgagagtccaagttatttgaagacaacttatgttgattttttctcttttgtgtttcgttcttttaaacctctcttgtttgttcggtagtacttcccgtcttcatgacgattatgtatggagtgtttctttttacagttcgcaataaaagctctcgacattgcatcaattttccgttgttctggaatcgaacattggtttcagattcccaagattcttcattttatgtctatctggtttgtctttcaggtgttgttgttattgttgtttggtttacttattctgtgatacttgtagataaagaagctatggaggaataagaaatgtattatgattaactgagaagtctacaatgtctacatctacaagtgcagagactcggagatggtacgagtaaaggacatctgataaaactgcagatttaagagaaggtacacaaggaactctcttattttttcagaccctgaattcaagaaacattgtgttgtactgaagaaactatatttggagattctggattattgattgattgatactacagagagacaagatcaaaccagtacaaaacaagaaacaaacaagcttgacgacacaatagaaaagggctcttcaatcttctaaagtctacagaggtttagttttactctcttctgaattggggttgtcgactgagtcggtttttccatctttagaaccgttctggttagcctttccatcgtcaaacaacatgggatcaagctcagccaacagtctagcagccagaggaagaccacgagacttgttcatcagctcatctatacatttcttgtcgttccttggagactctttctctctcttctggatcattgcttcatatatcttccaaacactgttagaatcagatagcggccaaagacgatggatctcatgtttctgaacaacaaggttcttcgccagattctcatctctggtcgtgtatatgaccctcccaccagaccctttagggaatccatctgaaagatactttccccatttttcaccctcgttgagtttcgcatcgagtttctcgtcccagttatcgatctcctggacatcatcaaacacaatcagatacttcttccacctcagattcaagtgaagtgcatagagcagagcagagatctccttctctttagccgtctctccatcaatttctccagcttcctgcctgtttgaaacttcttctactacttctctatggatggattcgaacattgactcttcaactccaagacccttcaagatcgtcttcaacacacatatcttcccatcaagtccctccttagattcattgctatgcatagatacccaaatcctcggggcataagcattcctcacatcataatcattgaagatctgctggcataatgctgtcttcccaacaccgtattctccgacaaccacaagactcttgaacagcttgtaagacttttgatccaacaagaagtgttgcaatgatttgatctcattctcgaaaccatagatatcatgacctggaagtccagaatcagtttccacacgatcctccacctgttttgtttcgtcaccagttgtccctagccattcgttgtatctatcagcgaaccgatttgtgaagtcaactctgcctacacttgttaatccgcgcgatgaatcttcttgagtcatttccaagcaaaagctggaacaaaaaaaagatttgcaggtgaaatcaaactaagttttggtttttcttcttttccccagaaaaagaaaatgaagcaacagaagaagaatacaggggagagaaaaaacaaaaggaagaaaaaaagggaaaaaaaaaacactactaatttttttatttttttttcgccaaattggagggaaaaaaaaggattttaatgttgttagccctttttgatgcaatcaatttttgaaaaaccatcacttcttctcactaccccttatcttgttattctttatttctttattaaattttacatataacaaattctaaaatcaaccaatcaaattcattatctctcatctccccataaccaccaaaatctactaaaatgcttaataaactcatttttcttcttcttcctacgatttgctccctaaaaacgtttttcactttctttctttttcttcttctgcatacactatttaagttcactattaaatctgcaaagacaaaaaatgggatcatatacacatatctcttctcccctccgtgttcttcttcacgcactattaaagatatttgtttacttcttcttatccatcatacttttaggcaaataggtaagatatgacgttggtgacgaatatacttggttgaattcgtagattaaatgctgtttttttgtagacaaatttggagatttcagatttggaacaactgaaacaaatgtgtacaactatgttaaacaaatacgaaaatttaaaacccaattaacaaactttaaaaatgcatacatggtggtaatgaaacaactcaacaagtttttaacaaaaaaaatcatatttttctaaattactgaaattcttatcacgaaagcccatattcatacactaacaaccttatacttccatagttactttgtatatttgaacaaaaaaattaatattttaaactacttgtatttttatatatagaaatataccgatacaaagtaatgttaaatttatgagacaatactattggttccaccagtaaaaattaatttaaagttgataacaactaaatttactaaattctcgatattgtacaactatgagtaaaaatgtgcaattgagcacaactgtacaactatgagcaaatttgtgatgttatttaattattatttttcaaaataacgaggccacatcagatatttgtagatattcttgatatttcatttttttatatttttatcaaaacacttagattcatattaaaaactttatttttcaaaacacttttttttaacaacattcttagattcatagttttgtggtaaattttttgataaaaatatttagattgataaaaaaattcggtgattttttggatattgcataattaggacaccatgtgattaaataaattgaatttcgtttttttggcccaatgacatagttgtacacgagtgtaccagttgtacctaaaaacttagattcatacatgacacaaactctaaaataatcaaatatgtttcaacaaagagctaaagaagcaatctcattatctacacaaactcacacagtctcattatctaaagcaaataggtaaagaaacatattccaccagctgagatggtattacagtcttggtttcaacttatggaaagctagccatattcacaattggagcttaggctgactctgagcacggtggtatgctggctggcctagcaacatgtggtttcatgatgaacatagtctcgagagcttcagatctgacacaagacttcaagacaggttacctcactttatcatctccaaagtcaatgtttgtgagccaagtgattggaacagcaatgggttgtgtggtatctccttgcgttttctggctattctataaagcatttgatgatttaggcctcccaaacactgaataccatactccatttgctaccgtatatcgaagcatggctaaactaggagtaccaagagaatgtctcgttctatgctacgtgttcttcggtgtggcgattctcgtaaacatagtaaaagatagtctccatagcaaatggggaaggttcattccactttccatggcaatggctataccgtttttcttgggactttactttgcaattgaaatgtgtgtgggaagtttgatactttttatctgggaaagagtagatgcagccaaggctgaagcttttgggacagcggtggcttcttgtttgatatgcagagatggcacttggtctaagccaagctcagtgctcgctgtagccgcagttaatcctcctgtttgcatgaagtttctctcttctcaaacaaattcaaaagtcgacaacattctgcaaggatccacttaaaactcaaataagtaaaagactttgatgtgtagtagaaaaaggaggattaagataaacaagaaagaaaagaaagaggaggatcgaaagaaacgagagaagagagaaggaggttgggtgttgaagagaaaagaaagaagagtatcgtgaacaagaaaacaaaaaattgaaaaagtaagggatttcaattttagatttggaaataaagatccgaaataaggtttggatcttaatccaaactaaggttgggtcgtaaatatgtcaaaaatccaaaatcattttgtcttttacaaattatctagattaaaataaacaaataaagtaagtattcttataacgggggctaaatagaaattctttggagctcagtggcccaacaagattataatccgaaaaaaaagaaacgaaaacccaaaaattgaaattgcaattgaatcgaagggagaagattgatccagccatggaagaatcagcgtcggaaaatgaaaagcgttactttgtttgtgagattcaatgtgtgtttcgggttttgatttcagtgtatttgattgcgggttgtttcttcatgcttctgtcgaatcgaagataaattagactgattcaacttttacaatgcaacatctttaggctatgtctgtgtgtagttgatttcaatggcggccaaaagctttcttctagcggcttcttctctcacagaattcttgagttttggtcagaatctccattggtttaggtacaatgagatacttcactcttcttaaagcaatttcacatacatgtcatgactcttgttggaatataaaaaggataaatgggataattttcatcacaaaaagcttacaaatgtcacatctttatgcagaaaagaagagttcattgttctgagcagaagaaagtagaaagaaatacaaaagcagaacgaatttagataccggggaatgttgttcttcctcactctcacttgcctatgatgagtttggctctggcatctcctttgttgatttggaactgatttgttagtccaaagtgagccattagaagccacacaaagtttataagctcaccgcctctgctgagttgctccacgtgagccgtagagtcgcaatgacaagctgcataacagagaagctccacccacactttactcagtatctcccatttatctttgttgtgtgtcttctccatccttgtaaggtctttggctagcctgctcgcatcaaacaacactgacttgcttcgatctcccttgacgtccactggttcaatttcactattgacatccagtatatactctgtggctaaattcacgcccacattatagattcgtttcctctcgaaaaacttgtcagtttccgccaatgtgtctctgaatctgatcttcccaattccagcaacctcggacatcagactgggttgcaagatcaggagatacatcatgtagtctgagatgattttgcttgcattgttcatcataaccctctgggatagtctctttcttatgttcttggtagcagaactcggttgcgatgtgccacatcaaaagactctgatcataatcgacctttgtgacataacgtaccagtttttcacgttctgcatcctctggtaggttgtcccttaaagcccattctcccctagccaaagatatccttttggcattttcaggactgtctccatactttgatttgtttttcagctcttcgaagatgaacttccacaattcttttgtcatgggctctccgtgtacaaataacgtcttctcgaccagatcaagcgcatccgggatgcctaagaactcaatgagaacattccacaaatatttgatgaaattagggatgtggaataggaacaatatatagagagggtaaatagtacaacgagcccaagggtggtttcttgataacgtattgactatgctgcggatccatctgtgcacattattgatcacctcgacaatacatccaaaaactttctggattatgagattgattattttgaacgggaaagctatgatgatccataaggagcggaactcatctccggcatcgtggatcctcttttgtcttttttttgtggcatatgctagaaagttgaatacgttgatgcttccacaccacctccggaagaagaatggcgtcgtgagcatgtgatgcacgtgtaccattgaacacttatcatcaccttccttgatgcacggtttctcaccttcttttgtacacttatgctcacctttattgtggcactcttgcatcttccaacgcagctttctgaattcaagtaaacagttgaaaaatctatctttccatgatagaggctcatccggatcgtccttcaagctactaagtgcagcacatgtccagtctgagaacagaaacaaaaggatggatatgaaatccaaaactaggccaactgcaaacagaatataggtaatcacgacatctgctccatgaaagtctctgcctttgttagatatcttatgaaagatgatgaatgcagccacaagggaacccgaagcaacaactcgtgagacagttcccaaaacagtatgaagaaccgcgttcttggtgaatagagcatcgtagagaaagccgagttcaatctcaatgattcttaaagcttcctctggatcttccaagttctgaaagatctctatgctctggtcacgctccctgaagctgaagataaggttgactacaaggcccttgaatgtgttgaagaatttgtaagcgtactgagcaatttcaagatgagtcaactcttttctttttgtctccgaggccagggatggatgctctaacttcttaggcctatgttccttgtcaggctcatcaatcagaatgatcttggtgggtaattttgcttctttcttggccttgtactcctccatgagcttcgcataatttggtcctggatctggtccttgaatcatagaatccctaaacttgtccaaacttgcactatacaaagccgttgtcctttccagatactttatagtcccagaaatgaacactaagagtattgttacccaaaggctattgggcagagactggagaaccacatagacaccagcaattgcctgaaagacaagcccaaaaacatttcggagccaaagagcgttatcttcaagcgcgaaagctgttatagtgtctggtccaccaagatgtaagagcaagaatggtgcccataaagccatgagctttttgtcctgtggagggtcatcaggtttgagatctttaccttggttcttagagatgagaccaacagcgaaattagcagaccaatctgctaagagataagaggaccaaatgacgataatcaagtgccttcttggtgttcgtttccttaatggagagaagcaaatgagaaaggcttgaagggtaagacttagaaagattgttcctctaatgttccatctgtcccacgcatctttgatatgttttggtatcacgtccaccatttttgctctcacttgaggaaaagagataaagcctctctctctgtctctcgctctttgttattcagatcatgagatgttcttttctttctcagatttacttgagaactttggggtttgggcaatgtttttgggaagccattgatgttgttgttgtttttcttttcttttacctgggagtgagaaagacgactcagcaacttgtcttttcttttctttgttttcggagcgacttatgttattttaaagagtgtcccggattagtctttcagtcgagtcattatttagtaaatcaagaaaacaaaatttccccctagctcgttttcttgtcactaaataaacaatttgattttgaggttcattatatattttagatgaatttggtgtttttggtactctttcattaatggtggattcaaagacattgagagagcttatatatattcttattcgatttcttctattggtttactgattttgaatgatcttttgaatcagaggaatcagtcaagctcacataaaatgaatgtatcagtgacagaagaaagacatgagtaatacaatgcagatgagtattcaagtatagatgattgctggcaatgatatgaaagcaacaaacagttcaagatgaaataataataaataaataaacacagtagaggaaaatgttggaaactaatgttttttttttttttggtttagtgtgggaaactaatgttgtttctactttcgttgcttattcgatgatgatcacttgcaataatgagtttggctctgggatctccttggttgatctggaattgatctgctagtctcatatggaccatcaatagccaaacaaacctgatgagttatcctcctttgcttagctgagctgcgtgttctatagtggctgggaactatgcagatttggttttaaatgttcatgacttactgttttttcattttccactaagaaaatgttggtagtagtggaaagtcttctttgaaaatgtaactagatgatccgacattagatatgaagacttcttagagtttggatattttgaaatattggaaagaaatactcaacgcaatggagaattggtttccattgcttgcgaccttcttcgtatttcaatcacaatagtagcttctgaattctctttaagtattggatcttcagttttgaacaagtataaaagccgtcttctaatatggtgccgcatttggataaaatgttttgaagcatatgaaaatggtaagtaaatagttttcataatttttactcttacaaaatcataaatcatgtattgattatgttacttttatgtgatatatatgtagaggcggacgaagaatttgctaaagattggacgttacctactttccaatcaatgttgacgatgaaatttgatattgttatagaaggatcttgagtttgagattcatgtttttagctttcaatttcagtttaatactttagtttaatgtttcggtttaaaacaccattgtgggatacgggctttgccttccatgcccaattcggcccaaacacaaatagaacaagtcaagaaagctcctaacaaggatgaacggcccatcagaacaacggcccatcagaatgactgctcggcccatcacagctcggcccatcacggcttggcccagcccgataaattcagaagggcaaaacggagaaatcgcaagagagactaagagaaccctagatcagctccttgcctataaataagaggagacactactaagaagaggggtccagaacctaagtcaccactcagagaatttaagagagaattgctgcctagctctttatctcttactttctggttttccgttctgtattttctggttttccgaccatcaatatctgttttccgacctgtactttcggttctccgttctgtacttacggttttccgttctgttaattactatctttccgttcgtcattaataaagaagttactccgttctccctaaaccccttaatcattattgttacgacctcgttacaaacaaccataaatttatacatgaactgtacttccaaaccaaataacacaaatacagtactttatttctgaacatacgtgatactttcacaaatactacttaagttaaatgaccgcgtccggtccgttaaaacgttgggctttgtaaagcagatatgagcttcgatttgtaacgtgcggttgttagcaggccggcccaattcggaccagaaaaaaagcgtcgtttaagtagaacagctcaagaaaaataaaaaaaagaaaaatttatatgcagcgaaacccacttaaaatgtggattgaaattgaaatcgaatcgaagggagagcgattgttccaaccctagaatcagtctgaaattgaagctctttaagtatcgatgaggtttgatttcagtggatttgattgtgtgtggtttcttcattcttcagtcgtatcgaggatcaattagagtgatttcaatttagtctatgcggcttcttctctcatatttaggctatgcggcttcttctctcacagtcatcgtgtgtgctattggtttcaatggcggccaaaagatttcttccctcgcagatttcttgagttttgatcagaattcacatttacttcattgtttaaggtacattgagatagttcacttgtctttcgcaggtttttggaattgtgtaatctggaatcagctagaatgatcttcaaggcaatctcatacatgtcatgactcttgttggaatataaaaaggataaatgggataattttcatcacaaaaagcttacaaatgtcacatctttatgcagaaaagaagagttcattgttttgagcagaagaaagtagaaagaaatacaaaagcagaacgaatttagattacggggaatgttgttcttcctcactctcacttgcctatgatgagtttggctctggcatctcctttgttgatctggaactgatctgttagtccgaagtgagccattagaagccacacgaagtttatgagctctccgcctctgctgagttgctccacgtgagccgtagagtcgcaatgacaggctgcataacagagaagttccacccacactttactcagtatctcccatttatctttgttgtgtgtcttctccatctctgcaaggtctttggctagcctgctcgcgtcaaacaatacagacttgcttcgatctcccttcactcccattggttcaatttcactttcgacgtccagaatatttagggtggctgtctccacgcttctatcgttctcgatatgcctcctctggaagaacttgtgagtttcagccaatgtgtctctgaatctgatcttcccaattccagcaacctcggacatcagaccgggttgcaagatcaggagatacatcatgtagtctgagatgattttgctgaactcgcggttactgtaatgcttgcgttgttcatcataaccctctgggatagtctctttctcatgttgttggtaacagagctcggttgcgatgtgccacatcaaaagactctgatcataatcgacctttgtgacatagcgtaccagtttttcacgttctgcatccaccggcaggttctctcttaaagtccattctccccgagccaaagatatcctcttggcattttcaggactgtctccatactttgatttgtttttcagctcttcgaagatgaacttccacaattctctcgtcatgggctctccatgtacaaatagtgtcttgtggaccatatcaagcgtatccgagatgtcaaagaactcactgaggatatcccacactgatttgatgaagtgagggatgcgggatatgaactcgaaatagatagggtaaagaaaacgacgagcccaaagatgctttcttgataacgcattgacttcgtggctgatccgtctgtgcacttcattgatcaacttgacaatcgatccaaaaattttctttatgacgaagttgagttttttgaatggaaaagttatgatcttccatgagtagcggcggaaactacctctggcgtcgtggatcctctctacatctgcttttgtggcgtacgctataaagttaaaaacgttgatgcttccactccacctccgaaggaagaaacgcgttgtgagaacgtcatgcttatctaccaatgaacacttatcagcagcttccttcttatcgtcaccttccttcttattgccaccttcattcttattgccaccttccttcttatcagcacctttcatgatacacggtttcaaaccttctttggtacacttatgcataccagtcttgtggcactcttgcggcgtccaacgcagctttctgaatttaagtaaccagttaaaacatctctcttgccatgattgaagctcatccggatcgtccttcaaactactgtatgcagcacatgtccagtctgagaacaggaacaaaaggatggatatgaaatccaaaactaggccaactgcaaacagcgtataagtaactacgacatcagctccatgaaaatctgtgcctttgttaggtttcttatgaaaaatgatgaatgcagccacaagggtaccagaagcaaagacccgtgagacagttccaataccggtatgaagaatcgcgatcttggtgaatagagcatcatagagaaagccgagctcaatctcaatgatcctcaaagcttcctctggatcatttaaattctcaaagatctctaggctctcgtcacgctccctgaagctgaagataaggttgactacaaggcccttgaatgtgttgaagaatttgtaagcatactgaacaatctcaagatcggtcaaatctttttttcttttcttcgaagctaatgctggatgctctaacttcttaggcctattttctttgtcaggctcatcaatcagaacgatcttggtgggaagtcttgcctctttcttggccttgtactcctccatgagcttggcgtagtttggtcctggatctggtgcttgaatcatagagtccctaaacttgtccaaacttgcactatacagagccgttgtcctctccagatactttatagtcccagaaacaaacactaagactataaccacccaaaggctattgggcagagacatgacaaccacatagacaccagcaattgcctgaaagacaagcccaaagacatgtcgtagccagagagcgttatcttcaagcgcgaaagctgtgatagtgtctggtccaccaagatgcaagagcaagaatggtgcccataaagccattacctttttgtcctgtggagggtcatcaggtttgagatctttaccttgattcttggagataagaccaacagcgaaattagcagaccaatctgctaagagataagaggaccaaacaagcacgatcaagagccttcttggtgtacgtttccttagaggagagaagcaaatgagaatggcttgaagggtaagacttagaatgactgctcctcttatgttccacctatcccaaacatctttgatatgttttggtatcacttccaccatttttgctctctctcagaggaaaaaagatagatctttttccttctctctttctctctcttggatttacttgagaaatttgagtttctttctttttttttctctctctctctcttctggttattgagatgtttttttttcctcagatttacttgaaaagtttggggtttgtggaatgtttttgggacgccattgatgttgttctttttcttttcttttctttttttaccagaagctctcactggagcgagaagaaagacgactctgcaactcaggtataattttttattttttgcaaaataatagtttttgtattttgcattttcgtcaattattattattcttgcaatttgtttattaaaaatttactgctggtatggacaccataaaaatattcttttatttcttttgttttagtcaatcaatgagtcattttcgacctagctttttctttttctttttttttgacgtgaagagacgacttagctattggtcttttttctattcatatttgatagtaataaatatatgtatgttgaataatagttagtagtattaaagttcaagtgtcattagttgagctcgcgtcgttttagtaaatataaaatgatccactaaactcagatttgaatggttagactattatgtttgggatggttatataataatattattaagtataactgtataaccatagttataacttatattattttaaagactgtcccgggttagtctttttctgaagttagtcattcattatttagtgactattgaggcattgacctaaagaaataatgaagattcaaaaatacttctatagctggcagaatttacttctttatacctctatatgtatatatacttgtctactaaataaataatttgaacttgaggttcatttaatgaatatctgtaaataaaattgagttttgaaatattatctcttcaaccaataacttgaattaggtccaactaataattttgttacatgaagagttcacatctcagtaattattagtctaaaattggagttattttattttaaacatacttaagaattatttactgtatttacttttttgtacagatggaaaaagtttttaccgttgccaacaattttatttcagagttcaggactaaatcgagattcttggttgcatcacttctgagattctgaagtttttctctggtcggatgatgttcactattgctgcttcataatggtggattcaaagaggttatattcttgttctagtgcttctaattggaatttgaagtccttgtttacagagagagttgtcttttttggttgtatagagagtatcagagaaatcaatcaagctcacataaatgaatttatcagggacagaagaaggacatgagttacaacaatgcagatgattcaagaacagattgttttgctggcaaacagttgaagactactctttgaaacaaaacaaaaaaaacacaatggaagcaaatgagggaaactaatcaattgctgctactttcgttgcttattggatgatgatcacttgcctataatcagtttggctctggcatctccttggttgatttggaattggtctcctagtccaaaatgagccatcaatagccaaacaaagcttatgagttctcctcctttgcttagctgagctgcgtgttctatagcgccacactttgtcgctgcatacgaaagcaactcaacccacacttggctcattattttccacatctctgagtcgtcctccttattctttcttaaacccttaagctctttcgccagcatggccccatcaaacaggacggatttgcttctatctcctttcacgtcaatgggctcagcttttgctggaactgccactgataaaattgccacgctggcttcctttgcatcaggggccttctttgcggatatccccatgatatgcctcctatcgaagaacctctgagcctcctcgcacgtgtctctgaatcttatctttccaatacccacaacagctgacatcagagtgggttgcatcattaggagatacatcatgtagtctgacaggattttactgaactcacgggcgctatgattcgctttagtgcctttttttgtctggtataagagctcagtggctatatgccatacaagaaggctctgatcgtaatccatttccatcacatagcgtagaagtttctcacgttttttttctgtttctgggtcaccttgtatgtcgcgcagtgtccagtcacctcttgctgaagataccctcatggcgctttcagagtcgtcagcgaaacgggatttggctttaacctctccgaatatgtgttcccacatatccagggtgagacgatcactagatgtgtagatcacctcatctagctgagctcggatgccaaagaactccataaaactttttatccagcgtccaggtagactaggaatgtaaaatatgcagaagaagctaaacctaatgtactcttcattcaacttcgggtatttcttgcataaacgacttactttaccgtcaatccacttgaaagtctgatgaattctctgttttgtgactctaaaacaggattcaatgacacttccaagttttgtgaatgcggggccaatgtaaagtatgttgataaccttgtcaaaggcgatgtgtatgaaacccttggtatggtggattcgcttcggttttaaacctaggcagtattcgatcaggttgtgtgcatgtacatactcagaccaccggcgatacatgaaactcgtgtcgagcactttatgacatggtattgtcttggcactcttgtcgggcacttcctgacctggtattttgctggtactcttgtcgagaacttcatgagacttctctgtcttcaactccctcaccctgagaatcctgttaagaatccttttaagaaatggtgttttcttagtactcgtgttgggcacttcatgagactgtgtattcttgtagcattcatcatactcctccaccttcaatttcctgaccccgagaatgttttcaagaatccagttaagaatgttgtcggaccaggtgggtggatcgtccacttcgtccttcatcttcctcaatctgacaaacgtccaatcagatgcacagaacatgataagagcgatgcaatccagagctattcctcctaacagcaatgcgtaagtaaggccaacatcaaatccactataatctttcttgctcttgtattgaaagatgcgtagagctgctgcaaggcatcccagggcaatgaacctgaagaggaatcctatccagttgtgcaagatctcggctttcgtgtatagagctgcgtagataaagttgagctcaacctctaagattcttaaagcttcttctgctttcagcgagtcaaagaatctcttgctctcagctcgttgttgaaatgtaaagatgagatcaaccacaagacctttgaagatattaaagtacttgtaggcgtactggagaatattgagtggagtgaacccgtcaggaggctttaccggagcatcgtctcttggatctttctcaggctcgccaaccttgataatctgtgtaggcatcttcatatctttcttggctgcgtattcctccatgagctttgcgtagtttggtccaggatcaggccgctgaatcatggaatctttgaacttgtcaagactcgccaggtacaaagctaatgtcctctcgacatacttgatcaccccggtcgcaaacaccagcaaaataggtttccaaagagcattgggtaacgactgcaaaagcacgtaaacggttgcaactgattgaaagaaaagacccaacaagtgcctgagccagagctcgttatcttcaagggcaagggcagtgattgtatctggaccaccgagatgcaagagcaagaaaggaacccagaaagcaaacaactcggcgctctttttcggttctccgggttctggatcatctccttgactatctgagatttgtccggcggcgaaattggcagaccaatcagcaagaaggtaagctgaccaaatgaaagagagtaaaacttttctggatgagcgttttctttgaggtgcaaagaaaatgagaaatgtttgaaggctgagactgaagattaaggtacttcgaatgctccattcgtcccaaatgtccttgataggctttgggattgcgttcaccatcttgaaactgatttgctgaaacagacaagaactgatggtttatgagatctaacacagatacatctaaagaggttgacttctttctttttctggttttactatgagtttttttgcttttgaggctttttgttgtgtgtgaaggtttgaattattctggttggacagccattggaggctacttggagaccttgaggttagtcaaacagttcttacaggtctctaagttttttcttttttttttggtttaattttcgaaaatttatctgattcgtgtctgttgctaatttttactctttacctcatttttaaaatgtgaagaacaagtattcaaagagcccactggttcttttgataacgaaatgatatgaagggaatatatgctatatttgttttgtaaaaattataatgctatgtttatcttgtcctctttttgcataaatttatttaaactaactattttgagtggttttatagaaacatattttatttttaatcccttttttatctaaatatttctcgtctttttccttaaaatcacatggttaaagaataacactgcaaaagtatagtagttagatatacgattacgaggttatctcaatgaccttagacattggaatgagtgacaacgggaaaagttttcacatctcaatatttgttacttctccaagaaaccacttttaagtttttctttaaaaaaatttctaattatatattcaaactttataatatttctaactttctcttttttacccggcaaccaaaaatggaattaaatatatcgaaccatttgttgaccatacttcttgcttcgttattttctaacgaaaatcacgttttctagtggaacttacttggtactttcccttacttggtagcaattcaattattatcacatgacgtggccagtaacgttaaattcgaatggatatacagagtatttatggctatggtctaagagtcatttattttctccaattatagataattttaaaaaattccaaaattaaatttccccaccaaccatattaattttacttacgaaaatatttattttctcacgtctttgtctctcatgtgatgacaaaatttccagaaagcgagttgggatattcaactttatattctaatattacctattaaatataataataatcacagctggatataaactaaaaaatatgttacacttgggttggatgtattaaccatggtagagtcgggcattttaataatcgaagctttaaaagtatagtaacgacgacttttgtatgtcaatataacgatgactttagagatgtaggtcttttaattatattttcctaacgaaattgttgtgtatatattaacgtgggaacgatgtatcttgtcgttaatatttatttatatttattagtaaacttttatgcaaaacaagttgtgattatacaataatcaaacacgtctgtttaaaaatgaaaaaaacgtcaatttgattttagataattgttttttttttctttcttaaatgataaaaactcttttgttcttcaaaggttttacatcacatcaatttaaaaaaaaaggcacttttcttaatatcatttttaaagtttttgttctaaaaatactatattttagttttttttttcaagaatatcacaaattcatattaagaagactcttttgaatggtggaaatattgtaatttattttggtcaaacaaacatttttatacaaaaattagtggtattattgggaaaataaactagtgataatatttttggaacaaaaaattagtaatgtgatattttcgcatttttctaaaaacatttttttaaaacaatattgattataatttttcttgccggctatcggtttttgtctatttatcagctttttgaaaagattataattatttatactataatataacctgacgtaatttatgaatttggcccaatgtcttttgttaccgattcaatctgtctctaaataactaattttctatgtccaatctactaaaatcaacttaattgttgtagttcaaaagtgttccttacttaattctcatacctctctctctctctctctcctttgcctaaccatttcttcatcatcttctttctgcagatttctccgtttttccttgaatatgccttcaaaaaatctacaacaggcagtcctcacaaacgaattcacaaccaacttcattacgacctgtaaggactggctcgacgtaaatggtcttgctaaaggaaacttggagaagaagagagatgataatgaagaagaagagcgtctgaaaaccgagtctaaacttccgggccatgacatccacggtttcgataacgagatcaagtcattgcaacacttcttgttggatcagaaggttaggagggagttcaagagtcttgtgattgtcggagaatatggtgttgggaagacagcattatgccagaagatcttcaatgatgaagctgtgaagagtgtttatgctcccagggtttgggtgtctatggaaaacaaagaatctaaggagggacttgatgggaagatatgtgtgttgaagaagatcttgaagggtcttggagttgaagagttaatcctcgaaactatcagtactgatgccaaacaagaatttaaggacaatgaggaagttgcaagcaatcaggaagctggagaaattgatagagagacggagaaagagaaggagctctctgctctgctctatgcacttcacttgaatctgaggtggaagaaatatctgattgtgtttgatgatgttcgggaaaacgataactgggacgaaaagcttgatgcgaaactcaaggaggatgagaaatggggaaagtatctttcagatggattccctaaagggtctggtgggagagtcatatacacgaccagagatgagaatctggcgaagaaccttgttgctcagaaacatgagatccatcgtctttggccgctgtctgatcatcagagtgtctggaagatatatgatgcagtggttaaagataaacagaaagagtcaccaaggaacgacaagaaatgtatagatgagctgatgaataagtctcgtggtcttcctctggctgccagactgttggctgagcgtgatcccgtctttgttgacgatgaagttggccctgttggttctacccatggacaaaccgactcatcgaaccgccaacctgcaaaccaggccagctcctgagaagtggataacttgactcagcctcttggctcaagattgcttattatcaaccttgcttatgcttcttttatttcttgtatgtgtttcttgtttgatgttgtctgtttgttacactgttgttatcaaataaaccagaatctctgagtaatgtatcttgacctttcaattagcagagagactattaagagagcttctttccttagtactcttgcatttgcagtttatcagagtttcttgctcttagcctctcttcacttgtagaccttctcagtaaattataatatattttcttcttccttcgtagcttctgtaaaacacaagtatcacataataagcaaagcaaatttccattattcaactgttcacaaacaacaacacttgcacgcaaaaccagaaagacatcaatgggaaatgaggaagcaaacacacaacaacaacaacaacaaaagaaaaagacaacgaggaagaaaacttgataaaccgagaaactctcagttctgagatgctttagacttcatcttcttcaggcttgcgccagattccaattccatcgcaggggcagagactaacttgagggcactgatacttctccaagaacttgagttccggaaagtaccttttgctcaaatccctccactccacttttagttttggaagaaacttcagacgtaaaacggtaactttgcatttcgaattctggctaggtagtgactttccaaatccagtaagtttgattcctcctttaatgtagagtttttccacattaagtagattatcaggctcaagccattcaggaagatgttcaccaggaaaacattgcaggtccagtttcttcaatgtctttggaagctctggcgctgtgggatctttctccttacggaacatggttgcagccctttccaagatcccaatattctcctttggcttaacattttcgtcccccttttcgctatctacgcctttgccctgaggatgtgtatttatacctccccacgcaaccttcaacttttccagttttttgaaactctttacagccacgaacacatcatctatgctgaaattttctttgtttattgaaatacttagctttctcagcttcttcaagtgcaccaactcagccagtgtgcagaccgtctcttcatctgtagcatcactgacaacaaagcccttgagaacctctaagttatcaagccatgacaacctcttgggcatgcgatctatcatgtagcaatctgtaatgtccaagtagataagcgccttgagtgaatctatcttgtctggaagtttctccagattatagcaagctctgaggtccaagatgatcaggtcacgaagcttgcagacagcatcgtcaagtcgttcaattcttgagatcccttgaaaactcagaagcttgagtttaatcatacgcttcaaatttttcataagctcaggattctccacctcgatgtggcgcttggcagttctctcccatcttcccagatagaacaccttgagcttttgatacgtaacttttgacagagtcaacttatttcgcgttggtttatcctccgagaaccacttgaatgtgaaatccggaaacctctccgaaacattgaacacagtttcaatatgatctacatcttccatttttttagcttttgcttcttgctggcttgacgacccttccacaaggcataccttgtgcattcctgatttcttcatgactggcttgtcctttatatcatacatatcaaaaagccctatctccttggagataagaaccactgaagcatgcacaaagggggccatcttatagctacttggctcgactttgcgtttgatttcaacaggttcaatcaagtttctatccgtgaaatccttaagaatgaccttcacaacatcttcgggtttgagaatgacctcttcagtgccctcttgtgatgatatgtctttagtactcagaatgccctcccccatccaccaatacatcagcatcgttctattcacctcttgattttcagggaagacagcgaaggtcagcaggcagatcttccgttgatcactaagttcctcgaattcgcgtagcacatatctgaaaaccgcgcgacttctaagatctgctttatttgcatggatcccgggcaggcaaacaattcctttgccgttattattatccccgtcgccatcgtcatcatccaatcctttggcttttttacgcttgttgggcaacaaggggacttgacacatcaagttaaagatcttcttgttgatatcgtccaagtctttcttcatacctaaggtcaaggggggtttcgtagggtttttcttctgctcttttgccacattttcaagcagcaattcaagtggacgaatatgtttccacacctcctctgcgacttcactgcggagatattgcagcttagccacgtcctccttaagcaaacgaagatttcgttgcagcttaggaatatgatgatcatctgggccttctggcttagcattaggaataggggcactttctgctcttcccagattcgtctgtggttggtcagcagttatcagtccatcaacctcagcatcataggttctagccctggttatagcgcctggaagatccacttccttctccaatttgttcactattgtgaggaaatcgtggattatatgctgtggatcatttggatcctcggtcgtcgtaggcggcttccgcttccctgctgcctgcaaccctgctggctgtgctgcctgcaaccctgctggctgtgctgcctgcaaccctgctgcctgcaaccctgctggctgtgctgcctgcaacccttctggctgcgtcccggaatccatgacacctcaaaacccttttcgtctaagaacacaatctgcaaaaccttgaaagcaattggcacaaattgccccaagaaacaaccaaaatgtttatcagcataatgggacaattcataacccaaacacatctgaaatgcaaactcgagatgctactctctcttagacacacaagtcaaacgatgataacagaatcgaataagcaaaatcaacaaatcaagcaaataaacacctttagatatttgcagagctaggtcaaacagtgatgtctccaaaagaaaattctacatatcaaagtgtctccaaaagagtaatcaacctaaagataatctatacgaaaggttcgatctttacgtagagagattcagtagtaatcaacaaaaggaaaaatggaacatttcttcagagaagaagcgattctaacctgtttctccggagaagaagaagcaactctgctctctctgggtcttccctttgcaacttcagtcaattgccaaaataggcaaattatgaatgagaccagtctttaaaaataaccacagttttataactttttgtgtattttttttacaatcctttctttttttacattccagatttaagcgcagtctaattcgttaatgtatttttccaccaattgactacatgagaatttttcaatcaaactcatttctcttagtaatatttttttaagaaataactttccaccttttacggtaccgtagttatgaaaaaagaaactggctaaacaattcatttcttttgtttctttgttataagtatgtaatatgctagttaaaaatccatggttttgctcaagaaaaaaaaaaaaaactccatggtaaatactagctacataatttaaattcgaattgtgacataataaagatattggaatagcttcgtgacacaaaaatggtacaaccttactaagtcgaataagtattaaatgatagtgatatatataaaagcggtaaaaatagtggtaaaacagagtacaaatataagaataatacttttggtaattcttttgatattgcttatgtaattaaattttttatatttaaacagtaagtctcatatcaatgtagtacagacctattaaagaaaccaacaaaagtcactagattataaaatttagtcgctaatttaaacaaagggttatactattgtaaataagagcgttttcaaatctaaataagagcttattgcaattagaaagggtacaccgattgtaatttaaacaatttgattagtaatatcacaacaaactactcaatccatatcatatagtagttgttcttaggtggcacaaaacaaaaaaaaattgaatcactttaattcgtgtattgactattaatctttgaatgtggtgcgaaagttactactcatctgaccaaaataccaaaaacgttctagcctttttattggctatttatcctctaaagacttaacttatttggagatgtgtagagttagtgagtagcgtataatattacatcgagctgattgagtgattttcaattattgataaacctgaagtcataatgctgttcgtagtttaacctaatagttgacctagctaagtttcacgctttgcaaagcttacacttgaataacaccattttgagtcagtatttacaagaaaatagcaacatcttgggataaatggatgacactacgtttttccaaactaacaaaaatgactctaactttataatttgaaaattttgaaaatctatatatacatgtaattatgcagtaaattgtataatacgtacttgactataagaaattgacaatgatgctacaaattattataacggttttcatcactataagatgtttaactacattttatgttcttaaatttatagtgattattaatgtttatgctagctaaatatatgtttataaatggacatatatattgcattcttaaatttcttagatatgatggtgatatttgtttttgtcatccgattttaattagagctcaaacgagccaaaattgaagaaagttgtttgcaatttaatagtgatattgttaacgacgtatttaaaacttttatttgcaatttaattgataattaaaaatagtatatctaaaatattcttaattgtataaaatgatatgtaattgaaatgacaaattgcaaagaaagtttgactctcacaagacaaggatgctaaatgaaatgaaatgtaagcataattgtttgaaattttctaatctggtttttatgacagttaatcaaattaaattttattgaatagtgcatgttgggagataattattgaatgaaaaaaagaatgacttttcatctcagggaagactttggtgagttgcaataaataaagaccaataagagggaaataagtaaatgccagcaagattcttacattttaaatagagaaaaaatgtaattaatgtcaatggccaaaaaaaaaacgatcatgtcttccatttcgcacgtgatgtatgagttaaattatttataattatagtcttaactatggttaagagaactataaaatgattttctacatagcattgactatagacaagttgtatcgtggagaagataatgagttttaacagttcatcataaacgtttaattgtcaactaataaaggtccgtatggactatggaccatatatgattgaactaaaaacaaataattttgataggtcatatcaagattcaagaaagtggtttaagtcgactgtttaaacgcctagtatgattgccaataataaaaagtcttcgttcattttaatattttctataagctagttagctgtatgattgacatcgatttagataattaatgcatgcgtgtagggtgatctatacttgcatagggtagacaattgcacgtagtttatcgtgggtcatcaacaacataattatcgtataatcatgtaattaggaagacttttgagtgcaatcatacgaaacggcagttgtcttcttaaatttctcctgaagaatattattaaaatactaagtgtttaaagaagtaactcattctaattatcaaaatataagactgtaggggcaactcttattcattaatctttataaaaatacacaaaattaagtgacagcaatattatcaagtcttacatctaacacagtaacacatacaccttatatataatcttgacagttggcataaatattatagtctttaatcaaccatatacgaattgttcgataactaaaagtaatttgttttatgtctagtttttaatttgcgcgacttttcattgtaattttgtagtaataatgaaagaccaaggggaaatatataaaataacgaccagttcatttaaatttttaagtcgttaaagacctgaagctcattagagtactgactcggattgggaatagtcagcagttttgtcttaaccccatttaaatagtaatgtcgtgtagtggtattaattgaacttaatcccacgtattttaaatcatttaataataagtataagctaattagctctacatttgacatccatttagataactaatgagtgtttgataatctacagtaacacatgcacgtagtacatagtgggtcatcgacagctagtattttaatttttatcttataatctgttaattagaaattagaaagacttttaagtgaactcagaaaatggcagttgtcttaaattttattttaaagaagactataataaacgagtattttgaattagctagtactcttcctagttttcttgctttgataatatttggatactctttctagttattgacttaatttattgataagctatttagtgccacaaatgacaatttacttttaatcctgtaattatttagtttttatataactcgagtgatcttaaaaaaattctaggtcgaaagacaaattctggtaatcgggaaaaccatgttagaattcgaaatcccggtgattaacactactcgaactcaagtagtagaagctcttttcttctttatcactagacaaagacgacttggttatgcaattatccatttataatactggtcacttgatagcgaattacttataatttttttttaaatacatagtatatattaagtgacgaaaacaaatcaggtcgtcttacatccaacacaccacacacatttatatgaaagatattcttaccatgatctagagaagataacagacagtactactcttcacatgcaagccttgaattgtgcagactatataatttttaatttgcacgacttgtctttgtaataaataaggacccgaagggataaaaataaaaaaataaagacatggtcgatttaattatttaatggatcggagccagaattattaagatgacaataagtcattctttttcctatcacctattgggaatagagagctgtttttttcttgtttaatttactagcggtagttgggaatatagatagttgctgttcttgtttcctcggacatttgcacaaacaacaataatggaatcccatgtgttaccattttttctcaaaaataaaatgactggatcctttattttttaacaattcatggcaaaaaatataatattttgaaaggaattatttgaagagtatactttaaacgaattattacgagttccatgagatgagcctatgacatttatatctaagaacataaaatatttataaaaactattagctataaaatccattttatctgcattatgatagtggcatgttatatttatgatacatatttctttcatttatattttcttagtgtttttttcctaatcataaaaagttttctgttattagtggcatgatatctactcgacaatttttcaaggaaaaaaaaaatctagactcgatctagagtcactttatctgttggtccggcccaagtccaaacagataagatataacaaagacatcatcacaattcacacatatatcagattacctttataccttttcttatttttctattcatagagagatataattcgactcgtgctatcaaaacaaaattgaagaagagatgtacccaagactgaaagatcttggttggttgatcaataaatgggtctgattatatataataataattggtattttctattttctgtaatagttttttatagataaaatttttatactgtttaaaataaaaactcatgttattaatatggtgttggtctaacggtaaatcttttaagtagaaatattatgattgatgtccattaaaaaagagataaatttaatttggtatgaatctcatatctaaaattttttcagatattaaaacaaatttatttatattaattagaggatatagtatagttaactgtatcacaatcgaagagaagaatttatatgcaccatggttcatgaggtacgtggaaaaattaaatgtgtaggattatgagtttttggtaaacttcataagtgacacataattcaatttgacagataatactattaaattttactatattcagtaattaagccattatcatttagacccaatataaaatgtcatacacaactttacaaactaaaaatacttttcttttattattcacaactagcacttgagaagataatagaaaatctgattttttgttttttctcaatcttcattggttgcttgatattttcttataaataaataaaggaaaaaatctttatcttcgtgatattatttaaaaagacaaatggttggttaacattaaattcgtgtttaaaatggttatatattaaattaatgtataaaatgactatttttaagttgagggattaaataacatttttttgttatagatgagatatatgttctaattactgcattttgattttgatttattttggtgaaacaaacataaatattatgaggatatatgctttagataaactatgtcttggtcatgactctagagtattggcaatgacacaacaaactatccaaagattcctgaaaactcctaatggtaagttctatcttattaaaatttagaaaaaaaaatacgaataataaaaaattatttggcgtcttatagggaaaataaaataatttaacaaaaaaaaaacaaatcaaagaaaataggtactatttaggacaaatttatgatggaccaccactaaaatcagttatgaattgtttatcaaaatcaatcaacactattttggcttttgattagcacgacttttgatttgcacgacttttgatttcactaaacaaagactgagtgtaagaaatagaaaaaagaagaagaaagacccattccaaaagtctgctattaataataaattatcaagataacattttcagcactatgattttataggaaatatataaactaaccctagtctttattcatgacgttaactatgaaaattttgttttatatggctcatatatatacattaggaaaccctatacattatcgattaccatttaattaaaatgatttttctatacagaaattctcaatcagatcatatgcaacttggtagtttgtcattgtgataagtgacaagttgaattcaaaattcgatgaaacaaatttcttacagaaaacaagaaagtatatatacatacacacatcttcctggagagccattgactagaccaataccatgcacgtcataggccatttaataatgaaactatgaaataaaaatagaatacaacggttgtcattttataaactttgtactgtatagggaagacttttgaatgcaagcaaaaatgaccggtgagttcttaattattctaaacaagctttacccagtctaatagtattaaaagtcttaacatgaattatcagttcatcaccattatccatttatgacagatatgtctacaattagtaagataaataactaaaagacggtgatctagtggcaatacaaggggttaattctatatgtctggatttaacttttcttggatataattttaaaaaaatagaaatagagtaaataataactctggatactaaaagagattatagaccaaaaattcagaattttctcagtttaaccaaacataaataaaaaataatgagataaggaaattaatcatgtcttacttacaacgttatattaattgtattgtagactgtactataatttttataattataataaaattatgatatttgatcaatttgtggagatatttataaaaaaaaatatattgtttgatttgcagaaattgtttgattaataagaaaaattataaaaaaaatattggttatatattggtttaaaaaaatattttttattaatcagaaaatattgtttgattaataaaaattttataaaaataataaattttgtggagatattaattgatcaaaaataaatcagaaaattgattttttaatatattattagtttatagaaatattgaatcaaacaattaaatgtgtagaagtttgattatatatcattacgcacatgcgaatcctacaccgttcacattatagagttactcttattatattttaagtacaattggcacataattcaaaactaacaacatgatttctagctgtttaatttgcaagttttgctgtcaatatatactattgcaagagttttgactgaagttaataaaagaccaactcggtttacatcatttataagtcatttgccaactgtaacaaataataatgacaagttgacaacaaaggataaaataatctttgtaagcgtattaaattttacactggtgaagctgtattgtctagttttagtgtcattgattaagatggtactgcatactttttcctcgatcagatacgtgcaacagcatcttcatgtgttgtctgtcatctttttgaaaacttggaatggtgatgttgttgaaatgaatttcgagcactaattatccttaacaaacttcttaatgtgtatattaattaagttgagccatatatttcgataatattgggccaccatattgggccatacatatttgaattcggaccgtaactttcgctatacatctataatctattttgattaacaatatattttaataaatgatttttacaataaagaatagtaatagtttgaagttcgttcttatatagtttcataaacttattaaaaaaataaattaataatattagtactaatccaaaatataattttaaacaaaacaaaaacagtgacaaataaaagaaaacaaaaacaccaatccaagctaaatggagactgtctagattcttttgattatttttctaactcattataatttttatttccttcacattatttcaaaaatatttagatgtttttgcataaaaatttgagcttacaagcaaaaagaaagtgttgtaaataaaatttcatggggaattgtccaaaatccttgattcaccgtgattcacattgccttccaaaatctctaactccactctaagattcgatttctccttcctaatctcattaagcgtcaaattaggccgtgtatcatttgtcaaccaaagcctagaactttaacacaacttctcctcatctctaacctagctttccatccgatcacattttctcattctgattctcgcatcagttttatttcaaaagataaatcatttttttttttaccaaaaaacgttataaatcgtactctactgacaagtaagtagtgttcaaacaatagctgaaggagtggatccgctactagaaatttgtaggatcatagcttgggttttcccaagtgggttaatctataaatgtgatccgaacaaaacgctcaaagtaaaataccatgtgtgtttattcatagagaaaaaaaaaaaaattgataagaaatagggtatcagcgaggacagtttacagtgttctcagtttatgttatcttaaatcatgaacgtatctgcataaatatatgttaactcaatacatgtcagaaacgatgatgtccaacttgatcatgcactcgttcacattgccccactaaaacttaatccaattttatcatataatttaagtttttgttgttgcaagtttatatataattttataaaaagtcaaaaatgtaaatcaaactcatgaagttatattattttttattttattttgaaattgaagttatattaatttacaatataacttgttgacactattgctaagtttattaaattattattttaaatttttaaaatgaagcatttacataaggccggctcaacattactaatttactatggtctctaggattttttttttgagccctaattattatttttaattgtttttgttatgaaaactatttttttgtgtaatttgacaacaaataattgttaaaaaaacaaaaaaatacagataaattcttctaaattcttttgaacatttttcaatatcatatataaaattttttaaaatatttttgaatattaaaatagtatgaaacttcgatatacacgcttataatgaatagtccaattgtcattttaagaattagacactttaatatgtgactgtaaaaactctttaaatatgtatattattggttagatttaattacatgagtttgatatatatatatatatatatttgcaaattgaaaataaatttaaagaaaattgttatttagaattttaatttcttacgagaaaaatcctataatttaattttagcgcctggctcaccccgtctggctaggaaaagaaatataaatacgcatgtgattattagaagaaatgatgttaaaagagagagaaagatacgagagaaaatggagagaaagtgagagagagagagagagataaagcagaggttgacttcgctttgctgagaaggcaaagagctcgaaagagagaagactaactctcatcagcgacgaatgtctgatccgttgaagatggcggccgagacggaggagattaaaccaggttactattctctctgtccctctctctttctctgctttcgatctatgaatatactgaaatttgttagaatatcttgtaaaccaatatctttttatgtatctcgaattgatctaagaacttgttgtgtcttttttttccttttgggtcaaaaactaatcataaggttgtctagagagatgattcaagaacaagaaattatctcctctttactttgaaaacgaattttatatacttattagtgaaggaataacgaaaaatgtgaatttctcaggctgatgatatatagaaccaatttggttgacttttttgactgaatttgtttttttttgttgggatcaagttccagcagcaatgggagaaaagaaggatgtggtgttgtgtaagaagatagtggaaactctgggaggaggtggtgatcaaagagtattgctggttggcgaagctgggatcgggaagacaaggatggcacaaatggttgacaaagaagcctctaaggatgttctttgctaccagactctctggttgcatctcaacaggaagtttaaagtcaacgacaactatatcaaggagaagaagtttgaagacgaatggtctctttatgagaacatagcttcacagctatctttatactctgattttgaagagactgaagtcggtgaaagagatgaagatgaggaagaggagaagaaggttgaagatttgctcaaggatttgaagcccaagattgagaagtatctcttggaaaagaaggaagccgtcgtgaaaaaattggaggatgacaagaagaagaaggagaaggaagccgcagagaaactggaggctgagaaaaaactggtggatccggctgcgaaaaaagcaaaagaccatggaaacaagaatccaaccgatgccgcaaaggagaaaacgactcaagtagtagccggaggagaggataaagctcagacatcatctgaaagaaagccgtatcttcttttgattcttgacgatgaaggaatgaccagtgagtacgaggtgatggtgcatttaggccttgaggattttctgaaagatcacacacctcgaaaaatccttattacaagaagacaagaaactgaggaggctacaaaatctggtgagcatgctgagggggaggcaaatgattcgcaatccggggaaaagaaagaggacacagatggtgaagacgaaattagatcagctgataaggaggaacctgagtctcaagcccgggtcaaaacagaggagaaacatgaaaaagttgtacctcctaccatagatgacttatgggggagcacaaacacttatggtgaaattacgttccagaccacaaatgagtcacaagatttacttgaatcattcaacctaaaggaggcagaggctttatttacttcgtccatgtttttcaaggatatgccaaattttttctttgaccccgttcctgggactgatgagaaactgttaaaccacatgctgaaaaagagcaagagtttgccagctgcaatcaacgtgctcgccaagtccctagagtacactgtcaagagcaagtcctataagcttaataaggacgaagaagagaggttactaaaagaaaagatagaaatggttctctcggctgagcggggtaatccatccgaccaggaatctagttctgagagccctaagaaagcaagtggagaaaatccaatcctgcttcttgcatacaagctgttcaaaaccgatggtccattgaaggatacaatattggattgtttttggcatagcttggacttctttgagcattgtggctgtgtttactaccgtgacctgatcacacaatggatacttgaaggctactttgatcctgttaggtctgtcgaaaaggcgtaccaggatggtcattctatcttcatggagcttatagaccgcggaatgctgaagatacaagaaaacaatgtggtagtaccagagatggcgatgagaaatgtaattgatcctcgacgtggtgggcatttagggaaatctcggcttggattttctagagtctatggtggtaacaagagaaaaggaatagggaaaatcacccaacttgatgatatgattaaaacagtgcaagcaaagaaaggagacaagattaccacgattctggttagtggagatcgtctgcgtcgcgtaactcctaaaaagttcttcaagaatctgaaagagcttgaagtacttggcctttttgagcccacagtaaaaccatttgtcccgtctttttcagatcagctcaaactcctccgggttcttataatcagggactgtgatctcctgaaaagcattgaagagcttaaggctcttacaaagctaaatactcttgaagtttctggtgctagctccctgagcaaaatatctgaaaaattctttgagtcatttcctgaactccgaagtcttcacctctctgggcttaagatcgagtcttcccctcccagtatttctggcctgaaggaacttcactgtctcatcatcaaagactgccctttattgcaagatctgccaaacatacaagaactagtaaatcttgaggttgttgatgtttctggtgctagtgggcttcgaacttgtttcgacaacgcagatggtgccaagaaaaacaagagcaaaaacaaaaacttttatcttcttacaaaacttcagcatcttgacttctcggggagccaaatagagcgactgccaatattccaggattctgcggtggccgccaagcttcactccttgactcggctcttgttgcgcaactgtagcaaattgagaaggttgcctagtttgaagcccttgtcaggacttcaaattcttgatctttctggcactacgagcttagtggaaatgcttgaagtgtgcttcgaggataagcttgaactcaaaactcttaatctctcgggaactaatcttagcgagttggctaccaccatcgaggacctgtccagtctcaacgaactcctcctacgtgattgcatcaacctagatgccatcccaaacatcgagaaactagaaaatctcgaagtcattgatgtttccggcagtgccaagctggcaaagattgagggatcatttgagaaaatgttttacctacgtgtagtggatctgtctggaacccaagtggagacaccagagttgccagcggataccaaaatccattgtctgaagcgttttactcgggcagatggaaaatgttttgaacgtgacacatggagagaaataaaggaagacattgaacgtgataggtctgagaatgccagctcctctgatgcagttgttatatctcaagaaatcacagaaaagaagcctgtagaaataagagaggttgaatcgaatgcacctcgcgccagtgattgtaccgagaaagtagatgtcaacaaggaacgtcttcttaaagtccccatagatagggctctatatcagaaggcactaacatcacttgttgattccaaaattccacaagaagaagtcttggagatcaatgaaactaataagctagatgaggaagcactagctagtgctgagtttgtgtcttttgtggactgtactcctgaaagggtcaaatctatctttgagaaggccaaattggtgaagggttgctggctaaggatgtgctttgacataaaagaccctttcgatggtgtggatgaggagaacttgaaatcactggagactttatcgattacaaaccttctctcattggagactataagctttattgctaagttagagaatctgaagaacctaagcttagattgctgcccgaaaatcaaaacgattttcccggagatgcctgccagcctaccagtcctgaatttaaagcattgtgagaacctggagaaagttgttgtaggagttgaagtgtcaactcacactaatctggatttgaaagtggagaattgtccaaaattcggggtaagttgcaactttctactctaccacctctcctgtgaacatttgtcatttaggaccattattgtagctatcttttacatgtcaaacagtctagcacacttcagaactcatcagaagaggaacacttccacatccaaaattgttaaaaatttagttgcatcatatttttctctgttttgcaggtcgtatgtgcttgagtcgtcttgcaacatatcttgtctcttttcagcttcatcttagcattttacactgcgtgtatttgcaggactacgtaatggttgaccacagtgatgtacctccaccacatgaatgctgatcataaaagaggctggagcaagatctacttacacagtactaaacatctggatcgttgcctctttaatcattttcatacttttttcctacgtgtgcctgaagctttgcgtgttgaataacgaccggcattgaaacattatcttgcgggttttatttttactgtttcatgtttctgtttctgttttaagatattttctgctgtaaaatcccaggcatagtgttctgttcttgtctgggtgaataagaccattgttttgattgtttttcttttctcaaatattatttgaaatttctctgtttgaaagatcttataagacagtttaaggctttacgataaatatttaatttatacaagcaggaatgtgtgtatcttgttattcagagtgtagagaccatacataatttctaaagaagttacaaaggcttttgcggttatcttcacatatttggtgacgacgtccagactccattaccatctgtgggacagaatgcgattttggggcatttatatttctccaacagtgtcatttttggaaacagagtttgcaaatctctccactcaaccttgaattcatgcagatacttcaaacgcaagatctcaacgtcccatttatcttctgtgattcgactctcatcaccgattcggctaagttttcctcctttgatggagagctttttaagatttttcagatctttgggatttaaccaactcggaggttttgtttcagggaaacattctagctccaacttcttcaaattagaaggaagtgtataggtgtcatctactactggatcttcttgccatcctattccccatttcttggtttggtttccccttcccgttaaccattttgctttgcttgactttgatttcctggatggtgattgtgtttcatgaatatcttccgccattgtgttgtctcttttcggatgatcagacacattcttaccaaacttagtggttttgcgtgacttctgagtctttgcttctcctcccccatcaagcttctttaaatcatctccgttcttttctccatctactttttcctgcactttgctaatttctcggtgatcatctggcttgctctggattatgtctttcgatttttgcggtggatttttctcctcatctccctcgataaccttatctgattttgagctctctgcttttacgtcattttccttctttccttcatctagatcagccgccttccctttgtctacatctcctttttcctgcactttgctattttctttctgatcatctctcttgctctccattgtgtctttggattcttttggtggacttttcttcacatctccaccggtaacattgtcttgttttgagctctcttcttttatctcgtcgtgcttcttccattcttctagattaaccttctccttttctccatctcctttctcttcttgtttgtcacctctttggtgatcatctggcttgttctcgatcgcgtctgtggattcccgggaaggactagccttatcaactccttcaacaccattgtctgatttccagatacctccttctacctcatcatgcttctttccttcttctggatcaactttccctttgtctctatctccttccttttccactttggtttgatcatctgtcatgttctggatcgtgtctatagattcttgtggtggactttcctttccatctccctccacaactttgcctgattccgatttttttgcttctacctcatctcgtttctttccttcatctaaatcagcattttctttgtctccatctcctttcttttctactttgcttttatcatctggcttcttctctccctcgacaatttcatctgatttcgatttctctgcttctacttcatcttgcttcttttcttcttctaggtcagccttccctttatccccatctccctccacattgctcttccctttctgatcgcctggcttgttttggaacttctctgttgcctcttcggaaggacttgtcttcttctcttcctcgacgacctcgtcagattttaatgatctctcttcttttccctcatcatgcttcttcccgtcttccagattagcttcttcatttattccatctccttgatctccatcttcttgcttgcctgtttcttcaacatttcctttctcctccttgctcgtctgtccataattctgcacttggtcatcttctcgttccatcaggtctttgagtttcttgtccgttgcaagacctccttggttctccttcttctcgtttgttgtttctctagactcaactgcttcattaggttcttcacaagctccccacgcaattttcagactctcaagtccctggagtcctgtcaacgactccatcagactttccaccttaaaagagtatttgtttactgttatgcttagcttccttagattcaccagatgtttaactgcacaattattttcatgatccgactcactaatcacaaatcctttcagaacttgtaatctggagagttttgcaatccccttaggcatgcgatctagcatatagcactctgatacatccaagtaaatcagtttctcaaacaagcctatatcactaggaagaacctctagattgtagcatgctttaagatccaagatcactaactcggggagtgcgcaaattgagttctcgagcctttctatcctcgagatcccttgaaaacttgcaagcctcagattcttcagggacttcatatttttaagaaactctgtgctctcaacttcaatgtggcgcttagctgtctgctcccatcttcccaagtaaagcactctaagtgaatccattaatggaaaccacttgaatgtgaagtctgggtaccgttcagaggaattgaaaaccgtctgcaaggtttttggttccataacagatgtttttgcgtctcgtagcaacgaggaaccttttactaggcagacctttttcttcgatgatttcttcatgataagcttcccattcttgttatatagttcaaatagatccatttctttggctaagtatataactgcagaatgcacatgaggctccatcttataactacttggtagcagtttcctctcatcttcgaccggctcaagtaattttttgtctgagaatgaatcaagaattctcgttactaagttttcagaatcatcacagctgataaaaccttctccgatccaccaatacatcaacattgtccttttaacctctctgttttccgggaacacggcgaaggaaagcaagcaaagcttctgagtgaagtcatcaaggccttgaaatttctcaacaacttcttcaaaagcagaggaagttttgaatttttcagagaagtggaggcccggcaagtatatgtcaatcccggtctcactgatctcatcattttcctcagcggtttgagaatccgtgatgcttatctttcttgatgattgtttgtggagcaatgatgggatctggcacttcaaggcggagacctttcttctgatttccttgacaacgtgagagcgggatccgaacgagttcttcttttgtagtattgctattaacttagttgaacgaagatcacgctccaaattcttgctcatatcagtttgaaactgagttaaattcttaaatgcagctatcatctgacgaatgtcattctgcaatttccggatctcgaggtcttcattcttttgatcttcttcaatgttttgcacgcttcttctgcttccaccttgactacctccactgtcactagcattgttgaaagcctccttcttcgccttaccaattcttttcaaacttcctctgacacgaacccaccaagatcttttttcctcacttggttcgccttgttgttccttgtggctaataactttatcggatacaggtatcttcttcaggtcggagtctaactgagataagatgttgataatcttatagatatcacattctttcgtcgacatgatcagaatggtaaagagcctgcaactccaaacaaaggatggaaactaatttgtgtttgattcaacgtagagttcttctgttttagtacagaaaaaaaaaagatagagacaatggagttagtttgtctccaagtttttgagaccgaagagttaatttttcagccacatggggactatttgaagaaccttatcaaggtctcattcaagtatatatcagaaaaatggtgatgtattaacccgatgaaccgaaggaaaagcgaagacgttccttatgctcacaaccattttgaaaagactagggttgcttacggtgaactacgtggaggtctcattcaagaatatatcagaaaatggtgaactattaaccggaatgaaccgaagcgaaacaaagacttgtacatgtactaaccattatgaaaagactaaaaaactgcatatggtttatgtaaagaatcaagctttatgatcctaagttgtgttctacattttggatacttcataattatatgcaggtgaagaagtgaaatgtctccaacagtcgattatatatatatatatgtgcaaaccaaataaaaaagaagaatatgaaaaaaacatcgtaccttattaaagtctttttaccgaaaagatgtcattcatatattttatcgaacaccttgtgagcaatcttttgtttctgaataaaaaactcaagagctcttcctttttttataacattttagataacttcccatagaaatcgaacaatggtagaggcaaagcatccaatacactgttctttgcttcttcattcggcgaagaaatggaattatggaagaagaaagtctctgtggaagaaaagaagaaccaaagtatcgatatccatccatgttaaacacatgactcttaagcttacatagattcatggttataccaaaaattaatccatcttatcgacttggagccagtttctgctaaagctttttaagtgtcccgaaatctccaaaaatcccaactttttttgaaaaccctaagttattccttgtcagacaaggtacgagcaaaacttagacatattattatcttctcataaacttagaattgttgaactgaatgaggcaaattattaatgcaaattctgcttaatttcgttgatggatcgacaactttctttaatctagacttctagattcaaataacaaaatgtgtgaacattgcttgaaataagaaacagagccaaaaaaatattacaaatcttcttcacacacacacacacaaaatataaataaaataaaaagatataacttttatttttgggttataactatccctctcctacaacgagtttagctctagcatcacctttattgatctgaaactgatctcctaatccgaagtgagccatcaacaaccaaacaaagttaagaagctcaccacctctgctaagttgcgccacatgctccgtcgctttacaatgacttgctgcgtaacatagcaactcaacccacactttgctcaacactctccatttcccatcttcattactactctctttcaagttctgaagctctttcgccaacatactcgcatcgaaaagaaccgacttgcttcgatctcccttcacaagtatcggctcaatatcgttactaaccaatagaaccgtctcactcgctcgtttcatatctctcaagtccttgatttgccttcctttgaaaaacctctcagcttcagctttagtatctctaaaccgtatagtcccgattcccgccacttccgacattagcttcggtcgcattatcaacaaatacatcatgtagtccgatataatcttgctgaattctcggtcatcataaccttctctgctcagcttctccatcttcccaccttcttctttttgaaaacagagctcagtagcaatgtgccaaaggagaagactttgatcataatcaactttctctatgtaacgcatcaacgtatcaacttccatcaatttcgaatctcgtaaagcccattctcctctcgcccaagacactttctttgcaacttcaggcgtttccgcaaaccccgacttatccttgacctcattgaatataaactcccattgattcttcgtcaaaggctctctcgaaatgaacctaatcccgtctagataagatgtaacactaaagattcgatcaatgtatttccaaaggactctgaatacttcaggaataccggcgaagaacacgagatataacgggtaaactgtgcaacgaatcatcggattcttcttagaccattgccggagcacgcttcttattgatctattaacattcttgatccatccaatcatcatttggattcttcttatcactagatcgaatagcgaaaccacgtaatcccacactaataggttacagtttctcttctggtggattcttgaaactttggctttaagacaaaacccgatgaagttaaatccgtagatcgtgcctgaccatctacgtgtaaaaaaccccgtcgagagtacctcgtgggtttggtttccgttgcatgtatgcttcttccaacggggtttcctaaactcgagaaaccagttgaataaagagtcgatagaagtactcttttcctctggatcatccttaaggtttcttagtactgcgaatgtccaatccgagagcaagaaaatgaccattgacgcaagatcaagcgcgataccaactataaacaaaacgtaagtaatcaccacatctgctccatgaaaatcttcggactttagcggtctacgatggaagacaaagaaggaagaaagaagtgatccaaaggaaattaaccgaaacagagtaccgattccggtatgaagaattgcggttttggtatacatcgattcgtaaagaaaaccgagctcggtttcgataattcgaagagcttctccaggtttcaactctttgaagaaatctctactttcgtctcgctcacggaaactgaaaatgagatcaacaacaagacctttgaaagtgttgaagaatttgaaaccgtattgaacgatttcgagatcggttaaatctcggtccggtttaacgagtgtagggggtctctcgtgcttgtcgggttcgtcggttaagaagatttcagttgggagatttgacatttttcttgaagcgaattcttccattagcttagcgtagttagaaccagcgtctgctcgttgaagcattctgtctttgaatttgtctaagctcgctgagtacaatgctcgtgtcctctccacgtacttaatcgttcctgtgatgaataaaagtgtaattggtggccataatacgttttctagcgattgcaccaccgcataaacacctgaaaacgacataaaaatgttatgagaaaaccttcataatgaggctatttaaattttttctaattaataaaacggtaaaatatattttgattattttggatattgatttttctacatgtaaaagggaaatgttattgtgttttttcactaagtattgacgcttaactaaatattttaggttaagtatagggagaacaagtgattttagcttcccgcttagttaaattttatcttatcgttttttcaatgctattatataataactaaaataaaaatcaatttttcacaacagtaacggaaagtgagctatcctcttgtactatcaatgtggatatttgttctagtgacatatatattcacatgttattgattggtaactatttagtaaaagcctatattacattttactatttgttacttgataagtatatatcttgttcttctatcttcatgcagtgcacatataatttagtttgtaagatatatgaatcgtgttagccgtttcttacctgcaagagcttgagagacgaggccaaacaaatgacgttgccataacgcattatcctcaagagccaacgcggttatcgtgtccggcccaccaagatgcaacaacaagaatggtgcccatagagcaagaagcttcttgttttttggaggatcgccaggttctgtttcttttccttggttcttagtgatctgagacaccgcataattagcggtccaatccgctaaaagatatgctgtccatagaaccgcggcgagcaacttctttgatgtgcgtttccgcattggtgcaaggaagataagagacgtttggaacaacagagacattatcacaagtcctctgatgttccatttgtctaatatcttttttattgctggtggaatcacttgcatcgttgttactcttttggtgtggaaaaactaagctcgtttaagtatcaaaatttgctgtttcatttcatgctctcttactcatagtacatatatataggggatatagattaatagttaattatttgaccaaaaatttataaatgaacctatttaataacacgtgaattatgttttcatatattcaattcttatattccacggcaactctttaaacaagggcttttttcttgtcagaataaaatattctttccttgttgataataaaatcaagaaaaccatactttactcttatacacacgttacttaaaatagtacaaggattttctgtttttggcttgattttatgtaactgacaaaaaccttaattataactttaagtaaaaaatattttaaaacaagagatattcgtgagtctatattagtagttagattaatataaagttttaaattaatacagtttcataagaaaagggtgatacaaatactaatagttaatcagccattatggtgatacagagaaagatacagacagaacataaatcaagtaattattgagatggtcgggctgaagcccatttaaggcccattttattatctcagcccaagctaaggcgtatctatcttctttcgctttttgtttctctccgaagaaaaacagactcagaatcacgcgccaaaatcgcaatgtagaggacgaacatggaagagagcataatgaaagtgcaaagggtaatcaataatcacgaaatttcaactacgttctagttccctgaggctgtttttgtattgtaagtaagtagggtttagtagtgaagaagtcaatcaaaatttggggatttaggtttttatttatttattgaagaattgtgtgaatcgatgaatcctgttctatgttgtgaaaaatctgatgaattgtgtgattactgagaaagattcgaagtcctgaatgaaattgataacaaaggatatgattttcatgttcataagcatagatgatgactaaagttactacactattagtgcagatttattcaaggaagtaaaacataagtgcaggtttgtgttgataaatcagttggcgactataagtttggctcttgcatcatctctgttgatttggaattgatctccgagtccaaaatgagccattaatagccaaacaaagttgataagttcaccgcctttgctaagttgagaagcatgttcttgagagtcacaatgaagtgatgcatagcaaagcaactcaacccacactttgctcactacttcccacatgttttcaccttcattcattagctcttttgcgagcacgcttgcatcgaaaagcacggatttgcttctgtctcctttcacagccattggatcgatttctgtgttgacagagagaatagctcgacatgcttctttcatgaggtttttttttacatatcttgatttgtcgacatgtctcctctggaaaaagtcctttgcctcttcgcatgtgtctctgaaacgtatctttgcgattccggaaacagctgacatcagagttggctgcactataaggaggtacatcatgtagtccgaaaggattttgctgaactctcggttactgtgttcttctttctctcggttagtactgtgttcttctttctctgtgacttttttgtctattggcttttggtataagagttctgtggcgatgtgccacagtagaatgctctgatcgtaatccttctccgtcacgtactgcagaagtttcgtatggtctgttccgtcttctttctttttgcttgatgtttcaagtagagtccagtttcctctagctgaagatataccctttgcactttcttggtcttcagcaaatcggtgtttttgttgcacctctgtgaatatgaactcccatagttctctggtgaggcgatcactgaccgtgaatcttatctcttcaaccaaatctttgataccgaaaaagtcgaggaagttgtagatcaaaagtccgaggagttgagggaaaaagagaaaccatctaagacctgtacggattaccgaattgtctcttttggacaaattgctgagaaagcgaccaatccagttatgaaactggcgagttcctctggtggcattttcgatggcagtatctatggacaaaatgtgaacggtctggtgaaagaaactgtgtatcttacccttggtataatggattctcttgggacgtattcccaaacagaagccaatcaagttgtaagcatgaacatactcagaccatctgcgaaacataaagtttctgttgagcacttgatgtccatcctgggaacatttggatcttttccacctcagcgtcttgaaatcgaggatccagttgagaactctgtctgtcaaggtgtctttctcttccaggtcctcctttagtttcctcagtctagcgatggtccagtcagatacacagaacatgagaagagcaatggaatcaagagctattccacatatgagcaatgcgtaagtaaggacgacatcgaatccatcatattgatctttcttattcatcttgaagaggcagagagatgcaacaaggcaccccaaagctataaaccggaacacagctccagtccagttatgcagaatctctgctttggtgaacagacaatcatagatgagtccgagctcgacttcgatgatacgtaaagcttcttctgcagtcagcttgtcaaagaatttcctgctctcgtcgcgctcttgattggtgaagattagatcaacaataagacctttgaagatgttaaagtatttgtaagcatactgaataacttgtagtgcggtcaattcattgtcgggcctaactggagtattgccttcccgtcctttctctggatccttcaccactattacatcagttggcatattcatcttcttcctagcttcatattcctccatgagtttcgcgtaattagcaccagggtcaggatcgtcgagcatagagtccttgaacttgtcaagactcgctgagaacaacgcagctgttctctcgacatacttgatcactcctcccacaaacatgattaatgttggagtcagaagcctatttggtatagacaacaagatcacatacacagtggctaccgcttgacagacaagactaaacaagtgtctgtcccaaagctcattatcctccaaggcaagtgctgtaatggtatctggacctccaaggtgcaagagaagaaacggtgaccaaaatgctagcagctcacggttcttggatggtttgtttgattcagcttcttcttcttgactgtctgagatttgcccaaccgcgtaatcagctgcccaatcagcaagaagataagctgaccatatgaggacaaggaagagcttctttgcggtgcgtcttcggctaggtgcaaagaaaataaggattgtttggaggaaaagactgagtattatgactccacgtatgttccatttgtcccaaagtttcctcagatgtggtggaatcatgtcagtcatcttgtcttcttcttcgttggaccgcaaaactgcacttggtttactgtggatgttcacagtagtgtcaaaggttagtgaacgtttctttcacataaagtttaagtttttgtctatgggtttctttgcttccattgttttgagacttgaaatagaaacacaaaccatcaagtgttattgttacactataagtaactttataccttgcttataaacaaataatatcttaatctcttttgctttttgtttttattcctagtctttgttcttttcttatgaccataagtaaactactaaaaaaagacaaaagcaatcgaatgtagatttatcacatggtattaaacgtatgtacatttaaatgtattacctcatagcttctctaaagttaaaagttaaaatattctacttgaagcttgtcttcactttcactgttttttgtttctaacactaatagctttctggataagtgacaaggtctctatattcgttgtctgagtattgtgtgaagttaaaacttggaaagttgataggtaaaaaacacattgggaaaaaagttgcatactcatttcctacattattacacactcttcaacataaactctctacaccacgtcaatccaagatggaaacacttgctaattgggacatatcttgctggtactttcgtatgtctttcttacctttggacttaaagggcttgattggttcttctgatattaaccgcaaacgcttgctagtatttaaacctaatcatagagacaatttcaaactgctccaaaatactctaaaccatttgtaatagctgaattttaaaaggtccttgcggtggcaagttaaaaaagaattcacataaacaacaaaaaaataaaattatcaaaccctttatatattaacgttaattctcaaaatcctaatttgatttcatgttgtcaatccaaactggagaaagtcaaatattgtaataatattatcaatttggaagatttaagaattcaaactcacttttagtagtttgtcaattatttgatgcaatttttggtgatgagctaaaatgaagtaataaacatttcactattaaatttctttgtctttgaataattatgtaacattttatttacaaattttattattagttatgttttgatgttttttctattttatcacaatagtagaaatttttgatatatctaataaccaccggctttgaaatttgtcctaagttctataaaaacatttcagacagaaagcaactgttttttttttctttgtatttttgcttgcccatgaagacaaattccagtttttcactattgtgtgtgtagtcaagtcacttgaattttccagctaataattgattatttaagaaacttaaggtaaaataccaaacattctgaaagttaaggggttttttaaaaatatgacagctaataagaagagagagttagagagaaagagaatcaacgagtctttcgtcttcatcatataaatactctctcactttttcccgtctttcagagactctctttctcatttccacctgaggaaaaaagctttttcgaatctcgcttgctttttgtcgccatgagtctctttgggttaggaaggtgagaattttcttcttttctctgcgtaattttatgttcgatctaagatcatcccatagagaatttttgacgattgtttgcaatctcagatctgtttgaaaaatcatcaaactagtgatcttgtttcttctgtgatattgtaattgtgtaggatcatggattcgtgtggctttcttctgatttttctcggattaaatttggttttctatgtgattgctaatcagaacttgtgatctgtagtatcaatcttactttattggattcaggttcatggttgatttttttttttgctgtgaattgatgattatgtgagtgtgttttatacatctcttgattagtttatgatttttatgaattgggaatctggatcagtatcctgatctttagtgttttgaagctgtttaaggtcgtttaacacagattagagttttattgattggatttaaaattattggagctttggatttgtcctcagtacttgaaatactttagttggatcccagttaatattgttatgatggttcataacttcatatttatgttccccagatttggaacatgttatactaggcacattcaatggtggtcgatcagatttgttttgtttctctgaactcatgattgtaggcaataaaaatggaatcaaaatacgagtttttagtgattcatccctgtcatacgcaatgatttctgggatacatagggtttacttattgataaagactgaaatttttatgttgaacttatagccgttttgacccgatcacgtttactaacatctgctcctccttttttatgctttcttaatagaaatcagaagactttccgacctaagaagagtgcaccttctggaagcaaggtttgtaaactatttgaccgtcttcttcctatggtttatgtctttgaaactacgtatgtagttttgagttttgcagtcgtttatcagttgacatgaaatatagtttttgattcttctcgttgaacgttttgtttctttcggaaattagggtgcacagcttcgaaagcatatagatgccaccctaggaagtgggaacttgagagaagctgtaagacttcctccgggagaggatgcaaatgaatggcttgctgtaaacagtgagtaccactctgcttgcagtctcatggtcacttttttgtgtacttagtcttggggatgtaatgcaggcgttgaataattactgatttctctttctttttacgatgttgaaactcatatatgtacatacacatagattgagaggatttgctaattgttgatatttttgcttttccttttcagctgtggatttctttaatcaggtgaatttgctatatggcacccttaccgagttctgcacacctgataactgtcctacaatgactgctggcccaaagtatagcctctctccttttactatgtgttattcgcacaaacaattaaaatcttcatgctttcattgacataatgacatttcatttaagaaacaaagttgttaacaggctcatatcatatattttctctttgccatggtgttcaagtggttcttcgtgattaagcttgttatatttttatgctgtcattgcaactgtgaagattagaaagaatgtaggcaatgttttctttagtttatctatgtagtattttctgatgaaatactttatcatgcaaaagctaagtgctgaaattgttttttgaaagataccatttccatttcgattctctgttaaagtatgacttcaactaaccaaaaatatggctgattttctgttgctatggattctttctttgcatgctttttgttaatattgtcgaacaaatatttgcaggtacgagtatagatgggcagatggtgtacagatcaagaagcccatcgaggtttctgctccaaagtatgtcgagtacttgatggattggatcgagacccaactcgatgatgagactttatttcctcaaaggcttggtaaatataataatgtctatgagatctaacaagaagatcaatcaatatcaacaaacaaaatgttctatcgacatcctcatgctaatttttggtttcttgcaggagcaccatttcctcagaacttcaaagatgtggtgaaaacgatctttaaacggctattccgagtttatgctcacatataccactctcatttccagaaaatcgttagcctaaaagaagaagctcatctcaacacttgcttcaaacacttcatcctctttactcatgtgagttctcgttctaaatttactagtatactcattcataatctacgaaataatgaaatgatagagtgattttgtggaatctcacaattctgcatctaatattaagaaactaaaaaaatagtattattttgcttaatattcagcttaataacacactttatatttagtagattggttttgttttttacaatttggccatttcactgagatttttggtatttggtttctgcaggaatttggactgatagacaagaaagaactcgcgcctctacaagagctcatagaatctatcatttcaccttattgagcaaaagaccatttctgttttttttttttcagattaaaaaccccaataaattaacggtaagaagttttatttttaattataaatctctcttgtttgttttcaagtttttttctttcttaaacctctgtaaaatttaaacatttactatgtaaaaaagaaatcgatcttgactagttctttattcatgtgtgttcatgtgaaaagcaaaatgaactttacattttaattcatgttagtgatggattatatttaccgttaagcatctcgaatctataacattcaccaacaactatcattaattcaagaatttttgcctgcaatgggaacgtgaaatgtaacagagctgttataactttactcaattaactaatcaattaaaatccttaattaatctttaattagtttacttttcaggagtcgggacacattcactgcgtctctctctacttgtttttatttaactttcgatttttttttctctctgtcaaaagatgaatttcgttgtcgttagcaaaaaaataatttttatggaatttcaaaacttttgagactcataaatctctccggtttgaagcgaaggaatctgagaatctaacacccagattacggtgccggtgatcaaatcaaggcattgatctccccggaaatacattgattccgatttggatctaagattcctatttttgttggggacattgtgagagtaagtggcaatagaaaatgtctaaagttgtgtatgaaggatggatggtaaggtatggaagaagaaagatc

SEQ ID NO: 838 - DNA, 30340 bp, Arabidopsis thaliana
ggacgatcgtatattcatatgaggtatttcgtgttggagcctcgtcttttggcttattacaagaagaagcctcaagataatcaggtaataaaaatcccatgaatctagtctatgcttctgtgttgagacttgagatcagtctaaatgggtgttgttttgtcttaaactggtgttttaggatttaatatggttgtgaactagagaaatagaaagaaaaaaagtatgagcttgataatggatgataaggttacttgcttaatagatgcttctttacatgttcaatgtagcttcctatcaagacgatggttattgatggaaactgtagagttgaggatcgtggcttgaagacacatcatggacatgtgagtcttattatctccttgactgtaatgtgaaacctttttttttttttggtttaattgtaatttcagttatgcatttgcaatgtacttatcttcttgactttttttttgcagatggtttatgtgttgtctatttataacaagaaagaaaagcaccacagaatcacggtatcttgtgttttctttctgagaatagatagtagtagttttatcttgttactatacattttaatgcttcttgttagtttatttggagtatgttattgctagatggcagctttcaacatccaggaagctttaatgtggaaggagaaaattgagtgtgtcatagatcaggtctgtttattctgtctcgaattccctgaatcaaaaaattattactgtagggtatatggtaactgtcaatttttaaggttctggtatattttgcaaaagagaagctctctgtatctgcctgtgttatttatcagtagccttttgaaagctgcagattggtgcttacctgattaccgttctttgtttttttcctgctgcagcatcaagactccctagttccaagtggtcagcaatatgtttcttttgaatataaacctggaatggacgctggaaggaccgcttcatcttcagatcatgaaagcccgtaagtgcaataattgacatcatttctgcagccatcttgattttatcttacaacaactcacttgttaggttttcttgatcatatgatttccctgccttaataataaattctggttatagagtactatctctacagagagtaagtctgacctgtgtagatccataatatgcagaagaaggttgacgtttgtggctatcatattcatttaaataaaattgaaaaaaaaactggatatgataagaggaaatcaacttggtatgagaaaatatcagtagatactagtaaagttaatcatcaatcctaatagtttctgagaacgttaccgattccagaagatggtaataatgctgcatgcagaaaaagtgaccagtatcattttggtatatcattactgttgatggctggcacagttttcatttggtgggttttaatacctatatttatgcgaaaaagttacatttttctccaggttcagtgcgctggaggatgaaaatgactctcagcgtgatttattaaggaggacaactattggaaatggtttttcctaattcatttcgtcacaaacgtttttggtcagcttccttaatgcaatctgaccacctcaaacaaacatgcaggccctccagaatctatacttgactggactaaagagtttgatgctgagttgtcaaaccagagttccagcaaccaagcgttttcgagaaaacactggcgtctccttcagtgccaaaatggttagtggatatgcctggtgtctgcaagcattatagttctatttcttattaccctggtaaattacaataagtcatgatgtgtgcctgtaatcgacgtcaacataaaatttcactacaatacaatctggaggatcatcttaaatttgggagtaatcttctcacttttaaaaacattttgcaggtctacggatttttgaagagctacttgaagttgattatcttgtatggaagtgattttctttttcattttttatggcataatttcctcctgattacatagtaatttcatttagtcaagcaccatcatttacggtgctaagcatgcagccaagaagctgcagcagggctatgaaggctgttggtgttgtagaggccacatgtgaagagatattcgagcttgtgatgagcatggatggcactcgatatgagtaggtgtttctccatcttctgtattctcatttatatcatcctttttggtttttctttcccctcattttcttatagttatatgctttgttatttggcaaaatttattggatatacgattgtggtttttatcttttctgtttccacatcctacagtaattttctatcaatactatgttagcaaaagtgtgtttgtttttctgtgtgttctggtctctatctgaggctctttttctccctcttttcttatggtttggcaggtgggactgcagttttcataatggaagattagtggaagaggtcgatggtcacacagcaatactctatcacagacttctgctcgactggtttccaatgtaaaatttcacctgaaatattatcatttagtaataatcacacattcgcgttcaattgctaactaaagtatagatttgattcaaaatcaactgaaattctgtcacatccatattgaagtagaccagttatcctggggagatcaaggcttatgcagatgtgtttttacttattttgcttaccataatccgatgctactgaaaacccgtagataggagttagagggccattatactagttaccatttgtgatccacccgttttcagtcagaatatgacttggttgtttccaagaactctgtttagtcatactcacgttatccaactggctgtagggttgtatggcctcgtgacctctgctatgtacgttattggcgacgtaatgacgatggaagttatggtatgttcccttctctttataatcatgctagaactggacagcctctattagatatttagttgtaattctttatcttgctctttctgtgaagtggtattgtttcgttctagggagcatgaaaattgtggtccacaacctggatttgtgcgggctcatcttgagagtaagtttaatgccaagtcttttaccaccaaatcttcttatatattatgaattacaaactaagttagattatgctctcttgtttaggtggaggatttaacatcgccccactaaagccccggaatggaaggcctaggacacaagtgcaacatctaatacaaatcgatctgaaagggtggggttcaggttatcttccagcatttcaacaacattgtcttcttcaaatgctgaacagtgtttctggtaagttcttttgtgctcattttcactgagatcccggtggaaaatgacttctgctcttcttgaaaccacacttgtgcatctgccattctaattcatggactcatgttcatcgcaggtttgcgtgagtggttctcacagacagatgatagaggtcaaccgatcaggatccctgttatggttaatatggcatcttcttccttagcgttgggtaaaggtggaaagcatcaccataagtcttccctttctattgatcaaacaaatggtgccagcagaaactctgtgctaatggatgaagactcggatgacgatgacgagtttcagatacctgattcagaaccagaggttggcctatcaagctttctctttgaacttaagatttgatcaagttgagtctttcttcacatttgctatatttcagcctgaaacgagtaagcaggatcaggagactgatgccaagaaaacaggtgaactgatagttgtgttttatcgttaatgcttactgagttggtgaaaaagtatctaatctttatgaatttcttgtgccatatgaaacctcaaaagaggaacctgctctcaacattgatctgtcatgtttctcgggtaatctgcgacacgatgataacgaaaatgcccgtaactgctggaggatttctgatgggaacaactttaaagtccgtggcaagagtttctgtgacgataaaaggaaggttagtaatatctaacctaattaatttagaacgcactagaaagatgcacattcttatcgtattacatctgtgatactcatttaaccttttactgaagattcctgctgggaagcatctaatggatcttgtcgccgtcgattggttcaaagacactaaaagaatggatcatgtggttagacgcaagggctgtgctgcacaagtaagagatgttattaccctgctccgttgctattatctatctttgaggtctcttctttgtcacatggaaattccaattaaattgctattaatcgtttcaggttgctgcagagaaaggtcttttctcaacggtagtaaatgttcaagtaaggtttgcctgtgaattacaacataatgacaaactataattttcgatgtataatccggtatttttggtaggttcctggatcaacacactatagtatggtattttatttcgtgactaaagaacttgtacctggatcactcttccaacgttttgttgatggtgatgacgaatttcgtaatagcaggctcaagcttatacctttagtcccaaaggtatttatctctctctctctcgcttcccctctctctttctctgtgtagaatcttaaagcaaattgattcatatgcagggttcatggatagtaaggcaaagcgtgggaagcactccgtgtctcctcgggaaagcagtagattgcaactatatccgtggtccaacatacttagaagtgagtccacattttgtaacctttttaaaagcttgtagatcaaataaagtaacttaaaaagaaacatttgcattcccatgcagatagatgtagatatcggctcatccacagtcgcaaatggagttcttggtcttgtcatcggcgtaatcacatctttggttgtcgaaatggctttccttgtacaggtaaaaatcaatctaacaaaactaagactttgatctttaagattgtttctccttttgaaatcttctggatgatcccgagattacgttttgtaggcgaatacaccagaagaattgcccgagcggcttatcggggcggtgagggtttctcatgtagagctatcatcggctatagttcccaatttggattcagattagtccataagctctctcctaactcaaaaaagctttacatcaactccatgtttggtctctctattctttctttcgtttttagaattattatcattaccttatagggtcatctaaaacaatttttgtaaaatacaacacatatgctattaccaaatcatttttctattatttttactgaattttgctcagattgcctcataagattaataacttaaatgactcttataattgatggctgactagaatgactcacattttaaatctaaagacattttaaccctaatcagttttataaccagaattatactaaaaatgtgactttgattaaaaataaataaaatcattaataaaagaatggattaaataaagaaataaagaataaaaaattttactgaaacctaaagcgtaactgttttccccgactctcgaaatcgaaacccaaaaattgcatgtctcttcttcttctttgatttcaaatcgaaaccctaacaaatctccggtggtggctcttcgtaacgccgacttctcttctccggtagtggctcctttctccggtggtcgctgctcgactaggagatatctcttctccggtggtggcgttgctgcttcttctctctcaaacgacggatacttcttctccggtggtgactgcgctgtgggtttcggatgcacaaacggcagtgaggagttcgcctcttctccggtttcacctgcggctgtgaacagcggtgggcgttcgtgtccgctggtttagggttcttcccattcaccgccgaaaactgttgggttctttttgtatgtggattcgatataggtaaattcggagtcaatcagatgtgaattcagctttagattcatcctcttttcagattaaagattgtgaaatcgactctcgacaaatgaaaattggttttgggttgttgtagatctacatgttcttcttctccggccacacaaacggcggcgaattgtgtttctctcaatcaggtctgacggtttctctcctctggtggtggcagtttctcttctctacattcgttataggtaaacacatttagaatcctgtttttgataaattcccttttcgattgaagtttacgaataggactttcgagtaatgaatttttcctctgttgcagatcttttttctaatcgccggcgtcactggtcctaagtcggtttagggtttcgacaattttaactcaatacttttagaaaaatcctctcatttgcatttcagttgcaatggaaatcaaagtgtgatttatttgtattgttgcagattgtttttctcatttgcatcggtggattcagagttaattacacaagtctgtagtaagtgtttgagcctatatcgtctgtattttgttttaagaaaaactcccgccttcgtatgatttttcttttgaatttctgagttgttatgacagatttattcaatttttaatagattggtgacagatttgttatgattttagtttgccaatctcacaaggcatgtaagatcataagttatttgcttatgcaaccttgttttttctgtgattaggaatggcgtcttctagtcatacccgcagttatccgcttcgcttgtatgaagaaggaaaatcaccgttgcaaaaaaggagtatggcccacagctgctatgtttctcaaattgggaagatcaaagacggattaggtgcagatgtgtgggatgagttgaagaaaactacacttggtctttttataaagtttactgaaagtggctttatatgggctgcccagacagttcatttcttcctcaccaatcagttgcgagtcgacaacatacatgagatgtggtgtttgattgatcgcaggccaataagattttctctctacgagtttgagaacataacgggcctcaattgcgatatgtttgacgagtctgacactggtgaaactgattacaaagatttctggaatgaaatgggggtatcaatgtctgttggcccattgtttacagagttggaacgtgtctttgagattagcaagacatggagtttggagaagaggatgatggttggtagattatgtttactatctgtgggagtacatgggattcatcacggttctagagtcccgttgtcgagtgctaaaagagtgcttgatcctgttgcttttgagaagtatccttggggtcgagtggcttttgactctctatcaaggtctgtgaagattgtcaagtatgacggagattcttatgtgattcacggttgtgttcagaccttgctggtgtggatatatgagagtgtgcctggaattggagaagcttgtgggtttagaaaaacaaatctgacgggtgttccgctacttgattggagatcttctagaaaacgttttaacttcaccgctttcattgaaaaggagaaagctgcccacggacaggtatgtaaggttttatagatcaattctgctacttgtctttaaaaaaaactgaaactgattaatcttgtcattatatgtatgtaggtgcgtgtgaggcatatgatccctgtatctgaagaaaacatgtatcctcaatggagtgactcagctgagaatcatgatacggcgcttgacaacttgcttaaagacatcatccacaaccgtttaaaatctcatgcgtggacacatgtggcagcacggcgtaagaggaaacaaaatcaggaatcatcaaacgaggatggtgagagtaaagtgattgaatcaacgcctgcagatgatgtatctcataagaagcaaagaacagggaaagctcatataaaggtcctgcttttaccatttctgagttttccatatacataggtctatatgttgacagtgaattacctaacattgttatatgcttcattataggttgatgaagaggagaagacaagcttgctggatatttggaatatgttggagaaaatgaatgtcacaattagtgacatggacaagaatgcaagcagcagattggttgggttggagaagaaagttgcttgcttagaagcgagtgtaaaaacaaggtttgaagctgtggagactgatatgagagttcttaaagagtctcagccccctgtagtatccaatgaagctgccacatcaaacaacaatgatgaatatgaggcaaatagtaaccaatgtgtaagtagctgtcagtttttaattttactgttggctgttttggatttgaattcaacgtttattataatgaatgtgtactgtgtttttttccagtcttggattgtagaggagaagccaggttctgttgatgggttgcctattcaaagagtggttaagaagactgttaatttggtgaagaacaaggaagctgctacaaaggtccttactaagaaaaaagttgcaaaatatgataagaagaagacaattgtcaatgtagagaaggtagaaaaaccaaaacctgaaatgaagaagacagttgtgaaggtagagaaggtagatagtccaaaacccttgcagaagaagtctgttgcagctccaacaacaaagacgtttgatgatgatgttgtggatgtcactgacaaggttaatgcagacaatctgaaaatggcttcaagttcagaagaaacattctccaatcctacagattagatggctaataaggcaacggctgatgcattgagagcacttcaagaaggactagataatttggacggtatcactagtaagaggagacgagtgccacaactagcgggttctcagaaatatccgtatgtaggaaattcaacagtgaagcgcataatcactgatgtaccatcgtcttcatcggtacctgaacatcttcaacctgtttctgatgaccaatttgataggctgaaggattggctcgaacctgatttgtaagtctctattttttcttcaaatatgaatgctatcattactcattcctttttttttctgcagtgaaaaagaaggcctgaacaccaacaactttaatgcacggttctattggcagataatgactccaagaaacgactggccaacagaaagatatggatggctgaaagactatgtaagtatagcaaattttaaatgtttttgctttcaattgattaaatcatttactgttggttggctgaaactatatgtaactctaataattgttgttctgattataatgcagcacatgggagctgcaatgtcattgtttcgccgaagattcaatcgtgatccgtcaaaatatcccaaccagagaatagcttttttggaccaagatttgatctctacaatgctcaaagactacaaacagtttcaaccagattataggtgcttcaaattcagggagtattatgaggatcaagtcaatggtacagctcactgtgaagcggcgacaaacaagaaatggtttgttgatgtggatcacctatatgcatacctctttgtcaacgggaatcattgggtcgctctggatattgacttgacaaataaacgggtcaatgtttatgatagcatcccgagcttgactacggatacagaaatggcgatacagtgcatgtttgtgatgacaatgattcctgccatgttgagttcatttataccgtcaaagcaacgtaggaggagctactcaaagttggagtggaagaggattacgaagatcccggagaatcttgacccaggtgattgtgctatctactcaataaaatacatcgaatgcttggcgcttggcaagtcctttgatggcttgtgtgatgagaacatgcagtccctacggactaaacttgctgtggagatgtttgaggaaataggcgagaatgctcgaacactacactctaaggttcgtcgcaaggccttcaaattcccaagcctcatggatgagtagaagcttctattaagaaccatgttccattttaagcttcgtattttgttatgtttacaaatgtcatcgactcgtatttatactcaataaaatacatcgaatcaaacgtattaaaatacttgctgacgagctggatgaaccgtggtagagagacgagttggacaaaccgagttgtttgctgaaggtctagacgagctgggcgacgagataggtagaccatgcagtcaatggacgaactgccgctaggcgaggaggtagatgagttttgcagtcgagggatgagctgatagctagacgtggagttggacgagctgactagctgacagctaggcgaggagatggtcgctgagtgatgggaagagcttgaagacgagctgaggagcttgaggacgagccgaggagcttgaagagcttaaaggcgagctgaatagcttgacgaagaggagcgagctaacaagcttcttgggaagggcgagctgacgagctacttgagacggacgagctgacgagctacttgagacgggcggaatcccgcgataatcgcgcatttgcatctcacttctctaacttctgcggtcaagaccttggttgggaagctcttacctcggaccgaatccgagcatctggtaaatgacttcggactcgtcctgacctcgctatctcttcacctcccttttctcctcgtatattttgcaaagctgagatgtctggaccatcgtaccgagctgaaaagaagcgtgagagggaaagagctaatcaagaaaaggccaggatcttgtctgacagggtcgtgatgtcggggacccttgaagacagcaaactccgacaaggatagcgaacttgacagctttaggcgaaatgaagacgagaacgctcatacggtgaagagggccagcagggtgctgaagcggatgaaagacgccgagctacgggtccaggaactcgaggtgaacaatattgacctcatggcgaaactggaagtaggtaaaaatgcctatcttccatcgtcccctttacaaatgtcatcgaatcctatttatactcaatacatcgaatcaaacgtattaaaatacttgctgacttcacgccgcggatctcgcgttattaacgtcgtacgttacgaatcttcaattcgggtctttaatgcgcggtttaagtcgttcttttgattttttggtttatataagcatcaaaaatttgcaaatcagattttttggttttcattgggatacatctgttgattgaatgcattagtgaaagctttgtggacgtttaggagaaggctgcttaatgaattcgttgtattttttttcccttggtttcagacatatgcaatgtaaacagcaaacgggaatcgttgggatttattgtcttagaacagaatcatagaaatgaacataaaaagaaaaaagtcataaaagacattaagccttgcatgtcttacgattgtgtccaatttgcttgcaattgccacaagtgtgttgtcttctaggcttcttcttctccatagcaatctctagtgcagacttaattctcgatttctttggtctacctggttgttgacgagcttccggtggtaaacatatcttcgacacgacattctcgggaacaggtatatcaaagttcctgggcatgatggcattagcataggacttgcataaataattcttctgaaagtaaggatgacacaatgatatccgagaaagttttcgtttttcagcagctgcaagcgcgtgggcacatgggatcttttctaggtcaaacctgcgacaagaacatttcttgtccttcaaattaacaacatgcagagatgctccaaacgtaacttgtacttgatttgcatctatgtcttgcacacttagcaatttagcgtgctctacacgactctacaaagaagacaatgtcattagttagctataatcaccaatatacggacgtgtataaattgtgtttgtattagaaatgaaacctgcaatatcttctctactccacgagtaagatatgtagacaaattcaatgcatcattccttctgtctgaaaaccatctcgtcatcatggatctaatttcttctaacagttgtacaataggaaggcttcttgcgggtgacatgaccttattcattgactccgcaatgttacttgtaagcaagttgtacctatcaccaggaaaatgcacacgagtccacaaacgtacatcagctctttgaaggtaagcatgaagagcaggattcaaagctaaaatctgatcaaatatcctttcaaaatcgactaatctgaaagcgtttgctgccttctttaccaaaccaaatgcatcccgacctttaaagcgaactaatatattcttgtacaagtggtatgtacagattccccggctagacttaggataaactgtcattattgctcttttaatggattggtgcctgtctgaaataatggcgagactttcatcatctggaatcacactgctgagttgtctaaaaaaccattcccatgaggcatcattttcagtatcaacaacggcaaaagcaatcgggtatatctgaaagttaccatcttgagttgttgctgtaagaagtgtccctaagtattttccctgtaaaaaagtaccgtcaacaaccaccactttcctcatgaaagggaatcctaaaatacttgcaccaaacgcaagaaacaagtacttaaatcgctgtgtttcatccacttcaagtcgcgtgaaggttccaggattttccctccctagcatgtacaagtataccggaagttgctcgtaaccactttctggtgtatacctaaccatctctcgggcagatcttagtgtccgataagccttccagtaatccatctaataaaatgtattgactttagtgattagttggttgaaaacaaggtgtaattaataaacaaagaaagccaagaaattggaaatcgtaccttgatttgaaatcgtttagtcaatgcttcggcaacgtgcattgggagaaccttaggtccaattccaccaacgtaattcttatagagcaatccaagtatttcgtgagtagcttgtcgagaacgtgatgagcgtttagtaacagaacatgtatgttccgaaacatacactctcacctgaaactttggatactcgtcaactggtgttgctcgcactctccatcgacatcccttaatccaacactttacaaaatataatgtaggagtcgatttcgaaacatcaaaatcaaatttctctaacacagtaagtatcttcaaacgtgtctccaagtgatctttcgtttcaaaacattgaccaacggccaatcccaatgacgatagttctaaggtctcgtatgtagcatctcctttatcttcttctacgtatacacttaaactcatcttcttgcttgatacgttcgttttatcttcttcttctggtggaatcccatagaggctaaagttctcatcatcagaatctgttccgtcggaatcatcacagtaatcaaatctactcccgtcatcttcaccatcttcaactgcttcagatttttttctttcaacaacgctatcagtatgagtgaatacgtcaacgttttcaacgttttcttcgacaataccgtatacatcaactgcttttgtcttcggcaagtcgctgctacctaaatcatcaatgatttcctcttcatattcatctagaactttctcttttaattcaacacaaagtcgaacagtatcattcttcgtttgccccaaataagactgaaactgtctattattaccaatgagtacaggtggagtatctgctggtaattgctttgatttcgggatcttgtaactcaaaataacttcaaatacactcttctcgatattgtaatcctcatacaccatttggatgaaatcatcataactggtttgactattaccttcaagtacacgacaaccttttgtactatcaaccacaaaaatccatctcgttttctcatatacccatttaccacacacgagaattacttgatccataccaaagagagaatcgataaacaagggaatcgaatttgtgtcaaagatgaagcaactaagatctcgaataggtagaagaataatggattgtattgaaattagatttggtaggcgttacagaagaaaaaagaaaacgacaatggcagtttttttcattggaaaccctaggcgttacgagaatattccttgactcaaatatggtaatatttcggaaaaatctgtcgcctaataaaagtctgtcataacgttttcaaaaaaaaaaaaaaaaaatcaagtcaaaccggatttaacatacaatcaaaccggaaataatttaattgagggctagctaataaatctcatataacaaaaaatttcgaaattttaaaaataaatctgccaaaaaaagtctgttattactaaaaaggttattctagtcataaacaaatcggccataacattgacatgagtaaatctgttatgttttgacactgaaaaaaaaaactgtcatcactaaaaacaaatctgttatcactatgtgactgtgtagtaattttattttttaacaaaaatctgttgtaaaacaccagatttgttaacaagttaattaaatctgtgattacacaaaacaactctgtcatgcctatataacatttttcgaggttaacaaatctgttataacacaacagatttttgggtgcaaatagaaaatctgttgccgccataaagaaaaatctgtggtccgaaaaacaaatcagtgacagatttggtttcaacattcttacttttgaaatttaaataaaatctgtggagactatatgaaacaaattagtcacggttaaaaaatctgcgaaaaaaaaaaaatctggcgtaacataacacaggaaagtctggggtacaaaacaagtctgttgtaaaaaatctgtggttgaccaacaaatctgtgatcgataacaaatccgtcgcaacaagagccacagatttatcaaaaacgacgatggcattttcgtaaataaatgtggttttattgccttgctggaattaaatagtaatggcatttctgtaatattgtttttctctgcaaaggaaaacaaggataatttaggtataattattactcaaataactcatatttttagcattccttttgggtctttatgtataaaatatgggttactctattaaatttcccttatttttaactgagaaaatcaatcatgagaatcaaatctcatctttgtttgatcctcattttttagaaagagacaattagatgcatagacatatttttgaaaagaattaagaaacaagcaaataggttttgaattttgcagaacaagcgagagaagatgctacactttattattcacaaaaataacttatttagttaaacccaattattccgtatttagctgatatcaactactttggacttcaaatatgttcttgatatttgactgagaaaccatgaagccaaatttgtaacattctataagaaatgtaaagaaataataaaataaaataaaaaattaaagaaagtgtctctttaacctattgaagtctatctccaatcacatttggcttcacttcaatcccatatttcccacaattcaagagatcatacccacttttggagttcaaatcaaaatgcacaaacccggattctggtttaacacatgcatctccggtttctattttctcttgttctccacataaccgaaactcttgagaggaatcaccaccattaaggtgtgagatatcagtaaccaaacccgccttctcgttcttacgatcacttcctacaagtcccgaaagtgcgagattgaaatccgagaattgacccttgtctgtttcccctgcattaccacaaggtaagctcttctgtgctttctctagtaatgtcaacaaatattttccttgtgcctccattctcatctgcagttttttctgcacctataacaccgcaaaaacttcggtttaaaacttttattcattgttgtgagagaagaaagaagagatttgttacctcgagttgttcttgaaaccgttgttgcgcatcgacctgatgtctcattgcctcagcaaaaggtacattcccgctttgtctacgtgtgttcattaacattatgtcaaactcaagctttacaaatccattatgtcgagagaaggcaaattcatatataatatacctttgatggttatcaaatcttgaatcattggagattcctccttgagaacaattgtcgaaatgcacatatgaacttcctgtgaatacaaaaatcaatcaatctttggtttctcaaatgttatctacattaatattccttaaatacatcatatgtatatatatattatactctactataagctgaattatatataaatcttgaattcttgataataatcatacataccagcattttctttgttttgttctgttctattttgttttttgccttgttgttgaccaagtctatacttctgcatatagaaacacatcataagagagaatataaaccaacaatttgtagacattatacattattatatactcaaatttgtataaatttggacctgtaaatggctcttgagatggtacagtgttaaaccttttaatcccatcagcttcagaaccgatttaggagttgcttctacaaaaccaaaccaataacaaatgtcactaagcaaacagatataattacatttgtaacctattaaatttgaagttatcaagctacatagagaagaatcaattgaatcactggcattaacttaaccaaccaaaccgaagtgaaccggaatcataatgtgaaaccggttatctcaattgaagaataagaaagagtaaaagagctataatgttgttacacagatacatcaactgtagatttaaccggactgaaccggaattataaagtgaaaccggttatcacaattgaagaagaggaggaaagaggagcttactgtcagcgccaccgagcttagcgacggcgtcgacgaagcgatcatgaagatcggctgtccatctgagcctaggtttgggatctctagtcatcataactccgccattatcgtaacctaaacctccgagattcactctttccatttaattttccgatcaaacaaaataatggcgggaaactcagtcggaagaatgaatcaaataacttcgaaattttcctcttctcaaggatgtgatcggaaagaggaagcgtaaactcaaaaaaaggaaaaatggcaatcgaactacgaaatattggtcggaaagaaagtggaagaaattttgttaaagatgggaatgcgagtgattagggtaaagagataatcggcgacgagaggacgagataaatagaaagaagtgtgatgattgatggagaaaaagagatcagaaaactttttgaggaaaatctcagagagagagaaagggaacttaaaaaagtcgtcgcggtgatgatgatgatggaggaggagaagtggtgacattattcgtgacttaacgtcaaccttcggttaatatagtattattataatatatgtataatacaaattatggatccaacactaaaagtttgtttatatacaaaaacaaattgtatccatatcgaaatattatgataataaaaaagaaaatagtaattattaacgttttttatatcgattttgtgaatagtatgaaagcaaaacatagcaaaattttattgtattatgactgattagtgatttattgcatacaaacgcaattaccaaccgcatattacttgcgtttttaattgtgtctatgagatgctagaccgtgtatatgtcatgttgtagaataaaatatatacatgattgcgtacttttttttttctttttgtaatcaatcaagaggtatttgtatattcagaatcgtaacatgggagagaggaacatggcccgcatcatggatatttgtttactatacctagattattaatgtccaaagaatatatagtttctaggaattatcatttttatcatttgaataatttatatgttagatttatgtgtttttaaatcagataacttatgactaaaggttttgtctcattctcatacaatccatgaatcaaaatctctctccatgttgttcctttatttaggtatcatataaatttatcattcatatgttgtcggatagtctcaatttgagatagaagaagaaaataaacatagaaaatgtttcgaccaaattactaaattagtaatttgttattacacattccacattacacataaatcaattccgaataatcaaataaaatgaaattcattttttttttgataaaagatttgatgaaattcattgttgtattgtgaccttttaaaaattgttttaaaaaaaaaacaaatcgttgtattcggcgacgatcaatacatgatgagtgatgagcggtgtcaaattccgacaagagcgacataaaacctttttttgtatttttttaaaaacaataacaataataattcaatggttttaaaaaggaatttatatgacgaaaacaaagtgcatggggcgagcatgtcacgtagactgccagcgtggaatattcgccgtcggacaaggaaaatacaataatctgaaactcacatgttcgacggtgggggtttaatggtatttcaacataggacacgtggacggctttgttactcttttgtcttttacgtttgttgaaattgagacccacaagaaatacacacgtggaaccaaggccgcttcgttcgaccgcaatcgttttgtcctaaccaaacatgagaatgggtgtatttttcaatccaaagctcggtttacaccggtacaatctgactaaaccgaaatatcatataaccggaccgactcgggaaacaaagtttcttctggtttagctggaaaatgtacttgagaaaaaatcataagcctaacttgtttctcttttcaaaaccgatcagtcttaacgccaatttcaccatatttcgaaaactcaatttattccaatgaagttaaactgaaacataaagattttttgagtaccagtgagcaaaattatctggtaaaaactggaagagactggctttcatcgtaatcatactgtttcatgctctatctctcaattgcagaaattgagtttcttcatgactttcgcatatgctggtggtactagtccaggttgtctcaatctacgcttcgatttctttgactgcatcaattaacaaaacaaattctttacactcaacatttctcaacctgactcagaaatcttacacaatgatgaaaccccgaagaggtccaacaacagagatggtattgtaaaatacaactttgcctaccatttgtccatttagctaaacaaggaaacacctaaagactcgaagttcaaaactagttctatccaaatttaagttcactatcaccagaatcagctgttgggcaattttcgatcagttctatccctaggtattatcatactgttcctctagaggcgtaggccaaagaatgaataaaattttctatcatcgatatgaggaataaggtgttgttaccttcaaatgtgcgttgtggcgcttgccttctttccagcgacggatggtaccatcatttagtggtttaaacctgtctttgaatgacctgagatatagattcaacacaaaaaaaaattgttgagagagacgcccaaactattactaacaagatttgttgataatctgggaatcagaagtttcagcacgtacgaataaaacttaatcttgactttcttgacttttgatgtgattggagtcctaggtctccacttcttcttccattttgccattttttccttagaagtgatatttcgtacttgaacaaactgaaggcagagagaatcaaacgtacataagataagcaatcagatataaatcaatgttggtacttcgtagtgatgatactcaagcacaccgcctttatcatctggcttaacgaacatgatatcaaaatgcaagagctactatgaacaaataattctattttcggaaaacacgcaatcaaagccatgacgattcttctttcctatgatcaaacaaggggcacaaaattcaagaaccgtacacaataaatccgaatgttaagattccaaagaaaacatgtatgtatcttatgagattgagtaagctctttttttttttttaacaaaagagatttagtaggttaaaacttgcaacgtagtgatatatgcaagcactgacttgtatcagttggattcaaaacaaagtgcaagtaagcttattaacattctttgaattagtatttagtaatccatgttgttgattttgtttcaacagaacatatagaaaattcagaagaagctaaaactatataccaattcaaactatctagctcgtcactcgtcagatcttgtcctcctaagatttgtctcaatcagcagatatatataaagcaattgaagctaaattctggaaacttacgtgatgaggaacaaaggtagtgcccatggagctaacattcgacggaaaaactccggcggcgggaacgaagctccatttggtggaattggcaaaacctagggttgttgttgttaagtgacgactcggagaaggagaatggtgaatgagacggtgaggagaagcaccgtaaaaagagagattccgattagattggagagaaatggaacgtagcttagtgcaaaacctctgcattgtcgtctccaaggggaagaacaattttctgattgaaatgcgaattttataaaagagaagaagtgtgtgtgacaaagctttggggtttttgggaaatgattttgagtgtttggttattaggataactctattcttttttactctttttttttcttgtcatcattctcttttactttgataatggtaaaatgtctttgggaaaaaagccaaaaaaataccaaactaatttgttttttttttgtaggcgaaggggacaacgagtccccttcaaaatattattataaaattaaaccaaattacaaacaaatacgccgtgaatacgagatcccacgatagtcttcatcaaaaaaagatgagatacaatccgaacaagaatctagtaaatgcaaccctaaaaggcataaaaatgcataattagccaaaccatccgcaaagtgattcgcctccctatacacatgagacaattggaccaaccaatcctttgataaaaagccatagcacaagcgtgctaggaacgacaagggatgagtatcgcatatccccgtcttaagaaaccccgcaaccatcttcgaatcaacttccaactttaaccgagtaatcttgttctcccatgcataataaagcccatagtagaacccccaaagttctgctaaaggagccgtacatacccctatattaaaagcaaaaccttggacccagttccccaccgcatctctaatgaccccaccagccgtggctaaacccgggttacctcttgaggctccatccgtgttaagtttgaaccatccttcatccggtcttgaccaagcaatctgacgctccactctaaccctcttaatctgacctccattcgcaagacaatgtgcttgatacacatcttttgatatctctttcacaaactgggtacgatcacggcacttcctattctcaccaaaaacgttcccgcatctccactttcacgcccatcacattgccatactgaacactgtcccccacggtatcccctctctaaccacctgacttcccacgtttccataaatccactctagtaatgtttgagtgtaaaaaggtctctggagagtaggtggaacaatacggttccatatccccatcatcgccggacaatccctgagaatatggagaatagtttcatctccactcttgcaaacttggcaaatagctgtatcacataagtgtcttctctgtctctcagtgttagtcataataacctgatgaacaactagccaaagaaaaactcgcactctttccggtgtccgttaacagctgggtttgacaccgttaaaatttgacaccgttagatgattccgtaaaatttaacgccgttaaatgattctgtaacgtccgttaacggttgagtttgattccactaataatttatatctgagatattttgtgattacaaataattaaatgaggtatttttactctaatttaaaaatattgggtattaaacttttaaattaaaattagtttttttttttttttttccaaatgtttttatattctagtgtttatgcttattagctacgtagacaaattttgatacatttgggcctgtgtagctaaataaattgggcctttcacatgagtagataaaactaataaacctaaaagaaatcgtcttgttgaattcgccgtttggatctggctccattggaaaaaaaaactagaagcagatctgttgaagttaagccgagattcatcaattcgtgttatttgtctctcttgataagcaaaaaacatcgtacgaagaagaagaagatgaccttaattttttctgaatgaaatcttaaaattcccagaaagaagaatgacgaacagctcgtcatcgaagaaacaagctcaagatcagccagaaactagcgaacccactctcaaatctctcaaaaccaagatgactaaatccgacgaaaaggtccgtctttttctttcttcaatcgaactcaaaagagcaagtccacttattttgttctgtaacctcttcaataaattggtcatcatcaccaacttaaaaaaaatctctcctttttttgggttaaacagcagaagaagcttaaagacattgaaataagcgttccaattgtgtatggtaatgtagcattctggcttggcaagaaggctagtgagtaagtatacttttttggaaattgaacttcttttgtgaagcaaagttcttattttcatcacaaaagttttaaattttccatttttacaataccgttaaaataatggagagacagtttaggttattggttgttgttagtgttttagttcttttggataatgacgagaagttcttataggaatgttggaaaaggttatattttgacaatacccttaataagagagacagtttacataaatatccattaagttttattggtttgttgctagcgacttagagttttagttcttataagaaacttaggaaggttatattttgacaatacccttaaagaagaaaagtgttttgtgttcataagatttcacttaaatttgcaggtatcaatctcacaagtgggcagtatatgttcgaggggcaacaaatgaagatatcagtgttgtagtaaagaaagttgtatttcagcttcattctagtttcaatagcccgactagagttatcgaggagcctccattcgaggtatcggaatctggttggggagaattcgagattgcaatgacattgcatttccacagtgatgtctgtgataagccattgagtttgtaagtccctttcaatagcattgttgttaagtaggaaaatgccagcaattggaagagttacttatgagttatttgttgttttgggtggatacaacagatatcatcatttaaagctataccctgaagatgaatcaggtcctttgacaatgaagaagcctgtggttgtggaatcttatgacgagattgtctttcctgatccttcagaaagttttttagctagggttcagaatcatccggctttgacctttccaagattaccctctggttacaacttgcctgctcctagtatgatctccttatctaaagcttttttcattccttagtttaagttgatcattgccttaaaatgtcgtctcacacaacaaatcttatgactagtgcaagtcgaagataccgggaaaaagaagagaggtgatacgaaagatcatagtttgggacaatggttcatgagtttctctgaagcagatgagttattacagcttgcagctgctcgtcaacaggtaactttaaaacatttaactgtgttttctaaatttttgatactcagtttagactatttttgttggtctatgttttgatgaatttggattggttctttgttggataggttcaagctcatattgcgaaactgaggcgacaaataagtttgctagagggacagaatcagaccgttaaaacaggatcagacctgtgaatctgattctgtagccatcatcttccattgagcgggagattggcatgttgtaactgtattagcatagatttccatttttcttgtattaataaacacaaataaagattagtgtcaagttcttatcataggctctctcctctgttccagtttcatagactgcaactgcaaaataactcttccagattagataaagaatgctttccaaaatcctcgagatttcgtaccattcttataacaaggtctctaaacaaagaacaaaacttaggattatccacattgtatgaaaaaatgtgaaacaagagggcataactgaaataataaggaatatagagggggcaaaatgagctggtggatgatccttcatcggattcaattatctcatctcatgaagagctaatccgcaggaagattctttccagattctattgcagcaccttcacaaggtttaactcccgtctatggaagctgttgatgcagtgccaagagcaatcttccaaacatcacctctcacaagttgaaccacatcgtatttagccacggttgcactaaccaaacgatagaacggcattaagtttgaacatctgaagcaacattaaacacaatcaacataataaatacaagtcaacaagcttttaaatatcagtgtttcatctcgggacgccactgtttatttcagtgtttatttcatctcagtattaagttagaatattagtgtttgggttatcgcttgtgcttcccttatgctatttgtacttttgtttgtagattgtcacttttctttagcttttagtacatctttgtgtcttctgtccaaaatttcgaaaatgttacatatacttaacattgatacaaaaaaagaaaaaacaagcttgttaatatcacttaacactccattgcgaagatatgaactttcaaaagtggaacaattacttattaaaaactgttgttttatcaaatctcactttaaggaaaaacaaagatttgcaagaacagatactgaaaaactcttacttgcattgaattcagattagtcaataaatagactttacaaagaaagcaactgaagctacgaaactctcgcaactaaactaatgtcacgattctttctcctacaaaggtggagacttattcaaaactagaaaaaccaataaagttgcagaaccaacacaaagatgcaggcccaaatccaaaccgattgggctttattcttcaatccctcccttaaaccgaaaacacacttttcggtttattcttctcttcttcttactcccattcttccccgaagctcttcaaacacttcacgtttcacagccttagtcatgatgtctgcaacttggtctgtagtagtacaatagtcaagtctaatagttccttccttcaccaactctctgagaaaatgatacctcacatgaatgtgcttacttcttccatgtagtacaggattctttgacaactttatggtggagctgttatcacagaacacaagtgtgcctccttcttgtctgcagccaatctcctccaaaacgtttctgagccataccgcttgacacgcaccataagaagctgacacaaactctgcttccgttgttgataatgtcacaattggttgcttcttagatgcccaagctatagctcctccacctaacatgaacacataaccagaggtgctctttctgtcatcgacgtcaccggcataatcactatcaacgaagccaaccaactctgtagcaccaccacgttcatattgaatcccgagatccaacgtaccttgaacgtacctcaagattctcttcacagccaacaagtgttgctcatttggactttccatgtacctactaactagatttacagagaaaatcaagtctggtcgagtggtggttaggtaccttaagctcccaatgagttgcttaaactcagttggatcaacagcatcaccagctccagcttttgttaacttctgtccgggcacaattggattcttgactgaattacatccctccattccatacttcttaatgatttctgcagcatactttctttggttgatgaaaatacctctttcatcttgtatgacctcaactcccaagaagtacttcatctttccaagatcagtcatagcaaattcctccatcatagaatttttaaacccttcaatcatctccatcgagcttcctgtgtaaataagatcatccacatacacacttaccaccaagaagtcacttctctctttcttcacgaacagtgtatgttcacagtagcacttttcgaacccttctttaccaaagaattcttctatacggctgtaccaagctcttggagcttgttttaggccatataaggccttcttcaatttgtacaccttgctggattcttcttccacttcgaatcccttaggctgctcaacaaacacatcttcctttaggtctccatgcaaaaacgcacttttcacatctagttgaaaaacactccatcctttctctgcagctaagccaagaatcaatctgatagtatcccacttagctactggtgcaaatacctcatagaaatccactccatatctctgatgatagccctttgcaaccagtcttgctttaaacttatcaacttctcctttctcattgaatttagtcttgaaaatccacttcagcccaatcacctttgcttcttcaggtaattcaactaactcccatgtgttattctcttctatggaggttatctctgcttccatcgcctttctccacacctctaattgagccgcttcttcaaagcaaaccggatcacctggtccaatgaacaacgcaagaacttcatcttcttcatcttgtgttatgagcacccgggcgtttccaacaacataatctttcatccaaactggttgttgtctctgtctaacacctcctgttccaacagccgggagattttgatgaaccgtttctgctaccgtttcttcttcttcttctgtttcctcttgatcttgttgcccgttgtggtttatttctggaccctcttctcctgcaggttcatgatcagaattgtcccacacaagttcttcctccagcgacttatcttcccattcccagcctctttcttcgtcaaactgaacatcccgactaatcaatatttttcctgttgcagggtcatagagacgataggctttggattccttgcttacaccgaacatcacacatttgatgcttttctcatcaagcttgattcttttctggtacgggacaagagcatatgctaggctgccaaatattcttagatgctcaactgatggtttccagctactccacttctcttccggagttatgtcatttaaagcctttgacggactccgattcagtatatacactgcatactgaacagcttcaggccagaactttcttggcactgacatctccattaacatacaccgcgtcatgttcatcacgctccgattctttctttctgcgaccccgttttgttgtggcgtatatgctgcggtgagttgtctcttgattccaaattccttgcagtactcgtcaaactccctcgaattatattctcctcctctgtctgaccgcaaacataccaatttttttcctgattctctttcgacttcagccttaaattccttgaagaactgaaatgtttctgacttctccgacaacaaataagtccaacacttccggctaaagtcatctataaagttcaaaatgtaccttttcccactggttgatgcaggatttatcggtccacaaatgtctgtgtgaacaagctgcagaacctgagttgatttccacgcactctcctttggaattgactctcggatttgcttaccctttaagcatatatcgcaaactgcttcttcttctccaagatcaaactttggtaagccttttaccatctctttttcagctagcgatctcaagccttgatggttgagatgtccaaatctcttgtgccacatattgttagctttgccgatcacttgaaggcatcttgtttcttcagtctcctttgactttttcacagctgcaaaaaccacaaacatgcgattttttgtcatcgttgagtgcatcaccattctcttctctgttttgtgccacacttcacacacatcaccttcaatgatgaatcttaaccctttttgttgtagttgacccacgctaaagaggttattcttcaaccctggcacaaagtacacatctgagatcacttgaattcttccatcaacttcaagtctcagctttccctttccttctaccgccattcttcgatcatctcctagtctcacgttctgcttaaaaccactatccaactcgaggaaccactctcttgtaccgcacatgtggttactgcatcccgagtccaagaaccaaatttgtttctcttcatcaccaatctgttctacatgagccatgagaagcagatcttcctccatctcaacataattcgcttctttctcccaacttggacactccgccttgtaatgtcccatcttgtggcacttgaaacactctaccgtgtctctgttcacatagccacgccctcttccttggtaaccccctctacctcttcctcggcttggacttcctcctctgcctcttcctccatccggtctccattgagtttcagcttttaacactctctcttccacatcatgtctactcaagttctgctcatgcaccattaaagaactttgaagcccatccaccgtaagctccttgatgttgttagactcttctatagcacacacaacgtatgtgaatttttcgaccaatgttctcagaattttctccactactttggagtctggcatgtcttctcccagattccgcatatcattagtgatttccatcactcttgagaagtaacccgtgattgtttctccaatcttcatctcaagaacttcaaagcttctccgtaacctctgcagttgagcgctttgaaccctatcattcccttgatatttccttttcattgactcccacaagtccttcgacgtctccttctgcagaatcgtcttgagaatcgtcttatctattgatgcaaatagatagttcttcactttgtggtccttcaccgtcttctccgccaactctgttctttgcgctccggtgaggatcacgtttctctccggccttggaattcccgtctcaatgatatcccaccactcctttgatcttatcagattctccatgagcatagcccaatgctcataatcaccatcgaattttggtatgatcaccgactccttttcactcatggtgtttctcttttgtaccaagctcgtgacaagctctgataccactgttgttttatcaaatctcactttaaggaaaaacaaagatttgcaagaacagatactgaaaaactcttacttgcattgaattcagattagtcaataaatagactttacaaagaaagcaactgaagctacgaaactctcgcaactaaactaatgtcacgattctttctcctacaaaggtggagacttattcaaaactagaaaaaccaataaagttgcagaaccaacacaaagatgcaggcccaaatccaaaccgattgggctttattcttcaaaaaccataaggaacattagcaaacttaataacctacctggtggaacctgcagattaattggtaacaacttgtcttgtgggaaggttgttaaagggtgaggtcttgagttcgaggaacgtcaagcgcaccaataacctacatgtggggcaaaagggcccataagagagaagttagggttgatgcgctgcagctctaactgggtctacgagtgagttgttacaaatttgttaattcaagaggtattttcccgacaaattcagcggaaatgtatttaaaatgtggcaaaagaagatgtttttctatcttacagtgcttaagctgagccaatacacacgtgagaataaacctattctcctagcagataacactgaccctcgtgcgcttgggagcatccacgttgagaatatggtgatttctacatccaaagtcgcctttccgatatgctgaacaatatgtatcataatgtcaagacttagaaggagttgtgggattctcttgacaagaaagtatcgcaccgaagaagctggatctcaaaaataagcggtggactcacgactattgatggagaaaattgaggagttgactaatcccctccatgagatacatgctgaagggaggagactatcaagtcactttttttaattgaaaatttcgttatggctggaccaactccaaaactatttcaagtttgaagcaaaagtggatgagttttcaagactc

SEQ ID NO: 839 - DNA, 86722 bp, Arabidopsis thaliana
gatctttaggctccttgttgagtcaacgaaccggagacaaataggagttggtgtacaaattcgcaaatttaactcgaatatgagcatcaaacccaaaaacaaggaaaatggcaaacaagggatagactcctatttgttttccttgtttgccattttccttgttttttggacccaaattttagtcatttttgcttcccaacaacctatctagtatctatacttcaacttgtaaaaatcaccattttatgaatttaagacagaacataacccaaccagctccaaatagaaaaattagtaatcatttactcaaaaatgtaataatattagcgtgttaatctgaagacagcttctcatctactatgctccttcaatcaaaattagcagttatttacgctcaaaaaagagaactgaatgaactcaacaacaccgataatgtatgtgttcatatagtattgtcacctaagaaggcgaaaacccgtttcttgaaaatgcgggctaaatccatgatttcggtattcctcattctctcaacactgctttcaggttttccaagtaagtttcttttacgggataatcttgtggctgcatcaaccgttagactcgccatgtctctgctcgttgttagttcctttagaatagtagcagagcttgacaagccagagacaagtctgtttagtaatatcaatatctctctcatcaatagtgttctgcgccagtaaaacaaatagatttttgtaagtcactagattaaattttctatttgtaaatcacctcggtgtagaataaaccttgctttgaagatttccgcttttggatgaaattctgttgattccgagtctatttcagcaactaaaagatgaagtatcagcattaagaagctgctgtcttgaggtagcttgtgacttgagagtagttcatagccagagtttcctgaagaagctgctagagccaagatcattattacattcctacacagttccagatcctgaaaatcaaataaaccgaaagctgtgttaaataatccaattgcagtacactacttaacacgagggttttttttccggttttttaattacctctgatgtctttctgggagaagtcaaacaatctgctaagccttcaaagatcttaccaaatgcttccaaagcaaagaaatttccttcactatcgttttcagtatcagaggagttcttttcctcatggagagaatcaaatgtatcgtatagtttaggacctttgaaccgaaaataaagaatatattagagaagaaagaaacgcaactttggcgaagatggcttcatcataaaaccaagaaatatgatcttcaagtaagtacttacagttgagtagcaagtaaaaaagatgaatagcttctttccgtacatgtaagccaccttcttttcttaaaagtaatgaaatgctttcaaacacttccttggagacaaaactggccaatgaaaagaatttaacgttatatgaatgcagatgttcatatgaacagacaaagaaaacggttttgagtgcttacctttctctagcagtataagcatcggtgctcatcacgattatgttcattatcgacaatgcttcctgtttcacatcctgttcggttcttttactagcaatttgattcatcaatttaaacagagaatgccagtttgcatcccaactaataagggatcatgaaaaaaaaaatcattacaatgatgatttatggttaatgtaagaatttagagtaaagaaatattggagaaagttagagaactaatcccagatagagagagtagatacctggcttcaaatctcttttcatcaccacatatatgttccaacagcacatgtagtacacgcagagatctatgaacaagaacggcctgcacaacagatgaattaatcaagtcacaaaaaaagaggagaaatataaaaaacatccagaaagctacaacttgcagataaagctttgaatctcaatccgacttacagtttccgctttacaaagatcaagtagtggttcaaccaaggtcttcaaatttacaaacccatagctgatcttcagaagacataggcggttcaattagatagtctgaccaataacttatacatcgacaagtatagtgtttgaactaaaagccacacctttgttactgcagagtataattgatacactttctcagattctaaggctttagaagattgtctatctgacgaggttttggcttcctgtttgttaagttcttgaggaggcgtactgattttcataaaactaaagagaatctggagatctgttgaacaagccagtagcaactctgagattagatttttcctcggatcttgataatttgaggtgcgccagatgtctagcagtttctttgaaaggtcagaatgattggccacatcagcctgaacaccagtggtcttgaagcctgacttaagccaaagcaaaaaataatgaatagacaaccaagaaattttgaacaaaataaaactttcaaaagcgtcaaactaattattgccaatatcaacattcacgtacttcttttatcatctaacgccatcctagagtcgttttctcgatgatttactgaagaagttgcgacatctggttccctgtttcacaagacttcttaattagaccacagttggtgatttgcaacagataaggaaagtgcacgtaagctaatgaacggtaaattcaaattctccaaacaggagataaaaagtgtgggtaaccgcttgcaccacagttactcaacattacaaagagtttcaccttccagcattgcgattcactaattaaatttggtaaaattgataagaatgcaaaatcctgcaaatggttgaaccctatcatgatatattctacaaaactagatacatacttaaaggctgctaactaagaattagatccaagtacatcaaaaacaatctaaagatccaatttagatgcgtcatttcgcctaacaagaagagaacaacattcactcacaagtctatcctcttagaagcatgaaccgtagaacattgccctctattatcatcagcacacaagtttctagactctgtttctttgcttttccccttcttaagctgagaacattcttgctcctggaacaatcaaagataatttcaacactatatatacatgaaaatggaaactccaatgaactaaaaaactcaaagatatgaatataccacatccagcaattgcttcgagacacgttccagctccttctgtttaatcaaataccacaaagaacaatatgagaaactacatctttgtgatcacagagaacgcaataataaaacgaaaccctaacctttaagcgatcaatttcgagatctttctcactatcacagcgacgattcgaagtagtcggagagataggtttagcagcagtaacaacagtagagttagagtaatccattaacgcgtcattgaaaccgcttactactctttgagagagttctctcggcggagaatagcttaagaaaggatcaggaacttgaatttgtttccgttgttgtcccgctgaggattgtaactgcatagggtgagataaagacgatgaaatcttcgtcgatggcggaggagccggtagaaacgttggaagatacggaggaggtagggggcgatacatatcggcttttttcagggtggtttcgattgaatcgatggcgaggagaaattcgtcgttaaattcttcatcatttccactcattctctttctctctatcgctcgaatgactgatagcgagtgagtgggaaaagaggcgaaatcgaaatacccatttagtgagcagtacgcctgacacgaattcggatatccggaacaattgtgatatttgttattcgattggttttaacggaatatctgattttgtgatttactttaattcaaaaaaatttggatatctgaatttttatgtgatattttcgaatatccattttgatactgacatattgtacatgtaaatattaaacaagactgtaaactatataacaatatcagatattcaaatttttcatttaacatgctttcaaaataaattttaaatagcaaacataaccgttgttgttatcaccggtcatcaagttgttgttatcaccggttatcaaaatgttatctaattaattccaaaacataacctaatagattaaattgtcattgatcaaaacataacataaaagaaaaatgagcaaataaacatcttaacatgaaaacataaggtaacaacaatatacaaactatttatgatatctatatttacggatccatcgtaaataatcatctttcgctttaaagtttttgatggagcagtcggtaaaacttaggatccaaaaaactttttgtactattactattatttatggttaaaattctctttttcttattaacttgatttctttatgtgttttatattatttttataaataattgaaaatcatttttaaaatttgcaatattttattaatattgtaaaataccgtcataataaaaattattatggtaaaccataaataagattatttagtaatcaaatgacattgatctaatatttatatttttcttttctgaaaaaaactttctggttcgtttctgttccggttttcaaaactctgtccggtcatgtggaatgctaaattacaaatccaccttattataatttaaattacataaataccccttaaaactcacatatttatactttggtcccggtagttctcttttctttttaaattaaaggattatctgcttagcaaaaaagaagaagagaaaaggcaatgttttgaaacccgacccggacgatgaaccggactaccttctgggtcaccgggtcaccgggtcaaccgggttggaccacgggttaattagttaaaatttatttaataaatttaatattaatagaaaatttagagtattttataataaaaaaatttgtagtatttataaatataaaacaaaaataatcatatcatatttaatcaaatataaaattatattatatttaacaaaatataaaatcatttacacccaaatatatatatatatatatagaaaaaatcaaacaataataataaagtggttaaaaatttgaaatccaataaatgtctaacaccgtaacaaatatattaggagatcatcaatgacataaataaattaataaaacatcgtgaattaaaacaactaatctcggttgtctctctcaccattcgattcaattttaaggcggtattgtaaagtcttcaacaaaatctaaaacatcaaatgaatttaagaactgaaaaaacttctaaaaataattgaataaagtctaaaatcccatattttattgtaaaatcaagagaactttttaaaacccacacccggccggttcaaccggttcaccgggtcacgggttaattgcgagtttttgtgggttttttcggttttgaacttgttgggttttagcactaaacccaaaccggaaaagtgttcgggttacgggttaaccggtcggaccggacggttcgggtcgggcgtgaaaacactgagaaaagggttttttaggattctttaaacgcagagctgagctgagttacataagatcgagagaattcgcaaactcgtttcttcattcgtcttcgtctttcgccatggctgctctacaatacttggaatctctgaaaaatacgcatccagagctcggcgaatggtacaattcccttgcagatctgtatcagaaaaagctctggcatcaactcacccttaagctcgaacagttcatcgctctcgctgtctttcaggtacttttgcttctcctccgtaatactaattggtttcaatatctatctaggtttagtagtggtccttgtggattttagggttcatagatctcgacaaatatcgtagaatctgtgtttttacttccgaataacacgagttagagatccgtttggaagatgatagggttttctcggattaagttcttcgaagaaagttaggttttagggtttatagatcaattttgattgcttccaagtttttgtgtctgatcttaacctgtgtcattgttataatataattttttttcatttcaggctggtgatgctttgattcagttctatcacaatttcatcactgactttgagacgaagatcaatcttctgaagcttgcgcattttgctgtggtggtctctcgacagtactctgagaaagaagctgcagttagctatcttgaaagcgtgattgagaaacttagagctactaaagagcctaggattactgaaccaatcatttatattgaaacacaaaaagctttattcaagcttgagcaaggtgatcagaaggagtgcaaaaaaatcttggacgatggaaagagctctcttgatagtatgactgacattgatccatcagtctatgccaacttctattgggtgtcttctcagtaccataagtgccgtcaagaattttctgatttctacaaaagtgctctgctttatcttgcatacacgtctgtggaggacctttcagaatcgtttaagctggtatgcccctgtaatattatgtaccttgttcttatattttgttcttatgttaagtttcctgttagcgatagtggataagagtattcagaaatttgatgaaatttagaggaaactgaagaaaaaagttgcgtactagttagcttccctagagtcaccgatcaaattttgctaatgtcagatcatatctgtgtctttcaggatttggctttcgatttgtcactatcagctctacttggggagaacatctataactttggggaactgttagcccatcccattgtaagttttccttcatcctcgacataaactactgttatattttcttgtgtagataaaaggcttcttgttgatctttaattgcttggatttacgatagatactgtttgtgagttgagacggcttctaactctcatgttatagttttgcttagaattgtagatggttctcttacatgtagcatttctctgatgacagttgaaaagtctccttggaacaaatgtggaatggctctaccacattctacaggcattcaaccatggtgatttagttcagtatcaagaactatgccgtgtgcacaacgcatccttgattgctcaaccagcacttgttgagaacgagaagaagcttttggaaaagatcaacattctctgccttatcgagatcatcttcaggtaaacttttctctaggcaattgtacctcacgccgtttcaatcaaagaaataaaatcatgtgctaatacatttgattttaaactctacatcagccgacccgctgaagatagaaccattcctttgagcatcatcgctgagcgtactaaactttccattgaagatgttgagcaccttctcatgaagagcctttctgtaagtattagtatctccttgcatttttctctcttgtgttcttttagtacccaaaaaactctgcagcttccgggttaaaatctgttgtggtgaccaaggaaagagtttgtctgagtgaccaacataatgatactgaactacctgtcatctgattaagaacaacatagtaaacatcaccatacgcattgtatctctaggtttatgtatttgcagttgtcgtcttattgcgtaattttgttatagaactcaaatgatcttgactggttttgttcctgacttagacatagaatgattgtgtatgcttctgtagaatctaaagtggaaaatgaatgatacaggtgcatttgatcgagggcatcatagaccaagtgaacggaacaatttatgtctcatgggcgcaaccgagagtactagggattccacagatcaaggctttgagggatcaattagacagttgggttgacaaagttcacaccactttactatctgttgaagccgagacaccagatcttgttgcagcataagagaaaagaaaaccttcttcctccttttgaagctactgaatgtaaaacaccatcttctctgggattagattcaagttttttatttcagtcgtagaagaaattacaattgctttttaatcttttgacttccatttcaagatgtccgaaatttcagttctacatttagactattttcatacattttttcttaaaacatgtccttgacaatcattcattattcacataaccataacaagtcaatcagtttatagaaaaagtcatctgataggatctaaacgtggactcactcactctgaatagttgatttgagcctaaaatttggggattctcgcggcttctggcactggtctccgattacgtcacttcccgatgatttcatcttggactcatagcgcgtataccaagattcaattcccaacaatctcactcctttcaaggcgtttccgatcattgttacgttgcacagaacattgtctctatgcactcctcataaccctgaaacacgtcactaccgttggtatattctttctccgacgcaatggctttatccttatcgcttctcttcctcctatgcctgctcatggaagctatattgctttaggttcaaaagatttacgtttttagatggcgtttatgattccggtgtgacttcgagagtgttaaccactgtggagatgtgaattctaagaagtgagagtatatatgcgtgtgtcgttgatgatgtattgtactactaaatttgtgctctaaaccataacagctagacataattctaaatttcatgttatggtaggaagattgttgatttcattgatctaaaagactaaaagtgaaaatgtattatacttttggttttgtgcattgagggtcatcagtttaagaagcaaatgtggacaaaaattctgccattccatatctcttcattattaaaacttttctaatttttttataactaatatttcagagtatgaaaatgaaattcaaattattgtacacatttaggaattcatataaataaatcaaattactaacgattataaaaaaaaaatcaatacagagtcgaatttttgaatgaattcaaatataattgtcaattaaaaaataactgtactatctctagatttatttattcaacagaacttataattataagaatcccgaaagtaatttttgtgatcaaaatggcagaaaccacatggccatgagtcgtcttgtctgtacgatgattcactctttttcttataaaattttgattctacattattgtcccttatttttttggccttttgaataatgaaggtgaatttataaaaatacgcaaatctttaatgttcaacatacatatatagattcaacttgccggaacaaatgtgtcgacctttacattaagaaagaattaattaattttgacttatcatatagaataaaccaataataattattatttaatttagtctatttcataacgtatacaatacattcttttcttattttttttcctttagaaagaccaattcatagctactgccaaatgctgactactattcaaccttcattgctatgatatgactatcgataatatgataatagaattaacgaaaaatatgtcacaatattttgctatgactacattacaatattttctacaactagtaatagaaaattctaacaaacacagattataattttgtatattcgaaacaatctaccaatcaattcacgatataaacatatgcattgtcaaagtgatatgaatcaaacatttttactggtatggaagaaattacaacacatatttatgtcgtcgacagtaatgaaagaaacataggagtttgtcgcttgtacattatcgttgcaacatctttaaacaaaggataagttagaaaaggaaacagatgcaaccaaaatagaacctaatagagaacccgagtaaaaggaaggcccggcgaaagaaaactcccaaacagttgataaaataaataaaaacttccaacagaaccggtcaattactgaaataaaacaaactgaaccggccggttaaataaattaagcttctaaaaaaccggtcatcctaagaacggagttccggtgacggctcaagtctcttccttttaaagtacaagcggaaaacgcaatttgctctttcattcgtcgttcgattattacatgtggaggagtcttatcatcctcctcctccgtcgtgtcccattccaaacatcggaaattattcgtcggaattctcaccggagatgttttctccgccgtctcatgccgtcttgtacccttcttctcgtcgtttcttgagttatagagtttagtatatcggctagaagttgatattttggattggtcggaaaatataatgtcggattcttgaaattcttctgacattattgtaatatcaagaaatgtatattttttcgagaatactagttgaagttaaaagagagatgatatgatcaatgaggatggagaagaaaagataacaatgaagaaaagtgaaatttatagaccgattgagacacatatgtggcaatagagaatctaatgtcttatatacacgtaagatctacgtatataaatgtgactgtatgtatgtgtagatgtgtttgaaagtatacgtgtacgtataaacaaatcgagctagtatttgcatatgatgatgtcattaggatatctttggggtgaaatacgtggtagcttcatatgtttcttcatcatcactcaaattttcgttaccgtgtctattaattattttgattttttattttatttttttgattttattcattagttagtattaatgatttccattgtatttaaaaaggaaaaactatcctaagtttacacttttttaccataaataaatcatcacacattgattaacattttacacatattgtttgattcatatatattaggttatttatgaacgaattttgttttagtagaatgactgaaacatgacctattattttacgaactgagaatcttaattattaaagaagatctgatcatctgattaattgagtatctccaacatcaagaaaaccagtaaatcacaatgattaagaaataagctgagtcggtaaagccacaaaacgcaaacagagcggcgcgtcaggaggaaacgcatttacgcgttttcattctcaacgtcacgcgtgtacgcggttacacgcttaaatccaaattctatccactcatatccgcacacgtgtcatattacaagcttagggctctttcgtgccacggttttggttttgtccaacacaacacaacacaagactcgagagagtccctttcttgtgcgttaacgtggcgtcgttaacggcatattcttttatctcatgaaacagacaaattacgaggcaaatttgggaagtagtaacacgtcatgttgaagattgaagaagtttcttcgaatgttgtagaaccatatggatcatttttggcaggtttagtgtttcaagcaataaaatgtacattgtattataacaccctaggcattttttgaaacgaatgatatccaccctattaaaattcgaaaatactaaaaccaccaaaataaaagaataaaaacgacgaaaaacattctgaataagcaaacaaaagaataatcatactaaagaaacagcaattgaactcctcacaacatgatgtccatcggtccagctaaaccatccaaaccgatatcgatccctccgagcctcacctgtaaactcatatctctgtgtagtaaaaatgatgttaaaccgcttcttctgaccaatcttatcaaagaccaaaacatttggttcagccttaaccaagacaccgtttggcggttgagcattaaagacatatacgcttgttgaattacccgttcgtccaacacatgtaaccgtccttgtaacggtcactgtcccactgagatatggaattgagattgacgggtaatttaggttataaccgggagggattctacttggacatttgaatgtcgggtcaagattggttaaaccaactgaacaacagtagagaaggtaagattggtatgatgcatcgtagactaaaccgggagatgcagctttcgttggtctaaaatgtcttgacccaagtgcaaatgggtttgcgggtgaaccatcatagtcttggattggttcattgtcctcgttggtcatcgaagctacaaaaaaacaaaggttcattggtttagtgataatctgtgcgagaccgaaataaaaaaatctgatgaccattggtttagttattttaaaccaactcaataaccgaaagtttttgttaccagtggtcatgagggcagatcttatagcagcactactccatgtgggatgcatgcttttgagaagggcaattgcaccagcaacatgagggcaagacatagaagttcctgagtcgagattataatctaaaactcgtcggtctatcgaatctttgcttgccgaatccgccccgctccatgcggctaatatattcagtcctggcgcgataatatccggctgtcgaaaatccaccaaaaggttatgtgttgagttaaaatttaaaaagattaaagtcagaggaacaaaagagtttacctttaaaatgttagcatctacccaatttggggctctactagaaaactagtcataaatggagccggtttgtatgggtaaaccgaatcttccggttggtttcggtaaagtactgtttctgccggtttgatgaaagcaaccggttcataagtattgtagatgtaatcgagaattctatcgaccgttgatgagaaaaccaaagcagttggtacgaaatgagactcaacgtcgaatgcatcgttatcccgagaatttgctaatatcataccaactcctccggctcgctttacctcaagacctttaccaattgttgaacctgaaccgtaacctcttaaacataataccactttacctctcacatgatcaggtgaaagtgcattcggtaaacatagccttcaccatacacaaacaattaattaggccaaataaaataaaaaactttgtaacaaaagtaaaaacctttttttatttaatattaacatccattcatcttttgatatcgaaggtaaaaaacttacattgcgtcgttccttgaaacgcctggaacaaccacgtcaggagcgtagactagaggagcataattgtccatctttaatgttgttaatgagtccgactagaaaatatgaaactttctattaaattcattatatacatgatacacaatatttagaaataagtttgtattaaaactaaatctattgaatgattaatagtctaaatctatatccgagcgtaaaacttacctcaaagctctcaagcgaaaccataactcaaaaagcatatataacatcgtaccctatttacgtaccaaatttaaaatagtcataactcacaaattttcttagtaataattaaatttagccgggaaagagactatggttaacatttgaaactacatgtcttcgtcagattgtttttagatttgaaccataattttccttgtaatgtatatggtttaataaggtgtaacgttttaatgttaggtttattacctcgaatacatagccatcaccaagttcaagacggccgacgaaaaaccgatcaagactactagctccgacggtaataatccacggagctggattcgacagagtttcccgcgcaggtccatcatttccagcgctagccgcaaccacaatatctcttttaactgcatgcaacgctccgatcgcgattccatcctccaaatacgtgtgaggttcaacagttccaatagaaatactgataacattgacaccatcagcaatggcatcgtcaaacgcagccaacatatcttcatcaaaacaagtgtttgtggcgtatttttccttgtttggaaccgcccaacaagctttgtaaacggcgagacgagctagtgaagcgccgcctgaagccgtacccatagcaataccgcctagtgcagaaacaccgtctactcggcgaccaacggcggttgaagctgtgtgggaaccatgtccatcagcgtctcgtggagacaagaagtctttgttagcttcggcattgaacggtccgtaatatctctcgtaccctcttgcatagtaccttgctccgataattttcttgtgattaatgacgataaaataaagatgataagcattaatattaagttattagccctttctaatatatcccgtagtctaaaggtaattaacgtaataaattattttgcagtatcaaactagtacccatataaattttgttctctttgatatttatgaaaaaagtcttgtggaaaagatgagatataagttcaattatcatgataatatgtatgtactagtactagtgtgcatatactaatttcaatcataaaatttacgttaatttgaacaaaatgtagtgatatcatgacaaaagtcactttttgatgtatttggtgaaaatgttaatgttgaaagaaaaaaaaaactatagataattagatatatagctggagtgagctgagctcatgataagggcatttcatatatacgtatataagatatagttaaattgataacctttagtaaattagtgaagatatttgtttgttaccgattacaatgggaagagttgaaggcaacaccggtttggcagattcctttccaagattctggaattggtcccattcctttgtcatcgaaactccttgattctggccacaccccttttatctcccaaatataaacaaattattcccccaattataccatatattcaacaaactaaatatgttaaagattttggtaacagaatttatctattttatggaaacgattaagttgtttaacagaaaatatgtgtgtttgttaaagagaaaaccacaaagtaggtacactagttattcaatcaaaatggttcacgatggtcgatggacactaaacttcttagaaaacttaccactatcgataagaccaactatgaccccatcgccgtgttttgcattcttcaagaactttctcccgacacgaaaccggtcatttacatcatatttgtgacgtggggcatcaccgtcactacgataatcttcgccttcttcctcctttaaccctacaaattcccatgatcttgtcgtatggatcttatactttctcggatcgctcttgaataccgatacaacttctttgagttctataccaatagaaaaagaaaatgttttttagctaaactttcagtcatatatagcaaaatgtatacttagtttcattcaaaaaatttagttgtaagggttttacgtacctttgagtctagaggcttgatccggtgttagctcagccgcgaagccattgatgctagaggctcgttcctctcttagctatacaatagcgaagatgtggcatcttcttcagtttctttaacagattgaagataagagtgatgatgagcttcaatttcatgaaaggctttatcacctttatgttctccaaaataaacaatatacacctacaaaaaaaaactcaagaaaaaccaagttaatggacatgtgaggaattaattaagaaacaatgaattggaaatgatataggatttgacaccttatggtaacaactcaatgcatatttgaaattgatatcctctgcaaagtaaattttaatagaaactaacctgcttctctttagtgcatgaagctaagagaggaacgagaaagaggagaagggaaaggaaaatgaaaataccaaaaatccgtttcatggccttagtttttttgttttgttttggtttggccgaatgtcataaccttaatgatttatagatgtttgattggctacttacattcgacagagagcatcaaatttaaaaatggtccaaccaaattataggatttttgagaaaaaaaggatatatgctagtgtaaaaataattttatcgaattattacacagattgctgcttcgaaaacagatcattttacgatgctttcatcgtcttaaattattaacatgatctacaaaaatctatttaccctaatagattggggggtatacatgagttatatatgcgtgtaggaatattctatacatttcgcatttaggtatatttaataaataaaagaaaattttagtttgttacgagaatctagatatgggtttaatgggatatataattttatcgttaatatacttgcatgaaaaatcttcaaattcataattttaattgcactcaaaagtaaattggtgattacttgatttccagagcgacttgatgtacttctggtttggttcggttttgatttttggtttgagtccggttcaatgctagctagttaaaaaaactaacgtaggaatacataccactaacatgttggttttgtggttccggtccagtctcactgtctcatacctggttttttttcaagggaaacatgtcattaaaattcccaatttatagaaacattaatttaaattctcaatttcaaagaagcaaaacaaatattaaatttttattgacttttcaaataaatactaaaattttgttgacatggtcatagagaacgtgattttaaagggttaaacatatctcgttaagagagtttattttctgttaacatgcatgttaattgaaaacaacaatatttcctataacataaaatcgacatcgttttgtgttaacgactgaaagaaattcctaaattcaatcttagatcgagcaaactcaattaccctaaatcttcatataatttgaaacttggaattttattagcagttacgataaaacgatagcattttattattagtagaatgatattgttttcaattaacggatctgctaattgaaagtttaactatgttaacaaggtctattaactatttaacatcatgtttaatatggccaaatcaacaaaattttggtatttatttagaaagacaacataaatttgatattcattttgtttcgttaagaattgaagatgtaaatcaacattttcaataaattttaatgatatttttcctgatttttttaagcgaacaaggagaggatttacgattagtccctttgttgtttggcaaggcctaaagcccatcttaaaattcttctttgtcgacgagtctagttacacctagtataacagattgaaacaaaaacataacaacgctatcgttcgtctttatgtttcttttgtgaatagtaaatagtaaatagttaagagtgataatcgtgtaatatgttctcaaaatgcatacattgaaaacgcacgcaaaaatttctgctaattgtatccaaattgttgaaaaatatttgatatgaatctaaattatgaggaaatttgcatcacttcttctgtatgaaacttttgttgatacccatcgtgattagcatcactatttcttggcatttttatatattaattttgattgttaaattacaagtaatcatagtggtatggcttcttgtttgactcaaaccaagcccatgaccatgagtccacaagttcttctaccatctttttttttttccttctaccatcttcacaagtaacaacgatgacataaggagagtctatagagtgatcagaaaaatattttctatttctttcactttgacctctataacatccaaaccgactaataaaaccatcccaaataagcaaacaacaatcaagctaaggaaacagcaattggactcctcacaacatggactttatctgtccaactaaaccatccaaattggtattgacccttttcagtcgcattcatcacctggttcttcagtggtttaataacgattttaaaccgctgcttctgaccaatccggttaaaggacaatatattcggtatagccttaaccgaaatacccgatggcggtttaacgctgaataagtatgtgcttgttgagttaccagttccaacatttgtaactgttcttttaacggtcaccgtcttcttgagattcgggaccgcgattgacgggtaattgtgattataaccgggcggaattttactaggacatttgaatgtcgggtcaatattggtgatgttaaccgagcagccatagagaaggtaagctcggtatgatgcatcatagactaaaccgggatctgcagcttttgttggtctgaaatgtcctgacccaagtgcaaatgggtttgctggtaaaccagtagtgtcttggatcggtttcttcttgtcgttagtcatccaagctaaccaaaaaaaataaaattaaacaaatatcaaaaagactttatttaaaagattttggtttagctaaaccgaaccaacaaaaaaaaaccatagtttgttttgtttaccagtggtcataagagctgatcttatagcagcgctactccatttgggatgaatggctttgagaagagcaattgcaccagcgacatgaggacaagacattgaagttcctgagtagatgttataacctgcaactctttgatctactgacattttgctcggtgaatctgctccgctccatgcagccagtatgtacagtcctggggcggttatatccggctgttaaaaccgcaaacgaataaaaccggttaatttcggttatgagtcattttggtttggttttgaagttaacagaaaaaagaaaaaattacctttagaatgttggggtctacaacgtttgggccgcggctagaaaacccggtcatggaaggagctgcttggtatttgtaaaccgttttccccggtttgataaaagccttcgggtttttatcggttttgatgtactccagaattttatcgaccacggttggggtaaccccggcagtcggaacaaaatgagagtctgaaggaacttcattgccgttagctgcgatatttccgagaatcataccggctcctccagctcgttttacctccatgcctttaccgattcttgaaccggctcctcttaaacacaagaccactttaccactcacaagctccggttttagtgaatttggtaaacattgccttcaaaaaaaaaaaccaaaaaaaattggtaagtcaaatataaaattaaataagttaattatcaagtttagttaagtaagcaattcttacgatgtctcgttcaatgcaatgccgggaacaaccacgttagaagcgtaaacaagaggggcaaatttgtccattttaaatgccgttatcgaatccgtctacataacacaaaagaaaaagtgaaaaactatatattgtacacaaaaatgtaacacgtaactgatttttttctcataagtgttggactagttaccttgattgtatagccattgccaagaacaagaccgccaacgaaagcccgatcaagagtactagctccgacagttataatccacggtgccagattcgacaaagttcccggctttggccctgaattcccagcgctagcagcaaccacaatattcctcttaaccgcatgcaacgcccccatcgcgattccatcttgtgtaaatggaaaaggctcggtcgttccgatggaaatgctgatgacgtgaacgccatcagcgatggcgtcatcgatcgcggcaagcatgtcctcttctagacagatatttccttcaactttttccgcattgggcttggcccaacaagctttgtaaatagctagacgagctaacggtgcaccgcccgatgccgagcccttggcgaaaccgccaagtgcggatgcaccgagaactcgacggccaacggcagtagaagctgtgtgggacccatgtccgtcgggatctcttggagacaagaagtctttgtttgctgtagcgttgaacgctccgtaatatctttcgtaccctttcacgtaatacctcgctccaataattttcctgtaatttagagaaaacatccattaagttataacttataaccggttcatggaataatcaatcattcatacaatggttaactacaacaataattattttgtgtcaaatccaaactactttaatttcttataatttattgagaaaaacatcatgacacaccgaaattagataagtatccaactttaatcaaatcgcaatattaaattcagtagatattacgaactttttgtgtccttataatgtatttagcatgaaacaaaaataacgaatatatgagcaattatttattaatgtgataattagtgttttatacgtttatatcattgaattctttatttatgtcttcaaacatttgagatgccttcaacaaaaagatatagacacgtaaactcgggcacacattgatataacaaacatgaaaattgatggtaaaagaaacaagtgagaagtcacgggtgtacaatattatctagaaagaagcaaataagtttttgtcccttacatataacaccaaagcttgcatatacaatcaattatcaaagtttcggtttcatgcataaaaatagccaatataaagtctttttaaaaaaaacaatttctttgtatggttttgatggcaggcttacataagtgaacagttacagtggctgcaggataattcgatatatttatagttttatattagtaatataataaaagaataatggtggctcgtgattgatgatgatacgcaagcttaaaagttggtgatcaattatcgcaaccgaacaaaacattgagactgtgactcaaaaactatgccttctatagttctatgggaatattgctaaatcttgaaaaagaaaaaaaaaatctatgttgttttgattggttcagaaataactttacttaataaaaggcaaaataattttttttttatatataataaatgaaatatgcagtattgtgggattatagacgttgtgtaattaaaaaatagtatattttgattatattgaatgatgcattatatatcctgaatgtacttacaatgataaaaaaaattattatgcctgtataataagattgaattatacaaaaaaaaacaagattgaattatacaaatgatactgtcgatgagtgagtggaatgaaattattatcatatcaattgtattggctatttaaagcctatggtttctattataacagaaaacttaaaagtcgttaaataatttcagaattctgtcatttcattgattatcagtaaaaaataaaattaaacaaaaattttagtcaaaagttacactttaattctacacaattatttaaattttgtttacataaagagttttaatgatcaatatagaacaatatatcacatcatcgtatagaaaaagaagattctcgcagcaagcatgaggttctttggatctttgctaaagaaccaaagctgatatggacgtatagtttacttttaatctatttcggacctttaattcatacatatatatggtttgtgtgtgtgtatgtgttttggctaaaatttgtatttttggttttatatgtttggcatttttggttttaaatatctgaccaattcaaatcatagaatttctattaaaatttgcattttcttagaaaaaagggaaacatgtcttaccggttacagtgagaagagttaaaggcaactccggtttggcagattcctttccatgattttggaactggtcccattcctttgtcattgaaactctttgattctggccacacacctattattttaaacaaatcattatctcaataatgacggattaatataataatgagatgaacctaacgattccaaaagataaattagtactacaaaaagttccttcaaccttgaattcttgaccataacgcaactctttttctctagtcacgtaataattcaactatcaacgttggagttaggtccatttaagtttggtgtacgttttcatcaaaaagaaacactcattattctcagaatccaacaatatattattttaacattaaactaatcttatggctattatctcggcgctattatgtgtgtgcgtgaaggaaacagaagacagaggaaaattcaaatgaaaggataacacaaaagtttacatgagttacacagttttattttttccattcatcttatcctaatttcattaacggaaaaaaacgcattagccaaaaaaaatatatttatttacataatttaataaaaaggttatggttatttagtttagaatattccaacagaaagtcagaaactcaaaaaaaaaacctattttctattttttaacaaacagaaaacaataattagtagagacagcttaacttaccactgtcgagaacaccgacgatgattccatcaccatgctttgccttcttcaaaaaatttcttcccacacgaaaccgatcatcggcatcattttttcgacgtggaacatcactgtcggtttcttcctcctccaatcctacaaattcccatgaccgtgtcgtatgtgcttcatattttcttggatggctcttgaatactgaaacaacctctgctaattctgttttcataaaaaaaaagacaaatttggttttagttaatacttaataccttttcattcataacaaaatatcaaaagggtttcattccaaatttgttttctttacttactttctagtttagaggcttggtcaggggttagctcagccgcgaagccattgatgctatgtttgtagctatacaagagcgatgctctagcgtcttcttcggattctttaaccgattgaagataagaatgatgatgttcttcaatttcatgaaaggctttatcacctttatgttctccaaaatagacaatatacacctaccaacacaaaaaaaaagattttatgaaaatgtcaggaattgattaagaattaaggacatcagaatggagcagccccatatggtaacaaatatatgcacaattggaattaagaatcagtgaacattaaagtgtagaatgattattttgactctaaacagaaataggaacctgtttttcttcagcacatgaggctaagaggggaatgagaaagaggagagggaagagagaagtaagcttcttcatggtcttaaacttgtatcttttgtgtttggtggaatgttatagccctaatccgttgtaggggtttgatgggctatttataatagttaaagagcaacaaatcaaaacgtatatatagaaattaaaaaactatcctaactaattaatcgtgttgatctaatgactggatacgtcttgcaaactacagcttcatgttgaccactagaaccgttacaaatggtaagaaatctatttttatttataacatatcatattttgaaaaacttgtttcggtaaattacatactgattaaggttatattttgttttatgtacttacagtcgcggattacatttagaaaataacataattgtgatactcccatttctgaaataattaaaatgatatgtacgtggagaggcctataataatttgatttaactatatcaggttgaccaagaaaaacaaaacgatatctatcaaaatatacccacagttactatatatccacagttaatcatggttgaattggagaaattgaagaatgaacttacttagaagttatcttttagtaatatgtgaatgagtataaaacacaaaaaaaaatattacggtaatttgcaaaattatcgataaatcgttaaaattttctaaaataatgatccggccatcaaaggaccgatttattaagaagacatataaaacctacaaacaataacagttaaagagttatatacgatataaaatctatataaatgtagagcgttttttcgtttaataccgttggagataatagtcttgctttccaagagaatgttgtcttcctcgaatgagttgattggagtggcagacccactaattcttaaagaagaaggggttcgaagaaggggttcaattgatcctgagttaaatgttcaaacaaattttaatgcataggaatcattaaaaatgatggtagcacccctgctctagtgacccccaaaattcggattcgagtctcccacaaacaaaattggagtaatattatggtgatacgaaagaataaaaagaataaaattctctaaaagttcataaacgtgtcacattctctattggttttttacattttcagtatgtttattttcttttatatagatattatggtgatacgaaaagatagtctctattttttttgaatagcactgatcatttattgagaaagagttcatgaaccaaactactaaagatagatgtgggagcgaacaagatcggtgatagtcgcgggccttgaggcattaccaatatttcaagaaaattttcttattttaagttatttacatcggccctgttcgtttctctgtcgctggatccagcgaccagcgacagcaaccagcgactacatacattgttcgtttatctgtcgctggactcagcgaccaattacagcgacaatcgctaataattgtcgctgtgttgttcgtttgactgtcgctataaacagtcgctatatatttttttaaaaataattattttggtgctaatttatattttaaaatcaaaatgtaaatcatatatatcctacaccatgagaaaaataaattaatatatttatttattttagttttatcaaatttaatttgactataattagtttatgttatttgaatttaatttattttaacttaatttaataaaaattattttaattaaactagaactcaaacccgtcgtgatatcgcagagaaaaatattataaatttgtttatataataatttctttaaaacaaatctaactccaaatgatgcatattataaatttcgtagttattcaatagtatatatataactaaccggaaaaaataaccgtaaatattttgactagaaaattacaatataggaaggttgcaataaaagacacaagcgagaaaaaacaatcgtcaatattttttacggaaagttgcgattaaaagacacaaccgttcagagtgcagaaagacatttatttaagtttaatttaatttaattctgtttaatttaattatttttaattattctttaatttatattttttgatcgctaagttgttcgtttgcatgtcgctgatccagcgaccaaaaacagtcgactaatcgctgaaaccagtaactgatcgctaaaaatttcagcgaccaaaaattgcggtcgctggtcgttggcgactgtcgctacttttggtcgctgaaccagcgacaagcaaacgaacaacttttagtcgctgtcgctggtttcagtcgccagcgacaggcaaacgaacaggaccatcgtctagaaaaacctattttgggttaattaataattaatgttctaaaatacagtacagtatgcataaccgtatttatgttgtactgtgataaatcgtactgcattttcgctatacaagtttttatacgctggcaattgtatagttgtatatacaacattgatacggtaaacactatatttttaaaatgattcgaaaaccaaaataatattatttttttgtcaaaaagttatattattttattagtgttttcgattttttaaatattagaatattttgataactgttttgtcaagttggaaattttaaatatacaatgtcctgccgtagataatctaatgtataagcgttatgttataacaactgaatataagagtattgtaagtcctactcggtcgaataaattgaataaaaagtggggaaaaataattgagaggcatcgacgtacatagttggctacgaaaaagtagctaagcatttgattgggagattctgtttcatcatatgccttctgttttcttgggaaaatataatctctcctgcccgttttttgtttgctatgacaactctcagtctctcataacagaattcagagtttttttttatatttagataatctgaaactgatttatatattatcttcttccattttgggaggtgatcatataagatagaacaagaattagagttagacgacagctaattttcaagcagagaatagctctgatttttttactgtaactttagaccatatgtgtattcgtatttacagtttgcacagaaaaaaaaaacacatgtatttctaattttctatgtacctttttatgttaaagtaccattgaagtatttttgtttatgtcaacatgcttgtgtggattttactggagaacaacacattaatcattttaataaaaatcactagactatatattctacaatgttgttgaggtttacgcgctactatagttgaatactcataagagatattttgaaagtaaaactttcactttgtaaagataatatatgggtataaaaaatatttgtttgcacgtttattcttggagtataagagatttcattcgaccatactcatttgtccttatcttaaaatactttatttcgtttttgtcttcatccaagaatcaccatatcttattatccattttttttgggttcagctagcaagtagcatcccttcgatagactgaggagaaaaaataaacaattatctggctcttaccgaatctaagattttggccattttctcccctttttcttttgtgcaaaccattacaatatctatggatagatcttcatatttcacatgtatgatatatgaatgattccactgcaataagttatcaaactaagagacggcaatgtttttttttcttaattcatttcactgcaatgacgttattttattgttgttggtgagatatcccggctgcgagtttgaagactcttgtatagatgatttgaagacactaaaatatttcttctcatttcattaatttgataatattttaatagtgtgttaaaaataaaatatatatacagtatactccttctgttttataaagattgtcgctgtattttcaatgcacaattttgaataaaaatccatttttaatcctatttctttagtgtattaataagagagataattttgtttagtatattattaattaaggggtataatctaactttttaatagttttcttaatagtttttgtgaaaaatatagaatgatatttttttgtgaatcaaagaaaatataaatatatatttaagtattgtgaacctaaacccgactaattaatctcaagattcgggacgagacgattgataatattataagactgcaaaaactatccctcgaaagaagctattgataatatagtagaacatgaaatatatcatccctaacaaaaaaaaaagcttgaaactaacttcttgcgctaaccactatctcacaacacctttggtaatccttacagttttgttactgaaatgaaattatgtcctttaatctgaatttgatgttttaacacgatactaataacaattaacaaaactgagtggtggggacattctataaacttgtttgcaatcttagtttgaccaatataattgacatattttgtgcttgtatatatgtttgtattgtacaaggacttgccaaagcctatatgccaaggtcccaaaaccaaagcctaagacccatgctcgagcatgtcattccttgttttacttggagttggaacttaattcatacatattgtatgtatgtgtagtatgatctaatttgaaaaatatttttaataattcacgttacagaataatttaaatttttacaaagtaattgtataaagaaatttaaatagaaagtctgtttcattacaatattattttattgtagtatttaaaatgaaaaatacgataacatttggtagtatttaaaaaactggtcatcaagtttttaacatttcagaatagcgactcagctattataggaatgttgaatccataaaagtggtgccagtctgagcataacatagacggatgaagaaaatcggaacgtgataatatttttcttatatcttagaaaataagaaaagatatgtggtatgcgtttgtcaatataattagtaagagaaacctttatatcttaaaagcatactttgaagtttcctctatttcagaaactaatatttttctaagtaaataatagaattcgttttcctttaagacttgggcatgttacgttttttgaagatgttaacaagatatttttggatgcctcttatgataagaacatccactttgtatggctgattgagttttgcaactaatagtattctctttgaaaaaaaatatttctcattattatttttcaaaataatatatcatttttttttttttggtaagtatcaaatttcctatgatatgtattcattttgaatacatcaacttcttattattgtaagccaaaaatgtaaaatttgatcacctatatttaatcgacatattagtgatatttaataaattacttgcacccatatttttttttttgacatctttgaatcgataatatccgatctataaccaatctctataatacgggataatacggcttaatggaattgaactctgataggaaaggtgtaatcaaaatggagttaaccacttaactaaaactacatccctgaccatatttttatttatttaaaagtgttctctccattaaacaaaggagaaactcttatacagtggaccaacaatcgataagaaaaacgactgaaacaattaatacaacataaaaatcgtgagctaaatattgtttttgcaggaatatcatattacgaaactagtcgtaagaatatagcggtatcaacaacatattatatgtaaatttacatttagggataacataacgattatcgacgatattaacacaaaccaaaagactccaaattcaggtcatttgtatacattttctacaacaatattttcttagtttgatcaaaaaaatattcaacacttgtgtaaagtttagtaacaatgtgaaaacgaggcttaaattggattggataagagtaaacgataatgtttgggttgggccaagttgttaatagtggaagatatagccatatagggatggcccaatttagtttatgaacttatgacttcccaaaagttgcaaatctttctttagattggtccaatttattgatattatagaattacctcacaaaaagaatataatgttgactatacaataggataatattttattttatacatacattttgaacattatttctatatacacaattataatttgcactgaacaagaagaaacagaaaactagtactaactgacataattaaataaaagtgagccggatcgtaattaaactttaaaccgggaaatttgataaccgggaagatatccacgtcagcagcacgataacaccgccatcgctttccttaatttaccttttctctctcgacaaagatattgactaaaagtcaaacagtcgttaccggaatcaatggccgggattaaaacttctccggcgacgattaagctcttcaccgttctattcctcattctcacaatctcatctccatcacccaaattcgtaaacgccttcactttcccattttccttcacacaatacaaaaccctaatctcaatctcacgatcactcctcctccgcgtcgcaaacctacgcgcttcacgtggagacgcattgggttcgtctcgtgtacgagcaatggctgatgaaatcgatcgtggattagggttagggtttataagcagagcttggtctgttggttgggattatatgtggaattacgcttggagaaagggagggattgactacggtgagatgtatggtgcgattggtgatctcaatgagcttatgggtttagtgactgagtttaatagagctgaatctaatgctgataaagctagctctgttgctcggagttatggcaaagctcttcgtgtttcgaacaaattgcttcgtcgtcttcttagaatctttgctaaatcggtatggattatcataactcttaaaaggattgatttttagattcatttactctatggatcacagaatctgcttggagtagaagtaaagagtgatactttgctcattagtatacgaaatgaaggcatgggttgttgtcaagaattgtagttagaaaattggattttgattactgcaaatattgaatgtgaagtttctagtggtaatttgtaactgaaatgctctatttatgtgttgagtagctgagcttgagagttgtctcttatgttaggtctcaagcagaagtctgcttaagtagagaaaagaatgatactttagttaaagtttgatgaaagcatgggtgtcaagaattatagtgaaaaattgtattttctcgattactgccaattggaaggtgcagtttctagtgatactctgttactttttctgtaactggagttctctatatatgtgttgagtaggtgagcttgagagttgtctcttctgttaggtcccaagctctctttgtttttcgtaatggatagtacactaaacaaaatgcaatatctgcgcttgaagtagagaaaataatgatacgtcatacgttattcattgagttacgaaactaaagcactggtagtcaagaatttacagtaaaaggttagacctgattagtgattactgcatatttgtcatcggaactgttggagtattgttgcttcttagttgtttctaatgattgttctctacttgttctgttattggagttatatatctatgtgttgagtaggtacgcttgagagttgcatttttattattaagttgttccttgctttgctttgatcctaatggacctgtttgctattgaagttactctttgtctcgagcattcaatagagttttactgttattctctaggctgaaaacttacggacattgttgtgtgttttcgtgttataattgttagggtgcattgagggagttttgggagatggtgcaagctgaagtagtcgatggagagttactacaagactgtctcgaagtaggcggaaacgacgttaagagtttgcttcaaatagcaaaggacatggctgtacagtttttttcttctcaaagccgttcctctgatgaactttagctacaaagcagagcgctttcacctacgttccttctttccgttttgttccacatcggatgtgacccttttggcacgttgtactattgtatgcattagccaactcctctaggaaatcctccataaccattttgttcattacaactttcgctagataagttcaagggatgtatagactagaaaacgatttgtttgttcgtttataagtctaagacattcgtagactagaaactcgaggttcttttgtaatttcatcaatctaagcacacattttgtaatcgaaaaaagtcctaatgatcttgtgaatatctttgaaaacacacaagtctaccgacatctagagccattgtaggtatccaacacttgctgtgattggtaaactttccccattcatagttaatattttatcgacaaaacaactcaaaattcttctgtttcatagctctcattgctggaattttgcctctattgtatagtagagttcataaatacaacaaccatgtggttggtgaatggtggaatagatctgaaaattagttttttagtattcagaatatttctttgtttgaacatgtttgcttttttaactaatttttctgtcataatccaaatttattgatgaatgtcatcaattttgtttatattatagtaaccaaatttattgggatttctgttttccacactttccctcgtcttattaatccatgtggtgactgcttgaataagaaagtttgaatcttgatttgagtaaatttttgggtcccaaagtagattttgcttttaaggatcatatgcaaaacagagcaaatgaaacttaatactttcaactactcaacatttggttcataagatcatcatcatcatcatgacatggagctcactctctgtctttcatttaatttcactcccttcctaacacatggcaaatcctcaacatcattattcaccgttgattcgaccaagtgagattgagcttggccgttagatttgagtatatcctagaatgagaggaacatgtaatgcaaatgtggaccctttatgtcatgtttttatgtttcttacactatgccaatttcatttcaaggactagtcattttactttttccacatgcattgtactaaaataaccaaacaacttaaggtgagtaaatttagcttaagcatgttactgtcttgtggtttaaattaccgtgatgattttcatatgatgaatagtatatagatatttgaacctaaaacctatggaaactgttttttaatataattaacaacttcgtagaagttttgaagaaatgaagatagttttaaggttattaaagttatataatcacatagtattaataatcgtcattatgtcatttttcaaatctacaaatgcagtaattagttaatcttcactttccttctcgagacaagttgttttttactaactttctcgagcattggtactttgaggaaccaaagtcaacagctcgatttccaaagcaaaacattaaaatcgaaccgtcacaatgcatacaagttggggggattcagagtaaagaaaataaacaacattgacagaagtaataactctccaccatctttagttatatgtctctgatggatcaattcatagttccaccaaaaatactcaattatttcacatatataaacacacatcacatttacttttacatttaacatccaaacatcattgccgcgtgaacatttaatgcttcttcaaccgttaaaaaactttataaaataacagtttctcattctctccatattcttcaaaactatattatataaacacatttttcgtttcttcacattcacaaaacatctctctctttcttctcccattcactcactatcttgctcctagaaaaagatggcgagaatgagtttgatgatcatgatgattatggttgctgtgaccatgattaacattgctaagagtgatcccattgcaccatgttacttcatatttggtgactctttggttgataatggcaacaataatcagcttcagtcattagctagagctaattactttccttacggtattgactttgctgccggtccaaccggtcggtttagcaacggcttaaccactgtcgatgttatcggtaattcttactaactgcattttttctctgtttcctctgtttttattcccacttagactatttttttgctctgtttctttcaaaacattagctcagcttttgggtttcgaggactacattacaccttacgcttctgcaagaggacaagacattctccgaggagttaactatgcttccgctgctgccggaatccgagacgaaaccggcagacaattggtaactactactactatttctctttgacaaaaaaactattactattcggtttatgttttggttttggtctggtttgatatatttgaatttggcttatcttgttctagagcttcttaaaacttgacttgttcttgttattgttcctcagggaggtcgaatagcatttgcagggcaagtagcaaatcacgtgaacactgtgtcacaagtagtgaacatacttggtgatcaaaacgaagcctcgaattacctcagcaaatgcatttactctatcggattaggcagtaacgattatcttaacaactacttcatgcctactttttactctaccggtaaccagttctcccccgaatcctatgccgacgatctcgttgcccgttacaccgaacaactcagggttcgtatacacacttctatatcctctgtttcttagttttcctctggttttgcctctctgttttatagtttctactctggttctttatgttacttgatcctctgagtgagagattaaggttttaatgtctgtttttttttgtgatggagcaggtactgtataccaatggagcgaggaagtttgcgttgataggagtcggggcaatcggttgcagcccgaacgagctagctcaaaacagcagagacggaagaacgtgtgacgaaagaatcaactcagcgaacagaatctttaacagcaaactcatatctatagtcgacgcttttaaccagaacacaccagatgcaaaattcacttacatcaacgcttatggcatcttccaagacattattacaaaccctgctcgctacggtaatagatcaatcatcaaattgtgattgaagtaaacgttttttcttatgatgatttgctcaaagtttcgttgaaaattttgcagggtttagagtgacaaatgcaggatgttgtggagttgggaggaacaatggacagataacttgtcttccaggtcaagcaccatgtctaaataggaatgagtatgtgttttgggatgcgtttcatcccggtgaagctgcgaatattgttattggaagacgatcttttaagcgagaagctgcttctgatgctcatccttatgatattcagcagctagcatctctctaaagagagaaagatcttttggttgtctaagtattttgatagttcttcaatggcagctgagttttggactcaagaagaagtgatttggtttgtgttgtgtgatgtcataactgtttatgtaatgatttggagttactgtttatctctttttctcttaacagttttataaatttgattctttcattacaaatgtgttagttcgtctttgctccaaaacaaaagaaagtggaaccaaagaaggaagttcaaaccaaacatattcagaaatgtcgttgggtggttcatggttggttggttggtttttaaatttattgcaattttaatttaactgactaaatacttaaaaatgaaaaggtagaagaaaatagtgtaccatgatttttaaatgatagtagcatatggtaatgttaaaaatcgatctaattgaaaatgccttgaaagttgaggcattatttaggctttagagaaaagttcatgaattactactctctttttgaatcatctaagagggtttagactttagatgataaaagctaaaaattctacaacacattactaatcatcaaagctattcatattgggcctgtaaggctttaatcttgaaaatatgataaaagatgaagcccaattttgtgtggttgctttgtttgccagcaaggattgctgattgtccaacacaaagcttttttattatcttctttgagattattctttatctggatagagaagataatgagctccttggggttttcagttggaacttgttctcctccaagtgagaaaagaaaatgcagatttcttgtgaataatagcttaaacaaagcagaggctattaacttgagaaacaagcaaaaagtttcttctgatcctgagttaagttttgcccaattatcctcatgtggtagaagagaagcaattattggttttggtttctctattggcttgcttgataatgtttctgcattagccgaaacaacttcttgtgaattctctgtgtctccttctggtcttgctttttgtgataaagttgttggttatggtcctgaagctgttaaagggcaactaatcaaggtgatttttaagtatatcaataatatctcaaattacaatgactttttgcaatttctttatgaatgtttgatgattcttgaatgtttattgcaggcacattatgtagggaagttggagaatgggaaagtctttgatagtagctataatcgagggaaacctcttactttccgaattggtgttggtgaggtaatcaaggataaacattacttttgccaaagcctcccatttgtttaaacttttaacattatgtgagaaaacatactatacaggtgataaaaggttgggatcaaggaatccttggctctgatggaattcctcctatgcttactggtatatatgctcaatttttaaaaaatttaacatagcatatacagaggaaacatgaaactttagttgcatgtaactaaactagatagtggtcatcactatgcttagaccataagaccttagaaacactgaaagaatcttttgtatgtaactagatagtgttcatcagtttgtatcctaatctctataactttctaccataatatttagatatttatgttagaggtatatagtttaagtctacatagtgtttaaaataatttgatttcaacagaaatattgtcatgtttacatcatataactctgttggtctaatctgcagttttgatttggtttctttcttcaggtgggaaacgaacattgaggattcctccagaactcgcgtatggtgatcgaggcgcaggttgcaaaggaggtaaaaatatattttgatcacaaaatcttatgttatattgttgataataagctaattaattaactaagcctaaacttgttttcgcgcaggctcatgccttattcctccagcttcggttcttctctttgacattgagtacataggtaaagcttgagagagcttttttgcttttgctttgccttttctgagccatatcatactcttgtttgaatcatccttatagaagaaaaaaatatgtctattattttttctactatgtaatcaagtgaatatctcagctttttctatcttttgtttggttttctaccttttatctattactaaaatatgaaaattcaataaaccaagtaaaaccggaaacccaaactcaaatccagagaaatgattttcagacaaaaaaaattcgtcaaaagatctctgacatatctatccaaacgtcgtatagtgtagttcccgatttctcagacactagaagtagaacgttgataagctaacgtaagaagcaagtagatgcggtagaaacacaagaaaaggagcgttaaacagagcaagttgcataaaatagagaccattgggagatcaaagatctagacataaactttcttgggggcaaaaatattgaagaatattacatgtttcagattagtgtaccggtaaatttgtgggggtggcttccaaaactccgatgtcggtcgggttacattatttataatttgtaacagatttattctctcttttttgccaaagtttttatgatggcttttaatcttaccgatcactattcacaaggtaaatgattgttctctccgatggatggcttagtaatagtatcttccactcgaaccctcaacatgatccaactgtgatctatgttgtttttgcttttttcgaatcctaaagatcagaaaagaataattaacttaaaggttttcctatgattttaggtttttatttcttcttgttaaggttcagcgagcttgtagttatatgaatttatggcgattttgtttttataataatatttggagtttttctcctttcatctgttctaatttttgtaagccaattttttttgggaaaataatccaaagagaactaattatagatgcaatttctataacgtagcaagcaaaaacaaaattcattcgaataactttgattgttttgaatgaatcgttgacgtaataagattatttttttcatgatacctagactaatcttccttcctatcaaatttgggttaatatatgtaacaaccatagaagataaagatctttggaagacgtaccgttttaaattggtgctgccaccttaaaaaataattatgagatttttcttatgaaaaacgaattctaacaaattctaaaccaaaaaatgcaataacaacataaaatgcaaagatatatatatattctaacacgaaatcatatctaattaattacatcatatgaagaaaaataaaaacaaacgaaaacgtaaatctaatttcaaaaccgtattccaacaaaaagtcatcatgcctacaaatgcaattgaagcaagaaaatgaaatccgatgtggcttcaacaaaagttctttgaacactttaatcaacacctcaacaaaaatcacctccataatgaacacctcgtgcacaaaccactattttttgggaagggaaagtttgatatgagatataatcagagtaaatgaaaagatagtaaataacttagtttagttataataatattcaaaaatgatggtaaaaacactagtcatttataatttttatatataggagtatcttttcatatctcgtgtatattcttttgatcattgtttaataagtaattcattttctttcttttaagtgtagaaagattttacaataggatatttcagatgattcatgtggatggccagaattctaactcctttaatgaaatctcatgatgcatatatatataatctcattcattacatgtttttttgtgttttttctttctgtttaaatacaagtcttatcataccacattagcttttatctcgtaactccaaagtccgatacaatacatgtcactctcaactttgatcatgaaagtttagattttctcgcaatcattattccaattattccaaattggactcaaacatagatgctttatactcgtcagtttaccaccacctaatcttaccaggtgaaatggataaccataacttagctgccgagaaacaaatgaggttatcaagaattgataaagaaatatatctagtgctaggaagaactaaggactacaagtttgaaactccaagaatatgaacaagtgattcaaaaattaagtataaattaattacatgtttttcttagcaaaatatatatatacatgtttaaattcgtatttgagtaacgagtaaaaatgactaattgtcaagattaatatcttagatgataaaaatgactaattatcaagaattctgaaaaaacttttaaaatttttaaaaaatgagataatgaaatttaatgtacatgaatgaacccaaacaacatttaccattggaggaccgacttggttatatatgaaggtgctagaagagatgtgaagatgattttgtatctctctattttttatgttcttatatctgtaatgttcttgatttatgttgtcactttatcttcgtttaatgtctaagagggtttgggcctaggtctcttaatcccctccaatagtccatggtccaggttctttttaaacttcggcaaatttataattatatgaaattctaaacattttatttttagagtttttattctttcgtttgtgtcagaaaaagatctctccatttggagtaaaatttccaattgtttcaagctcaccgaactttcattccgggaccttaatccacgccggctgttgttaatgttttatgtataatttgattaaaaaaaactttgaccaaagaaaaaatgaaagagtcgacaaaaaataaaaataaaatgaaagaaagcattaactagaaaatacaatattatatacggaaccatgatttgtttacgttgaaggtggttatatttcaacacagacaacagtatatatatataggataattatgtttactaatggtcttataagacaacataggacgacatatacaacattttattattagttacacaccaacttcattacgggaacggagccaatttctgcatctcagtttcgattatgtcaaccgctaatccttttccgtgatgaacccaataatcagccatcgaatttttcttctccggtcccataattccaactcgagacgtcttcaaagattccgtcgagattccatactcatcgtcacgtttcttcaatagccctggcttgatctttcccatattcacgtcttgtggtgacatcataagtgatggtgcaccaagtggcaatttatcccctgaaattaccaaaacataacttaaattttttttctgaaattaccgtctactaaaaaagcaagaaaaatcaattcctactagatttttctatatgtatgcaaaatatggattaataaaaatatataaagaagtattaattaccgcgatcggtctgccaagtgcaccaaaacttcccataagttttggcaatattttcaagctctgtcttagctacaagctcagggacccttggagttactagaaggcctgtttggatctacaacaacaacaacaacaattctagtcaaaccataaatctacataataaaccatttgaaatgaggataaagtgcttaattaaaggttataaaaataaaaagtaacctcatagtcatgagagtgccaaagcttttgctcctccggatcaagactctcaaataacctctccgacacaatatactcgatccctggcaggtttaaacacgaaacatgataaaaatacatctcttcaaaaattatacgcatgcatacttcgagttcaaaattactttgtttgtcaaaaaatgtttgagaaaatacacatatagatacagaccgatgagatggggtttagaggagtcgcaatcgtaaacagcacattgaagaaagtcttggttgagtcgatgaacatagaagttgacttcaatctgacggctaggatcgtgaccataacaagcgaaagaacacaaatggagactcatctgtttgatcggtttcaacgattgcatcatcgccgctcctttatccatcaccaccgtcttcatcgtctttggatctcccggaggtaagttctctgatccgtcacgtgccggatacgctcctggacgctcatcgctcgacgccattttgattttcaacacacaaaaacgatcaaccacgtactattatacaaattttatgtatcttttctttcttttgtgtgttattataaatatgggatgtgattgtgtttggtgtcattgctgcatgagcaaaatgtgacgtggatgatttgagaaggacacgtcattgcgttgtttgtggttatgtggcgagaaatattgagattgagctttgtggatgacacgtggatatgttaatgatggtgattacctttggccacttggcacttataattgagattcttgaatttggttggactctgtataatcttcatagaaaaaaaaaagatcgttatagtctttttcaaaaaaaatctatatacgggccgggttttatgatttatctaagtttcgatttttttcatgtcaagtcaagttttatttcattattaaaatattaattgaactatcaaaatctatttttttttccttctccacatcaaaatgtgttaagttatgacatccaagcaacataattaaagcggttcgctttgatataaattaaatttttgtgaactttatttattgttttttagataaagttttatagatgttatgtaggactttgttttgttttgtttcaagtcgtttcactccaatacaatagttttgaatatgaattatgaacactttgacaatattttgtcacattaaatttacaactacaaatagaatttatgtaattaaaaattagaaactattaagaactcatatcatatattagatcattttgtctgttctttgaacaccttttatgattcacaatttatataataagataaatatatatatatatataatatttgtctattctgtgttatatatagaattttgtttcttaatttaggaaatgaatctcgagattaatatagaattcccaacggtaataatacaacgtaaactccgtgtaggtccaaactttaaaaaaaaaaaaaaactgcttccgaatcaagctttgcttcggattccgaacctaaaataaacacatgaccgttacaccgatcctaatttaaatacaacatcatcactctcctctctctcccaaaaatctcgcaaactctaatctctctctttcttcttcaatggcgacgaaactcatactcaagaaaacgacaaaatccatcagccgtcaccaacgtaactacctccgccgtcaccggaaatctcagatcggatgctcaccgtctccggccacaaccaccgtaatcgccaccatcaacaaatcgatctacagatgtcatcgaacttttctctgtttgttttctcgtcacgcaacaaaaggattcaaaatcctcaaacctcgcgaagattttcagaattctccgtattcattgtttcacgaaagatctggtaaatcattcgacgagacgaagaagacgatcgtgttagatctagacgaaactcttgttcattcatcaatggagaaaccagaagtaccgtatgatttcgtcgtgaatcccaaaatcgacggtcagatcttaacgtttttcgtgatcaaacggccaggagtcgacgagtttttgaagaagatcggagaaaagtaccagatcgttgttttcacggcgggattgagagagtacgcgtcgttagtgctcgataaattggatccagagcggcgcgtgatatcgcgtagcttttacagagacgcgtgtagcgaaattgatgggaggttagtgaaggatttagggtttgtgatgagagatttgaggcgcgtggtgattgttgatgataatccgaactcgtacgcgcttcaaccggagaatgcgtttccgattaaaccgttttctgatgatttggaagatgttgagttgaagaaacttggtgagtttttgtatggtgattgtgtcaagtttgaagatatgagagttgctttgaaggagtttgttggaagagatgaatgatttttggttaatttcggtttagttgattttacttgtattaagaggatttgattaagtagacaatgatgaacaatagctttgtttgttcgatctgtctttgtgtaaaacatcctcgtgataagcaatttgttaatttgtttgattagtgtttttctttgtgattgaatcaatgggtttttaatgaagattttgaatttgaacagtggactgagtttgacaagatcgagaactttttgtgtgggtagagttaaattatgggcctttattgggctttttgttcaatggtgtgtttacatatcaaaacttttaagttgtttttgtttactaataagccatattatgaaacagtagttttgaataattacaaagaaaacaaaaaaagatcaatcaatatattttaaatatttttttggatcactttagaagcggaatgtcaaagctttatcattgcaatacaaaagttatggataagaggttacatgaaattgacttttgaaggagactgcaaaaatctagtcaatagcttgaatggaggcagctcaagatttgatttggttaactggacctatgaaagaagagcatgggagagaatatttgagcaattgacaattggacactaggagcaacaaatcaaacctgcagacattttagcgaagaaacaacaaacagaagtttcagacttcatatctcattttcatattccttcttgtatatccaatgagttgcactcagattacattgatccaagttaatgaaagttgatttttttttttaaactacagtaaattctctagaaattccattaatatataattactaaattatggagagattttactaatttttttaatttcttacaaaattatatctgaaagcaggtttcaatataatcaatatttttctaaaaccaattataaaaagaaaattaattatgaagtttagaaaacaatacaaactttttgatatagtaaaaattttaaaaatgaattgtaccaaaaaataatccaaatataagaaaaatgaacaacattagagtcataatttcattaaaatattttatatataattatagtaatctatatatgacatatatatataaataaattactatcatatatatatatattgataagtttatacaattattaatttatgataaatgataaggctatattttaacataacattttcaaaaatttattatcttattgttttatcgatttgtgtcaattctacattggttccaacttgcatcggaagaattttttaatttatatagattattaatttatcgagtattaatttatagaaattttactataccatgatttgaggacaacaatgtttatttttaatatccatttaaagttttaattattataatacttggcttttgggacatattcttagagatctttaagatatgtatattgtaaaatcttaacatatgttgaaagctcaattatataatattactatatgtcaaattattttgagactacataatgcatatctaataattgtgtttacaataatcctatataaatagaggttgatgagcaagcgactaagttgcaatcacatttcgtttggatcatctatcaccaactttcaaactttcaattttttttatagtttcctagtttttggaaaaatggttttactttttgtaagaaacttgtacaacaaaacataaatataactacacatattagacgaagttattgcgtatattaaaaatttataaaagacttgattggattttattgtttgcagaaagaggagcttcaatttaaggttggatctattgacgaagggactagatatgacgcattacgatgtatcgctaattgtgaaggtacaccaactcaaccaaatatgtagttgtattgagctaaaataaaccattcgttagagatatagggattttatgtagatcattttattaggcttaatattttagtcatttacttatttggtaaataacaagaatatacattcattcattgttgattgaaaaaacttggacatgataaattggtatgtgacttccaatattttataatgtatattttgtagatggatggatagaataataaccaacacattaaaatggcaatatataacacattttcactaaaaatgttttgccataaactgcaagttctctaaattaaacaatgtttacaaatgtttttattttgttttgttttgttaggagttgcttttgttgattttgatgaggaagaggccacaataattgtgaagagagaaaaactcgatgaatgtaaaattaagaaaaaattagataaatttttgaatgaatctaaaggaggatgtttctcttgttttagtcgctaataatttttggagaagaagtgaagtgaactggtaatggaaatcaactttcaaaataaaatgaagttaaaagaaattacaaatagattctcatttgtatttctccctattataatctacaacatcatatttttcttaatttgatcaatcttcataagtcaaaatgatcaacaacattacaaatttattatgttttttttgggtcaaattatatgaaattatatttggtaaattaaaaagaaaagaaaaagagagttgattgataataataaaccaccaaacccgtcttttagacacaacagttgttgttgccattcatacgcgcttccatcaaccctttggtcttggaagccaaatcaaacctttccttcaatcctcaaattttcgaaaattttctcttttgctttacgttctctcaattcttatttgtaagaaagtttgttcctttaatcaatcaaatcaaagagacttttgaagattgtttcccaatttgcgtcaatcgggatcgagtcaaatctgaaatcttctccactcatcatctggtacgtttgatgattccaaatcagaaacattaaaggacaagaaatgttcgaatttttgattgattctctctgattttcaatcatttggttgtagaagcaaaagggtttggttcattcattctctcgtgttgcccttatttcggattcggatagatttggagctaaattaggggttttgacttttttagtttctcccattcaataaatttcgaagcttgtgagggaaaagtcttggtttttattgtcatttattactttgcttcttaaagcttgagagatcgattcgtatattgattcaaacacttgacagttgtgtcttaaactggaattgttgcaattaaatgtttatgttttcaatgagtctctctagttgagtttgatttcagcttcttgttctatccaacagactataagacttaatcaagggactttttgttcgggtttggttttaaacgtcttggattcgaagtggttaaggtatggatgaaaataatggaggttcaagctcacttccacctttccttactaaaacatatgaaatggttgatgattcttcttctgactcggtcgttgcttggagcgaaaacaacaaaagcttcatcgtcaagaatccagcagagttttcaagagaccttcttccgagattcttcaagcataagaatttctcaagtttcatccgtcagcttaatacatatgtaaagcttttgtctttgtatctcatctctttggggattggtgtttgctgcatcgctaagattaacaacctttttgtgtttttgtttgcgtagggttttcgaaaagtagatcctgagaaatgggaattcttgaatgatgattttgttagaggtcgaccttaccttatgaagaacattcatagacgaaaaccggttcatagccactcgttagtgaatctacaagcgcaaaatcctttgacggaatcagaaagacggagcatggaggatcagatagaaagactgaaaaatgagaaagaaggccttcttgcggagttacagaaccaagagcaagaacggaaagagtttgagctgcaagtaacgacattgaaagatcggttacaacatatggaacaacatcagaaatcaatagtggcatatgtttcacaggttttgggaaaaccaggactttcactaaacctcgaaaaccatgagagaagaaaaagaagatttcaagagaactctcttcctccaagcagttcacacatagaacaggtcgaaaagttagaatcttcgctaacgttttgggagaatcttgtatcggaatcatgcgagaagagcggtttgcagtcatcaagcatggatcatgatgcagctgagtcaagtctaagtattggcgatacacgacccaaatcatcgaagattgatatgaactcagagccgcccgttaccgttactgcgcctgctccaaaaacaggcgttaacgatgacttttgggaacaatgtttgacagagaaccctggatcaaccgagcaacaagaagttcagtcagagagaagagatgtcggtaatgataataatggtaataagattggaaatcaaaggacgtattggtggaattcagggaatgtaaataacattacagagaaagcttcttgacatgaatgaggtttttgtaaaatagttttcttttggttccactgagattattgtatgtgttcattatttattactctgtttctgtaaaaacaaatctctctattgtttgaggcaggagtgacataaatgcatatgcagaattggtttctttgccttcatatttcagttatataatttacagagtcagttttgtttgtagcaaacatatgaacaaagagagagttacagagtttaggaaaagaaacaacaaaattctaaaaagaattaaaaaagctccgatgccgggaatcgaacccgggtctcctgggtgaaagccagatatcctaaccgctggacgacatcggatttgatgttcatagaactcttattaactatatactcaatgatggaccaaacaaaccaacgaaggagatcaatgaaacaattggttttgagttatctgacaactatttcatcaaaaataatacaaaatgcaagaaattttgtcatgccctaataaaaaataaaaactcataattatttagctaaataaagatttcttgatcaaagattcaagaaaatttctatagctacaaagattacattatgatctaagaaaagaagtaaagcaaaataagaagaagaaacaaaactatctaggaggagatctcgttgatagacatttcccacaagagacaagcttcaacaacgaatgtaatcgtaacttccttgttctcaccttcaatctcgatagctacaatttcaaagtttcaatttttcaatcacaaagacaacaaacagagtcatatatataaagaatagagagaaattgaatgtgtttaccttgcgacgagtgcttcttgatgctttccaacatatcaagcttcttgatcttggttcaagtttcctgcaaaaaccaacgaattatcaaacaaaactgtaaaaaaaaattttaggaacaagttttggttaatcttgttcttacaaattctcttgttcaagcttatttgcaatctccacagctttgtgtttcgaccaactgtttccttcagcttgtttaatcacttgagccaacgaaacttttcctctcacaatgctctggttctgattttggttttggttttgacttgcttccaagtgtttccttctaactcgagtcattggagattcagagtcagccacttcaacgatttcgcttcttccgctttcacggaatctctcaccgttgcttaaaccttgtaatgacgagaaaccgaggtctttcttcgactcggttctcatctctaacgtgactggagatccaagaacagcctcaaacgctttcaaaatgtgttcttcgaaattctcagccgttgatttcgctattggcgaattaaacattaactgcaccataggagctgcgaaaactacgaagttagaaaagctttgttttcaatatgaacaatgttctactacgtttatgcatttacctgagccgatactaatcgaaaagatcttcccttctttataaagaaactctcgtaagccgttaactcgaacattctcgataaccgctaaccaaatatcttcaacggaaggtcggtttttgcagctgaaaccttgcttactatcatctcttcttgttccggctacaacatggttcgaaggatccgaatccgtcaatggagtatggttaaagctagcatcagcagaagaactatgcggaagcaagtactgtttatcaggagctagctgtagcaatgcagcagtgagccaagttagtttatcgttcgatactctcaactgtttttctgattcagatagtgttttcaaagcttgtttcagcttctccatatcttctttagacactggaacaacggaaaagaaaaatcggttattacagttacaaatacttctcattttggatgatggaaatgtttgaaaagctcacgtggttgtcgccggaaaaactttcttttacattgatctttagtgaagtcatagcttcccgcgaggatatcggttatgacggttgcgagctgtgacatcaaagctaatggttctaggccggtttccattattattcttaggttctttacggtgtttacagtatccgcggataaggctagatcaagaagatcaactaatttctcatcagatattaacccaacctgaaaagaaaacaagaacataatgagaacaatgccaatggaaaatatagaaatgtttttgatcattaccatttcttgaactaaaggaacagagattcttgttccaagcaaactcagctgttctagagtcatttccgcgtctctcaaggaaccatctgatctcgaagcaacaagcttcaacgcatctttatcgatatcaatctcttcttttgatgcaataagttgcaaagaatcgatgatatctacgtctttgagcttagggaaaaagaatttctggcacctcgaaacgataatgtgaggcaaaacatcaagactcgaacatacaagaacgaaaaccacacgacgaggtgctcggtccactattttcgatagcgtattccaacaatctgttgacatagtatcgcaatcatcgaatattaacacaagctgctgcttttgctgctgacgaatgttcgttttatcgagcaaattctcaaagtcgaaactttttacaggacccatttctcgaatgtaccggttcttaccatcatcataagaaacacaagaactgcatacaccgcaaggctttgattgttccgtagaatggcagttcaaagctctagcaaatacccgagcacaagatgtttttccggttccatttggaccgtggaatacgtaaagaagtccaactcttcgtttagctatagcgttagacagagcctgcaccacaagattctgtcccaaaagatcccggaatgttcttggagcgtacttctgcgtaaaactttgatgccaccgagtatttttacggctactcttcttaccaatgactgaatcttttccattcttgagcaaattgtcagcgaatatacccaactcgcctgagtaatcatgcacccattcttcattgtctgcgctatcgactaaaagaggtaacgcctcgcgatcagaagagcttgaatcagaaaacatcggcgtaccagcttcgcctttccttccctttgaatcagatattccacaagataaactcctaccagctatatcaagaaaagttttgcctctatgatgaattcttgaccaattaaacggtattccacaactcatgttctgttctctatctcttcctcctcctccttcttctccctcatacttctcaccacgaggcactgagttagaagcaatagacatctcactctcattaccagcagcattgtctctaacattaacggcccgtcccgctctcctcgtccctctaaacttccgtcttctacacccatcaccgcgcggtctaacattacaagaaactaaatcatcactatcaccaccaacctcatttaactgatcagaaagagtcttgacaatagcctcattaaccttcttattaatcctatctttcgataccgacttcacggaaggaacactataaacctcattaacttcttctactctataactcttcctactcgacctatcaaacttttcatcagaaggagtaactttagatgttccaaaactcacaattggagaagaaccagacaacctaagaccagatcttcttcttccctcacgtgagtcctgatgatcttctttcaaattcgggctcgctgatgggtcacgaagtgatcttgatctctgaagaacgacaagatctctcataagaagagaccggtcagttaaaaccggactctgtttgttgttgttgtgcatatgattcttcaaatgaatacagttggttaagtgaatatggttacgaagatgctcaccgatgtctccatttgaatctttgagaactcgagaagaagcaaccctactcatgaatatatgatcacaagtgctctgttttcttcgttagactcttgtctaagtatctatagaagaaccaaatcaagctgtatctcattttcctttgagaaatctctgaagtttccaaatttgaaactgatttcaccaactttggtaatagccctaatttcccccaagattcactgaacttgccaatcagaaaactcttcgaaataacccaaaatttaagtaaaaatgtaagctatgtgcttcttctagtacacgaaaccatttgaaagaaacacagagtgctaaaatctcaaaaggctctgtttctttttagaaaagattcaaactagagaccagaaaacaaacaaaaaaaactgaagggtccgtttcaaagatttgcaagtgggggaataaatagagaaatgagaacgacaccgtatatgaaagaagtcgcagatgtctctccttttttctttctttctgtatttaccaaacattcacatgtagaacctgagaggtttctctggagaaagtgatgttttttgggcctttttggcaggaaaaagcaaagataaacgctgttttcagagtgtagagagaggtttatttttcactgtttagatatatagagagagagacagagagggaatcttgagagagaaggtttgatgggtttttgtattttgagatctgttttacggacacgaacacagaggcaatggagaagaagcagagcacattgccaataaagcggtttgtccgtttccgggaagtgaaaaagattttaataataacatattttaaaataaaaattatttttctaaaaaaattgtttggttgtttttaattttgataaaaggagagcaaagagtttgcacctttgaattgagctgtttcattgtttgtattatcgttgttaagtgatgatgtgatgggtgatgttgtacaattgtgcatcaacaatacaaaaacagaaaaatgggcactatgcaatttgtattgtctattatgcattatatttagatggtaataatacataaataatttttttactttcttattatagaatattttttctttctagaaaattggtattctaattttagatttttcattgaaattttagtgaatgtctatttaaaaatttctattttctaaaattttatataactatatacttcttatattcaaaaccaataataatttaattgtatcattctttttactttttagttgacttgacatcactgtttttggtagaagtgtgaggaattggactcgtcttgattctttattggtgaaacaagagtctaggtttacttgcttagtgagggagtgttaatttgctataggaggtttagcttgatgtgtttagtggtttgcctttgatcattatggttcaagggagattgattggcaagtctaataaatctttagaattatttgtttattatgttgacttcattatttctatttagcttttcttgtttgaattgagttttcgaggatatatttatcttctgtcaacttttagtttacggaaagatttgatatttggcgacttcgtgtatcaaaactgtattccacttttgtatttctcaatcaaattacaataaaaactcttttttaagtaagacgaaaagaaagaattatcatttttattgtttttatatcatgggattctcaagtagcttttaattttatatttcttataatacgattgatttttatttttaatagttgtaaattatattcaaaaaaagcggtaaccgatttgttttacaattcaatgcacactctttacaacattgtttctattaaaatgaaattttcttaattttgccatgatgtaaaccaaaactgaatgcctcccactaacttgtttgtccctccactccgaatcgtattcaaccggtttcaaacatttttgtcaatcatcttgaccagtttttccggtggcgatggttgttcaccatgtcttctagcgttccgttctccccaaatcgagtgaatcttataatatgattgattgccaatcaatgattggttattgacaaacttaagtgtcaagtgtcaacttagtcgaatcttttgtactccacagaagttggaaaatgaaaatgatacaatcatattagcctttcaccaacaagcagtaagaacctactcaatttatggaatattttttaattacccatatacaactgatataaggtacttattaccaaaaagaaaaaaaaaattgacaaggttcaaccttattaatgttaggctcagcaaatgatcgagtggaccgtgtttgaatcacagctgaatacctatttgttcaattgttattttatcaaacgggtgatttctatctctatgctaaaaattaaaaatcaatgatggaaaacaagaaaatttcaaagaaccaaaaaaacgaaatagaataatcaaatttgtaagaaacaagaaatccgactagtttcaaatttttgttagaaacaataaacattaagaaagtaacataacagaaaaattactataaaactgcggacgatattaatgatggtacgatggtcaatgacattgtcacgtgaccacatttagtgatgattagcttattcattttgggtggtttgcttattctttttaacctgatctatttaaatcactgttatctcttttcctaataaggacaattaccgtctttttttttgggacccaaagatataaacaaatgtagttaaatcagtttctaaataatcaccatataagcaatacaaaagtatcattatcaataaccgtaaaaccctaaaataactaccaaaacataagagaactaataatcaggtaataataagccaatcgtttcaaagtctttttctaaaaaatataacaacaaacggtcaaggtggatcattctgacctgacctcacgatattagttttgatctagactcataatacctaactattaccaattgacctataaaaatactttgggctatatagtctatattaaattcaccatcactccatcagttaacttgttatgcccataagtttactattgttaatgttgtacattgacatataggtatgaatggttgtagtggttaatgcggataaatctgtgtgtgggctagactgttttttatttactattcacaattatgttcgtaataatatagataaaaagaataaaaaaaccagacaactaccgtctatttttacagacaaatagagttaatcctttatgttttgttgtatgccctaaaaatattgtggattgaactaacgaatttgttcattcctaacatcataaccattcaaaccctatatatgaaagaaaaataaatatttttgatcatagtataagaccatctccaatgtatagctctatatccacctctaaaatagagttactctattttagaggtggatttctctccaatgtatatcttcattttctactctaaaaaagaatatttttaaaaatattctatttctaatttatatactaataccttttaattatataatttacaatttgaccccatatattatagatttgcaaaattcccaaaaaaatatgatattatttaaattaaacactacttatttattaaaaaaacattacatcatataacaataataaaacattacaaattttattttgtgatttgaattcctttcaaaactcacatgttcgggcatttttttagagtgaacaaggacggattttacaaaaacaacatgtccaacgacaagatcaagaaactccccctccatctacttcatttggacaatatttcgactatcttggcggatctacaacaatttaccggactattaaatcactagttaattttatgttttagtttttttatgttgtttattttaaattaggtacttgtttcttgttaagtttataaaattatgttaaatttaatacttaattgtttgttaagtttataaaattatgtgttgtaattattgtttgtaaaatgattatatgtattaaataaaaagtttaaatttgagggattaaagaataaataaaaaagttgaactcaaaaatagagtagagaatagagttgctctatatatagagtctgtataaatctctatttttagtcaattatagagtggagttagagaaaaattttgaatttttactctaaaatatagtagggttggagatgccctaacactataaacactataactcaatattaagcgaatctagtaattggctagtactaaatgaaatgaatagctccaaaatccaaggaacaaaaagacatgataacttaaaaagacgaataagagtgaagaccatttctgacacaaatgttttttaaagttttgtcattctcgataattttatagaaaaatgtggagggagggaatcattttgtatcagacctagtgacatgtaaattaaataaatatatacataaaaaatttagaaaaatctttaattttcttgtcacaacttattttaatcccaccttgttcttgttttgtaaatcaaagctgattttgaataaccaaaatacttagaatttgtcaactgtcaaaagttcattagatcgttttgaccccaacaaagtataacaaatcctaactgtacatttgtacctcaaacaccacgtctcaccatctcacactttagatttcagtaactaccaattgctaaaagtattcaatatgatatgcgagacttcagattctagtcttcttgcttcttcttcttcttctacttactaatactaagctttgctttttgtgtcaaagttcatggaagttactgtccctcctctcgaatcagattcgtgggctcacttagaaaatacctaggaagctcatatctagcacctgcattgagtaagtataagccagtaagtaacttaaacaataaacgagagaaacgaattagatcataagtagattatgtttgattgtcagcctcctcgaatcttttgaactaagcagaagttccaaaataaacctgataacattgctagatggacccatcgactttgctacataacattgaattctttagttgttaaagaattttgggcttaacttaaaaagtacaaagagggtcttttattattcgcacatggaccagttaaacattgagccgggcctggttataagcagaacatttggggatattttaaaataatggactatggtaccaataattttcttgatccgtatcatcaatttataaatagtgtaatctgacacgatgagctggttgtgtcggtaaggtcaatgactgtcggaactttacaaacttgtgccgtttgatatttcaatctttagtcttttaccaaccaaaacactcaaagcagatctcccagacccactaatggaccaacaaagcgagagagtgaagcaattctgcaatcatccgttaagatacgcaagaattaagcaggagggagtaattacaggtcggtcaaataactgcgatggatgcggtgatgattcaggctacggatattactgtgaactctgcaatattcaagctcatgtggcttgcataggttggccagacatcatcaaccacccctgtcactccagacatcctctcaagaaagtctcgccagagacaattgactatactgatggtaaatgccagttttgtagaagcccacttgttgatctcatgtatcattgttccatttgtaatttcagtgttgatttgagatgctggttaaatcccgcaccgcttactatatatgagcaaaagagccacagccatacattaaccctcatggcgagaaaggacgccttcacttgtaacgcatgtgggttggttggtgaccggaatccttacgtttgtcttgaatgtgatttcatgctgcacaaaggttgtatcaatttgcctcgagtcataaacataaatcgtcatgaccacaagatttctcgcacttatcatctcggtcacggtgattgggaatgtggagtttgtcgccaaaagatggattggacccttggagctttcttttgctcgcgttgtcctaattatgctgttcattcaaagtgtgcgacaagggaagatgtgtgggatggaaaagaactcgaagataagcctgaagatgagggagaagaggatccatacaaggtaataaatgagaaagaaatcattcattttagtcatgaagaacataatctaaaacttggtgatgatgataatgctgccgattatgaaaagatgtggtgtgatgcttgcatcaggcccatcgattctgatccattcttcaaatgtgtggaatgcaagttcttccttcataaagtatgtgccagtcttccccggaagaaacgaaatatcctgcacagccacctgcttcgtctacagtatggtgataggcatggtaaacctttcaagtgtacaagttgtcttcaatattttgatggcttcaagtacaaatgcaattttaacagcgcatgtatccacatgaatattttatttgatatccggtgcagttccatttctgagccttttcagcatgaactgcatccccatcccttatttcgtacctcaaaagagcacaagacttgtggagcatgtggtgaagattcggagtatgtcttaagttgtattgtttgtgatttcgctttaggcatggactgtgccactttaccaagaaaagtaaaacacagatgcgacgatcatgtcttatcgttgcatcatggtgctggaagctccaacggtcaattgtggtgtgatatttgtgagggaaagacagatgcaagcgtatggtattatggttgtgatgaatgtggggtcactctccatatcgagtgtgtacttggagacatgtgttacttaaagccagggaacaaatacttgggaggtgaactagttcccaatcatggtatgactagacctatttgcatagtctgtgaaaagcgttgcatgttccctttctttctaaagggtattgcatattcagattcaactgttgtatacgcttgttcaagaaagtgtgcataccgaggccacgaccgttgggaggagtggtatagtaaagttcactgtgagtaatgagtatgtctgaaagatccacaaggggaagctatatgatgatgtatcagagtatatttacgtttgcttgatatcttctgtatcttttctttctcctattttctttcttttcatgtatttgggattcttctagaatctgagttaatttgttttcggatcctgtagaaaccagtgtgaggggtttataaataggatctatttgcttctatgtaatgcagtttttttttaataataataacaatagaggaatgattatcttcagttcctttaagtttcatgtatgcaaatcctaatcaaagctccaaaatatttaagcgacccttttgtctcaagtaatttattagtcatgtaagagaaagagtgatggagcatatatgatgcctattcgtattcctgcaaattttatagttgtgtgtgtgtatatatacattgcataagatagttgtcaacaatagcggatctagagaaatatatagtctggggcactatttttttaatatatatttatcaaaaatattatacataaaatttaatttttacaatttatgtaggtatatataacatgaatatagaatttcgtaattattttcatatatatattaacatttaagatataacacaaataatatttaatcagatcacaaagaaatcttattatataaagtatggttttcaaagttgctaactcataggattgtgccacgtgtcaagtcaaacgatcagatgtttacatgtgtcattcaaaatttaactttttaattctctaagaaaatagaaaatcttaaaaagtaaacaaatttacatatactaatttatatgtctatatatttataaacaattaacatttattcaacaaaaggaaaattaacaaatttgtctttaactcatgtaatcataagtgaaaatagaacattttgagaaaaatagcttagcttacaggatttaacttttcaattatttttatttattaattttaactcatttaatattaatttgcatgatgtaaaattaacttacgagattacggcatatatagaaaatatattttcaacaatgtttggtttctaaatatttttgtggatttttttttttatattaattattagccctaggcgtttgggtattcgggtcgggtatttagggttcgagttttcgggtttagaagtttaggacccgttcgggtaatttaaggttttgggacatttattcaacaaaagaaaaattaacaaatttgtctttaactcatgtaatcatatatatgaaagttggccaactctctccatatgggtgacacatcatcacacaagaaaataacatgtgtcatttaatattgattaaattaaaattagcaaaattaattgagagaaaatcaaaagtctcatattgtgttaaatcctccattaattcatttcttaaatgattttttcaaaatataaataaaaataaaattacttatttaaataaatcatttactacttttattttacttttattattttatattttaaaaaaatttaatggtcaatggtcatcactctataatgactaaatagttgtttgtgttgtagtttatttgtttgctacctaatattagtgtagttattttaccttgatttttttaattattattacgttatggttcatatcttatcatatgaaattatgtattttcatttttgtatctttaggtaagttcgtaacattgacattcaatattttcaagtaatagacttttgagacgttaaacataccacaaaattcaaaacaaatccatttgtctcttacggctatatgcaatagtataaaatctaaaaagtgttactaaaataactctttaatttttgcttctttttttttcatacgaaaactcttgatatcaaaatatcttatattcttgttgtgtgtattcatgataatgaacaaattttagaatcttggatataaaaataatcagattatacatgaaaatatataaaaattgatatttagagtcaaaaatgaatctaacaataaaaatgtaagtacataagatgagtctaattttactaagtataaaataacaaacaaaaaataaacataaattagcgacaaaaataattaacatatttttatctaaagaattttcaaaacaaacccacgcgtagcgtgggaattcatctagtcataagtgaaaatagaacattttgagaaaaatagcttagcttacaggatttaacttttcaattattttcatttattaattttaactcagttaatattaatttgcatgatgtaaaattaacttacgagattacgctatatatagaaaatatattttcaacaatgtttggtttctaaatatttttgtggatttcttttttctattaattattagccctgggcgtttgggtattcgggtcgggtatttcgggttagggttttcgggtttagaagtttaggacccgttcgggtagtttaagatttcgggtcgggttcgggttcggattcgagtttatttatatattgaaatatcaaattttgtgtgcaaatctattaaattacttcaaaatttcaaaaattctcaaaacaacaccagtagttttgcttgaatatatctaaaaagacacaaaaataactaaaatatccaaaaaatcctaatattttctatatataagtgtaaatataactaatatatacttatatttgaaatatgtttggatacctattcgggttcgggttcgagtttttcgggttttgaagtttagacccgttcaagtatttgaaaattttcggtacacccgcctaaataggcgggccttatctagtatcaacataaactttaactaaataaggaagtttgagctaagtgtaacattagataattcaaattaatgtttgtggtagaagaaaaagacaatgttaaaaaaaaaaaggtatctgctacctagactcgaacccaagcacggattgaaagagtgtggggacacaaccactaacgctagcttcaaatatatcagttgtattccaagataaactttataaaccttgtgtagggcacgtgccctacctacccacaacgtagatccgcccctggttgtcaaaaagacttcataagatcattttgaccacaaaagttcacaactcttggctctgtacatttgtacctcaaccaccatctctcactttagattccagtaactatacagagagtgtctcctactaatataccgtgtttctattcactatcaattgcaaaaagtattgaatatgagagacttacttcaacttctagtcctcttctactacttactaagtattgtgtcaatgttcttggaagttactgtccttcctctcgaatcagattcgtgggctcacttagaacgtacctaggaagctcatatctagcacctgcattgaataagagcaagtcattaaggtaacaaaacaagaaacgagagaaacgaatcagaattgtgtattacaaacctctttcatcccagcacaatgttaggtcacggttctgaacaatcacgcctgcactgtcaacaatagtttgtgctagtttcaagtcagcttcagcagcagctcgaagtgcttcccatatctctggttttcagtaaatttcgctcagtttccaaatgtacatagtgcgatgcagcagattacaagaaagagagatatatatatacctctttgaccaccatagtgtggagaggtgtcccaaaattcctcacgcatgttcgtaagttgtgcccttgtgattggctcagtatgtgcccacggtttaggtttcatgattttcttcctttttgctgtgtcaaacgtacaaaactcataagagaatgatacaatataaactaccaccaattttaaaacagttctttcagtaacaccaatattatagccatctacttcagaagatcatcacagtttcaatttcatcaagacaacaaatacagtataaggcagaacgaatcagattatattgtctattgttcacagaacaatttttcttggtaaaaatggaatgttataacattagtaaacggccatttcatttcaatcataccatcgataacaactttctctgatccaacattctaattctgagcagtagaaacaatgttgaagagcattctaattctctgctgaactaattctgagcttcaaaatttggaatctttaacgaatcacaaacatgtcaacaccacaataaactgatatttccttcgaaatcactccaagaatcataacatttgcaagattagttcatgttaacacctcaaaactagaactatcaccaagaatcaaaacattacaacacaagtataaatcgtagcccaaattctgagaacaaattcagcgagacaaacggagtgcggaattaaaggtttaagagagtatcgattccactaacctccgccttcatttctggcctgagaagatccgatacaacccattctcgaaccgttgagagtcgcgtttgattaggtgaaaattggaagtcgcttcgaacaagtaaagtaaatgccagtacaaactcgaccgtcgggaacgaaacggagaaagatagccgccgataagagtttcacggcgggagaatcgccggagaagtctgcaagagtcgtcttcaaggtcaaattctgttttgactgccaaattaggccatgaatgttttgttgattttggtgggtttttggattttggattgtggcttttggttttttgtttttgattttatgagtttttgattttggtggagattttagattttgcaaaatcttaaatggtaacttttctagtttttgatttttatataattattatttagaaacgttttaaaattatttatttaaaactttatttttatttttaaaaacaaaaaaaaaagagtttacgatagaatttgttgaaaatcccaaaaaagtgaattttggattttaagaacaaatgactagaatcttttaaattttgaattccctataatttaggaaattaactttttacaaaatcatgaatggatgaaaaagtggattttgtaaaatcaaaagccaaaatcaactttaaaaactagtaccattcaaggccttagtttgttagagagaagaaagtgaaaacagatctccccgattttatttatagtcactttacttgccacgtcatattattctggattagtatattatatctgtttgaattaatcgtcagcgtctgtagtccaacggttaggataattgccttccaagcaatagacccgggttcgactcccggcagacgcattcttttttatcattttaatcagtttagaaaaacataaaagataaagacaaatgtgaattgacgaatacgtcctcgtctttatcgaagcgagcaaggtaatagatcagaacgcgttaacagggcagtttagtaaatttggccacacaaatgttagatttctttgtgataaagacagtacacaagtcctttgtctttctcgtttgatattttccaattccgcgtctttctctgttgaaatcgaaaaaattttcaaaacaaaatctaaggaaaaaagagcaacaagtttcaaatctcatttgggtttttcattttgaaaagaaggacccatttttatctctctctttgttttgttttctcgaatctgaaggagtaaagttaaaagctttgaaggagagaatcaatggcgggttacagagcagatgatgaatacgattacctattcaaggttgttctgataggtgattcaggtgtgggcaaatccaatttgctttcacgattcacgaagaacgagtttagtctcgagtcaaaatccacgatcggggtcgagttcgcgactcggagtttgaatgttgatgataaagtcatcaaagctcagatttgggatactgctggtcaagaaaggtctcatctttttcaaccacattgttcatttctcgatctggtttcttatattagaacattttgattgaagttttggggtttatggttttgtttggttgccaaagacagtaaattttcagcttaggttagatctgtatcaattgatttagatccattggtattgatcacttttataagaagagatctggattagtatgtgattttgacaacttgggttttgtgtaagataggagaatcctatgattatgattataaagttatcagctttatcaaatttcttctgttgtttttgctattttaggtttatgtgagagagcttgattggtttcagtaacttcatttctacgattcttagctcttctttctcagatttcacctaagattcttcaatcattatcgatttcttctgttgtttttgcttagtttatttatgtaagagagcttgattggttttagttggattcttaaactttcatttgaagcttttacttggtcttaatttcaaaattgaaaagcttcttgctttgtatgatttgctattctccatttctctgatcagttttgtaaagcgtgcatagtctgaattcgaaactgtaaagcttcttgccttttttgtgttcctgatgtttcggttaacttaattctctgtttcgttgactttgtttcaataggtaccgagccatcactagtgcgtattaccgaggagctgttggagcgcttcttgtctacgatgtaacccgacactcaacatttgaaaacgttgagacttggctgaaagaactcagaaaccacactgatccaaacattgtagtcatgctcgtgggcaacaaatctgaccttcgccatctcgtggctgttcagactgaagatgctaagtcattcgccgagaaagaatctctctacttcatggaaacctcggctctcgaagccaccaatgttgagaacgctttcgccgaagtcctcactcagattcaccacattgtgagcaagaaggcgatggaagctgcgagcgaatccgctaatgttccatcgaaaggagacaagatcgatatcggtaaagatgtttcagctgtgaagaaaggtggatgctgctcgaactaatcagagagtagaattattgttaacaacctaaggatcggtttttgttaacggttctatcgaatatgaagattgcttttaggttgagtaatgcccatttggtgtatttctgttatttatctgatctatcaatgttattgtttgaaaatgctatgtcaaattttcagaaccctaaattatatttatctcaaacaatagaattgttgaaaagaaaagataaaaatagtttctgcctttgatgatttcagtttggttgaacataattttcggtttgatttcgtttcaccgtatcggttcattttggttaagtggtactaaaatcgatttctgttaggttggaattttgttgtttcgatttttttggtacaaaaccgaaggattaccaaaatatccggtttagttttggtttgtttcggttagccttttttagctcaatttagagcttgaaactgagcaatcgccggagaaactctcactcacagttatggctacggcaatggaagagccaaggaagctgagaggccacaaatcaactgccacttgttgtatagcttctcgtgaccggcctggaattgttctcacttccggcgaggtttcttaatctctaattcaaacctcttttttccgatgaatttaggtttcgttattgtagttacttcgcaagattcatagttttccgatcatacgattataggatggttgcatttgctggtttgatttgcgatgtaaagatgttcaattcatcatcgatgttggaacagaaccagtttcatctctttgtttcaagacaggttttgtctctttgtgttttgtctgtttctctctctttcaatttcttctctttgttgcaatttggtgataacttttatttgatttttcaggtaatgagaacattctctatgcttcttgtggaaacgaaatcaagtctttcgatgttcatacggtaatttaaaatgttcaaactttgattaactaactataaccatatccttcacttagttttaaagcttctctctttatgcaatttcatagctaagtgctacttcttggaagccattagagagttacaattacaacaaagatgaagttaaccaggtagagatactaaaaactcgacttttcgaaaaagttatcatatttacctatgacattgatgttgacatcttttgatttgttaaaggtagtatgtaacggaaggtcgtcttttcttgcttctgcagatgattccggcgatgttaaggtacactcaatagttgttcttaatacttaaaactcttaaagattacataaacatgaattttggtgggacggttctcggtttgattagtttgcttgtacacagatcatcgaccttggtcagaaatgcctttataaaacccttagagctggtcacacaagtgtatccttacttcgttttttttacccattctcgtctatgaaactctactagcctcgaaaaaatgtctcaaatcaacaccttaatgagacatataagatatgtagttctgtacaattcattccatggagaccttgggaaggtaactaatatcttattgtgatttgttattatatatacacatctcttctaaagtgtctaatttctttcagttataactggtggacttgattcaaagcttgttttatgggatttctcaaaaggtcgctcgcaaaagattatagactttggtaaagactatgccactaattctggtttctttagccatatatatatgcaacaaatctgattttgcaagtcatttctgtaatctttcaggatctgatacaaataataactcgggacaatgcctaaaccctgcgtttgttcactcaatagcaataccggaaatggacatggttgataagttagacaagatatgtgcggttgctagaggtgatggaattgtcaatttgatcaatatcgaatcagaactttcccgaaaaggaacatcatcaaaaggaagtagcagcagcagcagcaacaatgtggtcaaaagggtttgtttagactactctgttggtggacacaattctgctgtttcttgtgtagccttttctctgtttcaggagaaaggtagattcttaatctctggtggtaatgataaaacagtcaaaatctgggattgctttaaatgtcttgatccaaacaacaacaacaataacagtgatctcctccatttgaatattaacctaagcaagaaggtaactaaaagctcacattgttctttttgctcttttctcttttgtctgattctgaacatttgttggtgtttcttaaacaggtgaattggctttgcacgaatcaatctgattctgagaatcttgtagtgtgtgacacaacaagagtagttaaggtttactcaatctcttaaataggcctgatgggtccataaaaatagtctaaaagcttcatcctttttgacattgttattagtctaagagattcatttttatttttgacattagaatggttgcttgatctacaagttagtttatttttttgtttgataaccaaattataaagaatgattacatttaattattgaattgttaaattcttttactatcatcaacttcattacgtactatttgtttgttctatacttttgtgtatttaacttctccctttcagatttttcttcttgtcccatttacacaattaagattttgttacgaagttgaaatccaatttatttttcaataaattatgttataatcataacaaaaaataacctaccattctaacaatctcaactcagagcaacaagtaatttctatttggatactacggagacttagaaaattaagagactggggaaaaataacaaatcaaacacttccctctttaagagtaaagaagtctctaaactgtgacaaactcacaagacccttctttcaaattccaatctttccaacattcctcttctgtccactatgaaaccgcagcaaccacaaccgccattgctcctcctcctcctcctcccacttctcttaaccaccgtctcctcctatccactaaacccaaaacagctcaaagctctccaatcactcaacatctctacaccaactaatgatccctgcaacaacaacaacaaccaatcctcctcctcgtccataacttgcgacgacgcttctccttaccgccacatcacctcaatctccttcacaaactgctcctccactctatctctcccctccaaaacactcaaaccactctcaaaatctctcatctccctctctttcactaactgcccttcactctctcctccataccacctcccaatctccctccactccttctccgccgtctcctccttcctccaaaacaaccgtaccaaactctccggcctcttcctcgctcgtctcaaaaacctcaaaaccctctacatttcctcaaccccaatccaaacctctcgtcgtctttatgtcatcctcggaaacatgcataaactcacttccctcactatctcaaactcaaatctcactggccttatccctaaatctttccactcaaatctcagatacatagatttatcaaacaactcactcaaaggctcaatacgcatttccattactcgtctcaaaaacctcaagtccttaaacttatctcataactctctctctggccaaataccaaacaaaatcaaaagcttaacttttctaaaaaacttatctttagcttcaaacaaactatcaggaacaatcccaaattcactctcatctatctctgaacttacacatttggatctaagtatgaatcaactaaacggaaccgttccaagtttcttctccgagatgaagaacctcaaacacttgaatctcgctgataactccttccatggagttttaccattcaacgaaagcttcatcaaaaatctcaactttttcgaaattggaaggaacagtgagctctgttataacaaaactgttctctcctcgaacttgaaattggagggtcttgctccgtgtgataaatacggttttcctttatggtctccgtcgcaaaaggaggaatctttgtcaggagaaaacgattacgacgttgaaggaggcaatgaggagaagacggagaatctgaagacgaaggaagaagaagaagaagaacacaaaggttccaacaagactctgtttggtctcggcattggtcttttctcgcttgtgttcttaatcctcttcctcttttatctcgctaaaaggtgtcgtttgatttgagaagtctgggacgtagtaattttgtattggttgtgtattcacccttctctccttctaaatgttttattttattttctcctgttttagtatttatgaattgtggttatgagtgtatttatgaattgtggttatgagtatctttagttttatttatacaaatttgttcaaaacatagggttagtttagggactgtgtagtccagagacatattcatctataaggacaatgaaatcaaaggagctgcttttgattgattttagttttgatgatgacattgaataaaataagaaacatatctccaaggttcttggaagatttagattctaccaaactgatgtcaaaagatttactacaacaagaaattctttaacatccaaagataacaacttaaaataagctagaatcaacaaaaatctttaaagatcaaaacactttttaaccagtgatgttctgagacttgttgaggataactccttcatacttgacctggaaccatttcattgcatcatccttggttactctgtgttgaataccaacacgagtcttgcatctacggcggcgagccacacgatatcctgggcgttcaaggacaacgtaaaagtccattccgtagataccagtggaaggatcgtacctatatacacaaaataaaacacatgagaacagtaaacatttcaaataaaccagttaatcagtttcgaatctaacacccttgaaaaacagtaaagcattcatcttttactagacccaaatctagcattcaaccaaaaactagtaaagggctcatttttaatccaatccatacttaaaattccacaaaaactataacactcagcgaaaaccaaagtagtctgcattctgactaaacctcacaaaacccctaatttagagacttgacatttagatgcaactgaaattcttttaaacatatacagatacatgaagaatccaagtaccaaaaccattatacaaagccattaatgtaactaattcaaggaaactttcatcgcaaaagaaacagaaaacttacttgattccaagatcaatgtgctcttggataccaaatccaaagcaaccagtgtcactgaagttcctcctaagaagctcatactccttaactttcaaaccactctcaagaagctgcattgccttctcacctctcacagtcacataacacgcaatcttctcattacgcctgataccaaaagacctcacagtgtacctcgctgtataacaaaaaccacaacatacatcagaatcaagatcaacacaaaatcaaacttaaatccctgaaagatttcaaattcacatacccttagagaagacaggggtttgtccactgagctgctccaacacctatacgaaataaccaaaaacaataattcaaatctaaatcactaaatcaatgatggataatcgtaaaggtcagatttttacaaacaaaatcgaaccttggaggcacgagtgagacgatcaccactctcaccaacggaaatgttgagaacaagtttctgaaccttaatgtccctcatggggttcgagagcttcttctccgacgcctgagaaacaaaacaaagccgaaaaataaacccattgaactaaacacattttcattgaatcgatctacagagacgaacgaaacaaataccattttaaggagatcaatgtcgagctaagagacgaagcagtgtagagtttgcaaagcccaaaactgcgtcgagtgcaaagtgagagaacttatatgggtcggtacttagggtttcttgaattaacgcaatgacgaaattacccctttgatttattaaaatggtttaatgggccaatattataaagcccataagaaaagcataatcttaagcatatatttggccttcttagttacataaggcaaatagtctttcattcgccgaatcactttattatgtatgagttttaaaattaacgatagataattttttatgagactgtggaaacgcaaatcttcatttatttttggaagaacagaataaataagagttattgagaaaacaaatttttacagttaatgccatgacaatgacaacaaaatcaagaagactagttaagacactatgaagtctatcatcgtggtccagagagctcaatggcttcaataataaaggactgctcttcatgaccattactgtagttcctagagacacttggagctctagcttcataccctccttcacactgttccactaaaccttctagtaccttcaacacttgagacatcctcggtcttagattcggatgtggctgtgtacaaagcaaagccaattccactacttcctccaacaccaaatcatcaaactctcccttcaaatctctgtccaccatctctgcaaatctcttctctgctttcaatgtccttacctacaaaaaccaatggtttagatttaagttttgtccttatgggttcagtctaagttgagtaaatgactcatagaatttttttacttacccagctcaatatcattccttttcgaacttgaccattgccttgatcaatcatcttatgacctgttatgagttcaaggattagtactccgaatccgaaaacatcggttttctctgaggactgtccagtggaaaggtactcgggagcgatgtgtccaatggttcctcggactgcggtagtgacatgtgaatctctctggtctaaaagctttgctagaccaaaatcgccaactattgcttcaaagctctcatcaagtagaatatttgcagctttgacgtctctgtgaataatctttggattgcattgctcgtgcaagtaaacaagtcctcgagctgcgccgagtgcaatgcttatcctccgattccaatctagagacggcttttctccataattgtctgaaacatgtaatcttataaggaacttttcgcgttatatatcgaaagaataacaaaacaagaaatgtgttaattgaaaacctctcagacgatcagctacgcttccatttggcatgtacggatacacaagcattctctcttccggggtcatacagaatccaaagaggcgtaaaaggttacggtgaacagctaagccaatcatctctacttcggtttgaaactgaacttctcctgtataaatcggatctttcaatcttttaactgccaccacagttccatttgggagataccctttataaaccatcccaaaccctccttgtcccaaaatgttctttggactaaaattgcttgttgcggtttgtatttcgcgaaaactgaaccttttcagatggccgatttcaaattcgtagtcttgctgcactaagaaatccataaaaagtaatgcagattttagcaaagtcttgacatatattgtatatgacagacagagagagactattagatatgtaccgtgtgatcttgagagacgtgatcgatgccaaagcacccagaagaagagaaacattagggagatgataaaggcaacaacaatgccaaatgcaaaagagagcactaagctgtgatgtttgctattgtccttttcagacaaacccgtcgctgcagatcgattgcagctagttaaataaacgaaaccatgttttaaataaagttttgcaaagaattttcgaagcaacataccatttctcacaggtgtagcatctgagcaaagctcttgggaagctggaccacaaagaaatgcatttcctacaatcctaaaacagaaaagtttatcaagaagctttcacataagttgcaacggctaataatcatgcatttttcgcatatcttacctgtaatcttttgctgatatattcggagttggtccgcttagattgttgaaagatagatccctattcaagtttttcataaataaaaaaacattagtctaagaaacattatacgaaatagaaatttcctggagctgtaatgttaggtagagtaagacatacaagaaagaaagacctgagaggccagcgacgaggtgagggacttgcccagataaaagattcctgctaagccgcctacaagacttaaccttgtaagaaaataacaattgcaacattaagtaaatcaagaatctttgcatcaaactcacaagtagtttaagtgagttaagaaccctaaagaagctgggatttcaccactaaaccgattccccgataaatcaagcgtttcaagctcagagagttggcctaactcagaaggaatcggaccagttaactgattattctgaagtaacctacaataataacaagtaaccccattagttacaacaacacatacttgaattccaagattaaccacaaattcatttaactcacaaagtatgaagatgagttaattccccaatactagtagatagtatccctgataatcctttactagccatctctctgcattaaagatttcaataaactcagcaaagaaacgtttctcagagacatttagtcgaacaagtggtgtgcaaaagatactcacagagaaaccacaaaaccttcagaagaacaaccaaccatgttccaagtacaaggatcaacagagttaatatcccaaccagacaaaacctctttctcatctttcatcttgttcttcactgacattaacgcagccactacaataacccaaaaatatggattaagtcaaaacctttttacacaataaaagaaagatctttgatacttttttcaccttcatagttaacacccttgggagataaaagactatccatggcagaaacagagtcaagaacagagtaataataaacccagattcctaaaaacagaaacttcatcaaagaaatctccatcgtagaaaaagtataagaattctctagacttcaatgttagttatcatttgtatgccctttcttctagggcagaccatttgaaacattataaatacattaaaaagataagttttttttggcattaaattgaatcgagatgaagaagaagaagaagaagacaaataaagaaattgacgattatagcaaatggaagcgggaaaatcctcgaagttgtcaaacgattgtttccttgtcttctgttctgtaagacttttttttgtttttatatctgacttttgacagtgttagtgagattagatcctctgtaatcggttctacgagaacaatggtacaacagcacactcttgaatctgatatggtattccgatcaacggcttgatttatctttatttcaccattgaaaaagtcaataatgctcaagactaatgctcgtatgaacgatattgggttagtaataagttgggttagtatggaataaatggtgtgacacaatatttgaatggtgatgatttttgtaacaataacaaaaaataattatcttgcgactaaaataattatcaagttttaattaatttttgataacatttcgagtaatagcaaagtcttcaagcttcaagactcttaaaacatgcaatataatgcttatgtgctcatgcacggctgatttagtcattttaccctttctccataaatcttgtttagcctcattttacactttttcgttgcaattaggacatataattccttcatgtgttaatggtcctcattcctctgctaatcgcttccattctcataccattttaacatgaaataattccgcgacgaattttcagagatctatcccaaaaaaacattatgtccttgagtttttagtaggtcttgtacataccgataccctttatatcctgcaattaatagttcatttgcaacttcaggactatccttcgcccaagaaatgatctttgatttgataataacgtcacttgcttgcttttcatctacaatatccacaccaaagtcatctcacgtaagattctataagtataatattaaagaacatttttctagaaatataatattaaatttttttacctgaaatgactgaggtagagtcgatataggtagaatcaaagtaactgaaggtaccgagaaaaagttcattagggtcaccaaccgccttaatcgtaacggggtcaacgtgttttgagataccataattttcggtatcccaatacacaacgtttttggcaagtgtgtaaaaggtatccttttttgcaagtgcgtaacaactatcctcttcaaacggtagaattacaaactaactaaaataatttaccttgtaattcagtagagtaaattttacaaattcttgtttaaattacttatgtattggtcttaaacagcttggtctttttagttttgagtttggatataattgatcttggatctaatgctttcttgagttttttatattacctatgttagtatgtttgcatttctgctactgatctcaaatcattgtaaaatctctcatacatatcatttagaatgtgggtaaaattatactatgaaatagtaataaaagcgcaaatatatcataaagcaaaaatgtgaacgataagatgatccaaactaaattcgaaatggtatcaaagtggcaaagacggtctatggcataattcaccaaagccactgcttacgacatcattaaaaatatagaattattttctgaatattggttaggttgtgtatgcacacaattcgtccatgtcatattgtcatatagtatttttatcatttttaagttaatgttttgctaatgtgattgttttttcatatatttaaagattttgaaccatatattattttgtaaagtcacgtggatccaccatttttcgtaggtgcatgaaataatttgaacaaaacttacaaatattagttttgtaattaaaataaaagatatttttaaatttatagtgttagcatctttcaatcatttatgaaaattaaataataaaataaatattgtattatttattttttctaaatatcaaataaaacatttttttatacagtaaattacaatttttttcttttaaacttgtttgttaagttttatatttttgatttcgctttagggaattatagatgttttgactaatttaatagttaagtgtattgaataataactcgagcaattaaattaaccattagatcacatctcgtccaaatcgttgagttaccacagaaacttgagatcaagtgtttgaatctatctcggtacccacttctcttctctcttcctctctctctctctcatgttgttacgtaaatgatttggagattaaactaaaattattataatttgaacaattttattattagagaagcaatttcttttttctcctagtgaattattattattgaagtgattaaactagtgttttctacacctataaataatgttttgcagatgtaatttgaatcatttgatcagttaacgcaaatacctaaacaagagtcctaagcttcgccgcccgataataatgtatgatttgatgccacgtcaacaaaataccattcaaattcggtttgataaatttcggttcggttcaggtaaaaaccgtttggttcgaccagccttaaaaaccgaaccctctctaaactcgtttgtcgttctcgctctctctccgccgctttctctctaaaatggtgatcgatgttcgaaaaatgtttcctttttcccgaaattcacagtaaaaaagatatgaattctctaaaatctttgagatacagtagcattagagaagctttgacacatcaaaacccaacaaagtcttcatttttatgcccactttacttctacaatcaacgaagatggttaaagcctgtagattcagcacaaacaaggttagagaatcgaacaagagatcatcaattagacaaaatcattccccagattaggaaactaaacatcatcctcgagatttcaaaactcatgtctagcaaaaagcgtggtccttttgtttctttgcagcttatgtctagatggaagaatctcgttggtttgaatgtaaatgttggagcttttatcggtaagtatcctcatgcttttgagatctttacacatccttttagtaagaatctttgttgtaagattactgagaagtttaaggtattgattgatgaggaagagaatgttgttagagagtgtgaggttgatgctgtgaagagggtaaagaagttgttgttgttgtcgaaacacggtgttcttcgtgtacatgctttgaggttgattagaaaggaattgggtttgcctgaggattttcgagattctattttagctaagtatagttcagagttcaggttagttgatttggagactttagagttagttgatagagatgatgagagtttgtgtgtggcaaaagttgaggagtggagagaagttgaatatagagagaaatggttaagtaagtttgagacgaattacgcgtttcctattcatcttcctacagggttcaagattgagaaagggtttagagaagagttaaagaattggcaaagggttccttatgtgaagccttatgatagaaaggagatttctcgagggttagagcgattcgagaagcgtgttgttgcagttatccatgagcttctgagcttaacggtagagaaaatggttgaagttgagagattagctcattttcgaaaggatcttggtattgaagtaaacgtgagggaagttatattgaaacatcccgggattttctatgtgtcgacgaaaggaagtagtcagactttgtttctaagagaagcttatagcaaagggtgtttgattgagccgaacccgatatacaatgtgaggaggaaaatgcttgatcttgtgttgttgaaaacgcgttattcgagaatgttgttacaaagggaagatgaaactcatagagaagagaagagtagagatgttttgattagctctaatgaagattgggaaggagggagagatggagattgggtcttaccaattttggggaaatgaagtttgtgcaaaagtcccattcaagtcccaaagtgtatcagattgaagttgttttctcaaacaccgagtttactgcaaaggaaacttcatctggcagtgcaagaacaacctcttggatgaagaatgatattgtcatgcacaaacaactctctgctgcctctagaactagaaggtcatcagcaatgtccttgaccaaaagtgtaattatgatgaaactgtagcaaacaagaaactatttggtgggttttgatttacgagtaggaagaagaacacaagatgaagattacttcattagaaattcattttggctttatgtgaaaactctcaaaagtcataaacaaatttagtaataacaacaattgaaactaagattttaagtttaacaaaatgggctccaaacaatttggttgatgatgaaggagagaagagttaagagtatcctccaacgtactatcaggcctccatcaaatctccatgtattggttttgtacaacttaaaagccaataaggcccatgaaactagagaacagtatttacgtaggctcataaacatcctaacttggtatagatatcctaacaatgtttttgtcaaaaatgctttagaagttagaactattatttttctggcaattgcaacagatatcaaagtgttttgaatgttaacttagctagtaaaactaaaaagtaaaaggtgaagagatcaaataaaatgttttctttattatatataaaaagtgacaaattttaaccaaataaagaaagaaaagtgaaaaaagaagaaagtcaagaagagaatgaaaggatgtgaagatatagacgtgacgaaagtgttaatggttttaagtactttggtttatctctttttggtgaataagaagaacaatatccacatcgaaaatatgatttttctttataaaaataaaaagtttataaacggaataaagtggaattcataacaaaacaaagagaaaacaagaaaagaaaatatggatcaggcaaaacaaaatgaaggcagccaagagagtatagaggatgcataaatatcaagagagtataatatatgtagtattttgattgacgtttttaacgtaatagtttgtactagtgtgaaaatcatgtattataatctgacaaaaataatatctcacaagtatatagattgcaattataaaagaaatgattttttatttaatttaaatcgaataaacaaactacaacttattgtcaagtgagcttattcgctagaattcgaatataatacatggactacaataaggtatgcatcgtagaaaaaacaaacaaaaaaaccaatatggtctcaccagcttctcagcagtatcttaccaatacttttccaccttacccactttgttttgtcttcccctatttagcatttttccctcattattctataacgcggagtagtacggctcgcgaaaagaaaaccaataagtagaattatgtctggacaaatttatatcatcaaaaattctctaaaagttaactttggataattttaaataatatcgttagtgaatttttgtagatagtctaatatatcgtcaatgcattttggtaaacggcgaggatatgatatctcggattctttgttaacgctccatgcgtttttataagtcattgtcgaaccctgatttaattcggactatgactgacgtgtcaacgctaaactctaatttcactgagactacaactaacgtgtcaatgccaaactctaatccttttcgagttcagtcatttcaaagtgtcaaaaaccaataatcaaaatctcgtgttagtgatttttaggttcttatcactggtgcaaaaccaatagttatcaataacaattttagttcttttttctaatgtaattttaaattagaaatattctttttacaatttgtgtaacgtttgtttgaagaaaattaacaattgcattagttgtcaatttttgagaatatttttctataattttagagaggaaaaaattacaaagcactttgagaaaagggcatatatctcacacaccgcaaatcgacaacaacacccgaatctaatactcacatgatttatcttaaacccaactttctttttcctaactcaacgtgaaaccgtacgtatgtctttaagaagacccaagacctgttgcattgttggtcgcttcactggcgtctccgccgtgcaaaagtaaccaattcgaagactctctaccatctcattaaccgattctccagcagctaaccgcaatctcgagtcaagagcttcctctcctcttctctccttaaccaaccggcgaacggatttaacattctcatcactcccttgcttcccggttaataactcaaacaaaatcaccccgaaactatacacatcgaattctacattgtttttattagtatcatctccggttctcgcaatgttgttgataccgaaatcagagatacgcggctctagggtttcggttaggaggatgttggtagcgactaagtgtccatgagtagtaccaacgtggtgtagataggctaaaccacgtgcaactcctatggcgatacggtgacgtattagccaatttgttttctccggtgatgagtctccgacgtgactctcccatgtatcggcactccaatcttccacgttggtttctcccgccgggagctcgtgtagccatcggtgaagatctccgttagccataaattcatataatataagcttctcttttcctaaaaataataaaccgcaatattggttacgaacaaataaatataatactgattttttgtcacaagtatgaatattttaaattatatatgtaaattaatattgcatttcctaattcacccataccaaataaattcagtaaattgtaaatcttagttaaatactgaaattaatacagtgatgctagactattaactttcgaattcactatttaaacagagttaatactgcaaaacatattatggtaattggtaaacatggtaaatataattaggtaaaaaagaaaacatatttagcatgtacgtaaagaaaaaacgattattgaaacccgacaagctatatataatctctacgagtcccaaagcaaaggatgtgacttgtctgcacatattttaaagtcgtcccagtcgtccactaacaaaaacaccaaatgaaacaaccctaaaaacaagtcattgtaagaaactatcacacatatttctctgagaaactttttggaataattatacatttttacgttaaggtcacgaaaattcataaaaaaattgtaatcatggcacaaaaaccattagattttttttacgtgacgtaccatcatcacagaactgacttctttcgtctgtactacaacgcatacgaagatactactattgaatacgacaccgttcagcatttaatgcctcattaatgtgtttatccaaaaacccgtgaaagtagagacaaaaattcattaaatgacgtctacgcctccactattttattgatttattccaaccccaatcaaaaaaatattttacataaaaaagaagtcaaatctttgatatatttttgttctaaattagcgtattccactaattataattagcaacaaaaaattatatgatcttgtttatctttgtttagaaaaataaaacttaactattctctatttttttgcttgatatatacttaacttgtgagatatttactttgtttagtaacttggttaaaaaaacggaaaatattttgttacattactacatattatcctttttttttttgtctaaaactacatatttatccaaagttatatatacattatagcataaaatttatttgctacttagtcgaatcaaagcatgtcctatattggggtttttaagtcaatttcaaaactttaggtcgtaactaaaccgaaattaaaaatattgggagagattagtttagtacctgcgatgcaataaccggagagagtcaaaagatttggatgtttaagccgagttaaagcttcgaacgcagtaacggcgtcgttttgatcaacgtctctgattctctcaagcactttaattgccacgtggagatctcctggtaaaacggcacggtaaagtggaccacaagtgccgtcagaaataacggactccgttccgaaatgtgacgtggcaacaatcagatccttgaaagtcagattcatcaacggcttagatgccatcacaaccggagccgccgttggctcttttatatcggcgacccatgaagaaccagactccgttccgaattcgaacggtccagatttctccattttgaaatctaacggtgtaggattcgaaatcgcccatctcgatttcgttctcgccgatttcattctccggcggattaaaattatagccgcagcgaagattacgattatcaaagctcctaacgaagacgataggccaatcaccaaaggagtgtgatttgtacggtgcgttttaacgtttcgttgacgcactggtggcggatgccggtgtggtagacggtggatacggtggtgataagggattttggaatcgttgaagacgaaatcgccgccgtgtaagaatgctgatttaccgaattttcggtatttgtcaaatccaaccgaaccggaaaaccggtttgcagataaattcaagaattggagatggttgagattcggaaagtcaaccgggaacgaaccgttcattgagttctccgataaatccaagtaatccaacgactttaaaccggaaatcggtttaacactaccattgattttacatctggatatatcaaggtggcgtaaacccgatagagaacccaaaccaagaggcaaaacaccgagactgttgtgcgaaagatcgagagttgtgaggttggtaaatccggtaaagttaaccgcgtgtttaaaccgattgaacgagagattcaactccttaaccgcagacaaaaccgaaccattaactggaatcactcgtatagagccaccaaaccggttccgagagagattaacggagacaagacctggcatagaccagagccaagtgggaagagaaccatcgagagagttgttggagagatcaagaacacgtaagcgcgtgagattacgtatagggttccaagaaacggtgccgtttagttttcttgacggaagaacgacgtgagtgataacggcggagcagtttgaggagaaccaggaagagttgaaaccggagacgtaacgaaaaactgtggttagttgatggaagtctgtgccgttaggacaagaaactgtggaagaagagtctgagtgtgagaaggagaccaaagataagagaagaaacaactttagaaacatgtttttagtttgttgttgaagactgttcttccatggaagataaagaaatggtgaagagagaaagatagagagagagagagagagggtttagttgttgcagaatttgagaggagctggtgaggtttatcagaaaagagagaagagagagggggagatacattacatacggttgataatatgccaacgatgacgtggattatgatgcaaaaactaaaagtcaaattgttgtaaacttgtagctcgattaaatctagtgaagtgatggcaaataatattttactaagacaaattctctcttctttaaattagttatgtaagatttcaaaaatacaaaatatacttatgcctttaaaatatatttaacaatttattttttgtctatatcgcattactcaaaatagcaatcaatttttttttaattgcatctttactaaaagatattaattgggattgtttttacagcaataaatattaataaacttttgatcaactattgaagtgaaaagatttccactattcatttattctacggattcaaatgattacaaatagactaatcatagatatttttatattgaaataatttgaatcaacaacggtttatgtttattgtccatcttaaaaataaagtagattaaaccgctgataaattagttcgcagtaaccgcaacatccatttataacctatatcgtcgaattccactattgtaaacagtaaacaccaatatcaaaattaatgcatgaacattagctgtagaaatatataaaagaacttcactgaatcatctatctttaggaaaataggattctgtaatcatgttttattatcatcattatctttatacggtactttttatttttcttttgtaaaagtgaaagttataactaaagtttatataggaaataaacaattttaattatttgaactcattgaattaatttactttgtgataaattgacactatatgcatcaaaacaaagaaatatatatatatatatatatatatattcagattatataagattaaacttagtgaatcaactaattttagtgattcggataattgataaactatttttctttagtatttatatttcttacttttcactttttcaaaagaaaagagaggcaaagaaaaaagtacctcgtaaagataatgatgataagtacatgattggtatccaataaatcaaaagataaatcatgcaattccttttttttcaatcatggacaatctgtatacttcaaaaaaggataatctcagataggcaatatattgaatttagtctaatattacgaaagacatgcatcaatcattatactactagtactatataattgtccattagtatgaaaatgaaaaaaaaaaatcggtgtaaactgtggaaattgatttacagtttgaggtaagactactagcttgtcattatatacaagagacgtgtttaaaacttcagtcacattcaaaccataatacaagtaaagaaacagtatataagagaaattaactaaaaacatttatcaacaaagaatcattatattggattaactaaattcttaatatgacactattttaggattgcatgtgatatttttttctgaaaataattgcatgtgatattaaagtgcaaaaatcaaaatacagatgaatatcaacgttgtcatatatatgcaacaatttgtgtatttataacattacgatggagatgaaaatgctactttaattggcagtatatattttctgttgttgttgtttatgggtttgaaactcaagtgaagtaagcaaagaggtatatggttggtgcgatgactttgtgtggtagtttgatgcagatgatgcgaaatagaaacgtggaccctatcttttaacaaaatttattaaattatctattttcattcgatgttgtatcctaggtgtaattttgcatatccttaaattataaataaaacgtgttttaaaaaatttacgtatgtcttgtagtaaatgcttatatttattaccatcggttatttgttgatggggttggttgaaaagtaaataatggtgtagttgaatcaaacaaaacaacagtgtactttttgaataaaaagatttattcgagtctactgttttgatctaacatttcggttattgaatatcaaaatttacatttaacttatttcaataggattaacttttttattacattatttcattaggactaactttttaattacattagctgcgtaaagcttgattatattgataagtatgtagttatatagatgtccaaaacattcccatgagaaaccacgaaaattcaaagttgcgttgaatgatatgaatattaaactctatttggggtgttagtgtgttactattttgaaagattcaaacatttgcaaatttaatgaattaaagaaatgtccgccggagaaagactatagtttaatgtattaatggacataagccagtgtctaaatatacgccggagtatatggtacatccaccaaggagatcggttggatcggattatgtggaagcatattttatcaagacattatttattgtttttaatacataaactcgaagtttagacttaaatcttatatccaaaatatgcaaaaaaccgggttttcaaaattattacatctttagaaacttaaattgttttccatacaaaaaaattaataaaacttgtagattggatgacttgataaccaccggaaaacaatttcaccactcaaaattgaaaactggtggttacataattctttagttaaattacttaaacttttaagagttttagtcaaaatatatatccaaatgcatgcggttgattgtgcttgtagttgtctaagaaaaacatataataacccccatattcctgtttatatttcattgttatgatattggtgtttagttgacaaacaaaaaaagttcttttggtattagatctcctacaacaaaagtctagattacgtcaagacatttgtgtattaattacatataaatttcatgatgtctaaaaattgaactcgaccaacactattaagttaagttattaaataagaactagcaagtcattttctcatcttttacatattgcaacaatgtgtttgtgaaaacgcaaaatgattgatgtacgtatacttcggccattttttcttgtcgtgatggcaggatttaaattctccaaaattcaattcacttatatataaacggttttatttctgatccatccaatttttgttttccattagtaaagcattgaatttcctaaaaactttcacaattagaacatcatggtgtaaatatttaagtctaacaacacgtaattattgtgaaagtaatgtgctgcaaatgggttgtattaaataagcttggaaatggaagaacaaaatggttttactgtatattaaaaataccttgtcataacaactaatttaaaatgaagaaaattatgatcttgggaaattccaaacaaatccactaaatcccaagacaaaaagatccatagaatgccaactaatattccacaaagtatctaacacattcacattctccttgagcaacccaacctaaaagttaatccacattctttattttatcattttaaccactcacaccaacattgttggtccatgtgcttgcttatatgtgtgtgcgatctctttgttctattttaatgttattgggttattcttatgttactgctggatc

SEQ ID NO: 840 - DNA, 59648 bp, Arabidopsis thaliana
tttgacatgatgatcatttgtatcagcgttgcctctatgtgataatcaaaatttaaactaattgtatatgtatgtgaattgtgggcaacgtaaaagaaatttatgcaatttccgtactacctaacttgatgttgggagatcgatgagagcgactcaaactgaatcattctcattaatcttccaacacttgattattatcctcaatataaacaatcacgttaagaaattgcaaactgttttcttttaagaaaattagaaagacggtttttaaggaggaactagattgtcagtattttatttttttattttggctaacaaaataatacttctttatttataattaaaccattgactgaactgaccggactatataagttatgttttacaatggcgcaactataatttgatatgttgtatcaacttgtaaaatcaatcaagttttgaatccggagtcatctgattaaggtaaagatgtacattttaagttttaatagagcaaaaatctcaattttgcaatagataaattgttatagataaaaacaatttttaggccgaaattcattcattttggactttcaggccaattatagagttaaattccagtccattttgctggtccatgattaggtatggacctaaatctctctttttttggcaagcccagtctaaaaagagaaaatacaatccagcccaattgactaaatctctctgtttacatgacctatttttggtgacaaattttaacaatctgtttggagaaacagttcacatggataattttgtcaacaaagaagaaagaattgagtaaattgctctacttcacacctgtcaaaagaggttaattcaccaactacatgtgtgacctgatacgtgcacgttattatcaatatgtacgtctaaaaaaccttaagagtttgaatattcgtatttcgtaacactctcaatattcaaatattatcaaaaataaaataaaatattatcaataagatttgttagttgggttgggtaatctatcaaatacactaatacagcaaatcatttcaatttcacgacaagtggaaacttttcattatgtcactttgcttaaatcttcaccgaccattatgtcactttgcttatatgtaaacctttgacttacaatttggttttctaattaaaaaaacaattaatgaaaaactgtaatttgacctgactagtaagttagtaactcaagacaaataaacaccaaaaaggaatgaaaataaaatttatgtatattattttattaattttatgatttcatgcaaaacagattgtgaatgatttgtaatcatatttcgaaaacgtcaaaatgtgaagaaattacatacaatattgttgagttttctaattaggtgatacttcaattttggaattagtcatgtgctagaattaagtacgtgtctactaatctactaatatatcagttatgtggtgtaaacttttaaagctctatactttcttaatatgtagtatattatcgaaggatcaatgttgacattacgatgataatgacatttacgattgtaattgaatattctataatgccaagatgtgatcattttcgtttcttactctttcataaaattcttttggtgttttagggacctttcaaagagactgcgtttctaggtcttagattcgaatcttgatgcttggaaatgattagttcttgatctcagtgattacgagtccaagactcaaaacactttggtttaaactttttttttttttttttttttacttatattccatttccattgtttctatatctatggaaatgaaaaataattcattgatcttttctatctaaataaaaaaattctccttcggtttcaaattattttttattgtttgtattagaaacaatcaatttttctaacatagtattagttttttaagcatttaaagcaaaaaaaaaaaaaacagttgaccaataggctatatatatgtgttggtggtatacaaaaagtgagatttatttgtataccaattctgaaacatttccaaatataccacaagaaaaatcctatttctggaaaaagccctaaaaacagaacagaggaagacgagaaaaacagagaaagagagagagagagagagagatcgtcttcttctacaacctctcaataatcaaacaaaaaaacgtgttttttttttttttgcgaattcgatcttcgatcaagaagatcttgatctcaaaatccaaacttttcttcaccatttcatgagaatctctcgctttcaatggcggatttgttaagaaaagtgaaatcgataaagaagaagcaggatcagagcaatcatcaagctctgatccttggcaaatacgaaatgggtaggcttcttggccacggaaccttcgctaaagtctatctcgcacgaaacgctcaatctggagaaagcgtagcgatcaaggtaattgacaaagagaaagttctcaaatccggtttaatcgcacacatcaaacgcgagatctcgatcttgcgccgtgttcgtcatcctaacatcgttcagctattcgaagtcatggcgacgaaatctaagatctatttcgtaatggaatatgttaaaggaggtgaattgttcaacaaggtagctaaaggaaggttaaaagaagaaatggcacgtaaatattttcaacagttgatctcagccgtatcgttttgtcacttccgtggtgtttatcatcgagatttgaaaccggagaatcttcttttagacgaaaatggaaacctaaaagtctctgattttggtcttagtgctgtttctgatcagattcgacaagatgggttatttcatactttttgtgggacccctgcttacgtggcaccggaggttcttgctcggaaaggctacgatggagctaaagtcgatatttggtcttgtggagtgatcttgtttgtgttaatggcagggtttcttccttttcatgatcggaatgttatggctatgtataagaagatttacagaggagattttaggtgtccgagatggtttccggttgagattaaccggttattgattcgaatgttggagactaaaccggagagacggtttacaatgccggatattatggagactagttggttcaagaaaggttttaagcatattaagttttatgttgaagatgatcatcagctttgtaacgttgctgatgatgatgagatcgaatcgattgaatcggtttcggggaggtcttctacggtttctgaaccggaagacttcgagtcttttgatgggaggagaagaggtggttcgatgcctagaccggcaagtttgaatgctttcgatctcatttcgttttcgccaggttttgatctttcgggtttgtttgaggatgatggtgaaggatctaggtttgtgtctggtgctcctgttggtcagatcatttctaagttggaggaaatcgcgaggattgtgagttttactgtgcgaaagaaggattgtaaagtgagtcttgaaggttcaagagaaggaagtatgaaaggtccattgtcaattgctgctgagatatttgaactgacaccagctttggttgttgttgaagtgaagaagaaaggaggtgataaaatggagtatgatgagttttgtaataaggagttgaaacctaagttgcagaatttgtcttccgaaaatggccaacgggtttctggttcgcgttctttgccatcgtttttactttctgatactgattaggaagatgaaaaatgaagtttttgtttctgttttattagttttgtgactcatatgtggggttaacgacttgtaatgttcttgttctttgatggtgtgtgagagacattagaatttagacctaaagagagtggtgagatatgaatcattgatgtgtagaaaacacagatggaataaacaagtttctttatgagtttgcttcttttttttctttctttttccttcttttgaattttaattctgttagtttgaaatatgacagaaattcacttagaacaagattgtgtaatttctgttggaaattttgtctactaacgtcaattaatatgacggtttatgatatataattgaacatgtagagtttacaaaaacaaaatcttgagaagaaagtttagcattataatccaagccacaccattagctaatccaaatttgtgttgttcttttaaatatgttatattctagtcatgcacctttaaccataaacaatttattaatccatttatttctgtcacttttctttacttcaaatctttgtgtaactattgaccccaattaattaaataaataaatcaacaacaatctaagatatgtgatgatgattgcagccattatcataaatctcatcttttacacggagatctaaagaaaaacaaccaaatccagaaaaatataagatgaaaaacacatttaatgtatcacttcaatcttctcattgttgctattgttgttgtttccttgccatttccaaacaatatctttcaaagaaggcctaagctcacgatcacaaaattgcttatactccattgtatcacctccacttttcttaaactcaaccatatgaaaactatttgtcacttcaaatatctcaacatcaatcgcaagatgtccttttcttccttctctcttatcttccatcttcactcctacatcgctcttcgtcaaattgaatctctcactacttgttgctatctcctcgaatttcgacactatctcttttgcatctttcttcgttgtaaacttcgattctgatctctcttctttctcaaacaaacccgagagatcgaatccttgagacagcgaagagatcaagtcaaacgcgttgtaagacatcggttttacggaaaaagctgcgtggacatcgctgatcagtgagtcgatctgatgactttcgggagatttaggcgtttcgatcttcttgaaacccttttgaaaccaggaattctccatgattttttcaatcttgattcttgaattagggttagggtcaagaatccgagacaacaacttcttgacctcgggaggaaaccaattcggacatttgaattcgcctttcgtgattttccgatacatttccacaagattttgctcgtgaaacggaagaaatccagccaatagcacgtacaacacaaccccgcaagaccaaacatcggctttagctccatcataacctttcttgcctatcacttcaggtgccacgtaagcaggtgttccacatgtcgtgtgaagcaagccatcttgctgcttcgactccctcaacgcgctaaggccaaaatccgatattttcaaatcgccgttttcgtctagaagaagattctccggtttgagatcgcggtggtaaactccgcggctatggcaataatcgattgctccgatcaattgctggaaatattttcgagcaatgttttctttaagctttcctttagagactttatcaaaaagctcaccgcctttaacgtattccatagcgaaatagatctttgtcttgctcgccattacttcatggaggaagacgacgtgggggtgacgaacgagacgcatcactgatatttctcgtttgatttgatcgattaatccgactttcgcaactttctgtttgtcgatcaccttgatcgctacgctttctcctgtttttatgttgcgtgcgtggtacacttttgcgaatgtgccttgacctagaagacgacctaattcatattttcgcatcaaaactatgccgtttttatccatttattgacgcttttgagggaacaaaggaacttgatgaaaaagcagaggatgaactattgattaacttcgtcttggaatgtgtttcccatggcttagaagagatggagctcaaattttgaaaatatcaattatattttttcttctttttttttggggtctaaaccttgcatatatcaaaatagtaatgctaaaaacaaatacaagaggaaaagatcttagatttgtgtggtcgtggtgatgcttcgagtgggctcttctaaatatagtggaggctagttgttgttaaatattagaatatcccagatttttgtgtgtgtatataatagattttgtaattacaaatatatgtggacttcaatgccggtcctgtctgtaaatcttaagaatcatgattcaaaataagagttgtcgcataaaatgtcatgatacgaaaataagtggaggataaatcttggagttgcaaatacagatatggatatgattgttaacatcggccaatttttactcggcccgacccactacaaacccagggaggcaatcactgaggaataaataaatatgaaacatagaaaagttgatcatgttcatgggggcatctagaattgtgtcatctaggtagattgcaatatatttttacagttataagaagtgtttttgtaggttttagagtgttattttcatttgaatgattagatttgatctcttgctatctgtagaaaaactagtattcttggcgattaagatattttaagttatcaaatcgcattgaagagactcaaatcaatttatagaatgaatcatgtaaacattattccaccatgaagtggttacttaggtttaatgttattttaaagttaaagagcttactaatcgcgatccaaactttaaccctatagtacatttcaccactatgaatacttgaaatgttgtggaatcttatctcaagtatagagcttggttaggtttaatgagttaagtttgatataaattaagttaatatagatacagttgaattttcgaaactagaactcttatttttaccaaatctgccaagtccataaaaaaaaaggatgcgttcaatgaaaaaaaaaggatgcttccaacaatttatttagatactccacaattttctttatgaatattccctaccacacaaaataataatggaaaaatctaagaatataaaaatccaatgcaatcttggataaaaatctcctagctgacttgtcgagacgagatcatgttgctgccacgtaaacacacaaatctcaatttctctcattatttgtcgtctccgtggggcgtgggccactattcacagttgtacatgcatcgaatattactgtatttcgcaaaatgccacgacgtgaataaactataaaaaatagaataattcaaatatatcttcgataagtgataaaatttaaaacatcaaaatgtaacttataaatgatttcttatccattaaccaaaaaaaaggttattttttatccttacaaactacaatcttataacgaaacaataattattatataagattatatataaaactatatttctgcatttaataaaaaacaaaagatccatcttatacaaagcaaaatcttaattatttataatataaactaacataacgcattgcaccttgctaccataagtcttcagaaaataaaagtaacacacatacgggttatatatccctagaatatatgccaaatatataactttataatatcaagattgaaaaccttgttattatgcaattttaaatatgacacgtacgtacctatagtatcatatctaatataataacgactactttccttcctctcctccggcattaccttcggtgtcaaccatacagtcacgacggcgacgatctctcatagttccccactcatgcatcgaaagatgaagctttttcccagcgagcaagaaatccgctccttgtaccggagatagaatcccgaggatcttcgctaaagtatcaacccttagattatcggcctcgaccaataaacgagccatagcttcttcttgcttgtcgagagcttgatccaccactacgttaggctctccgacattctccatctcgtaagccacagtggcgatgggaatatccgctgcgtcttcttgtaggcttgagactttcttggtcatcttctcttcttcgtctataatttttacatgcaacacattgattttagctagctgctccgcacttaagtcgctaagtgatgcaccgccgccaccacctgtcaaaccaaaccatattgaaccaaccgaaccgaaaccattagaattttggtatagatctatggttcggaatcattttttatgattaattttatttaaaaataataatatatttgtataatatatagaactgaacaaattccaaattcaaaccgaacccaacttaatataaaacctaagaatctattatttttgtcataagcaaaatgaacagaataaataaattttagaaatcggaaggaagacaataaaattttttgccgcaccgtactgactaccgaaccaaaaaattaaatttagtctatttttttattcctcaaaaccgaaataaccgaaaacgtccaaacccttacctgaagattcgtagccgtcgatgttgcggagaaactgagtcacacggatctcagtttgtgacccacacaaagcataaacgagcctaaagaaagaagatggtcgacaaccacccatccaaattagagcgttctctaaaggactgttccacgtgggtgcataatagttcgagctacatcggtgagcaagatcagctctttttgcggcgtaatttttgaaatcaccgatgatttttcccgttaacttacgaagcttgttatcattatcttcatcaccgtgagatcgtcgttgagctaagagttgtttgagctcagggatgcgttgagattgcaaactcatccactcgagataagaatcttgagcttgttcgatgttctttgatgaagatcccatttttttttttttttctgatataatgaggagtattttgattattggtttgatctcttttggtttgcgtgtttgtgttttgtgtgtttttgttttcatttcattgggtttatatatagttaaaagttaaatggaccagaattatattttattctctgattaatgattatctctaaaaataatactatacattataatacttatggataaaaatgtcgaataaactgaattatgattaaacaattaaattttcttctaaatatatatttagtagcgttatattaaccgaaccaaattattatcgtttaaatttaatatagggaaacaatgacaaatgtcaaaaataaagaggaaaaatagaaacattgacaactcaaaagttgaaaatgaacttggacagaaaatgtttacttggacacatattaaaacgagtattagtattgaaagttggaagattagtacgtgctttccgaggaaataaaagaaataacgcatgcatgcattacgtggaggactaatagagagtgcgagttgttgttccaaaatagtttaatttgccattatttttgtgtaaatttggttgtattttcttcttcttcattaattatctgaaaaagaaaagtaaaaacccttcctgtaagttacggaagccgacacactcacaaactaatatatcaattcacattgacccgatatagaaaaaacaagattttacatgcatatattatagtattaattaggataaaacaagaagtgttgttcttctaagttctaaatcgatctaagacttacacgagtagatatgatacgacaacgttcctggaatcagaaattcagaatggtgttaaatgttccatgtggcaattttacctctttaaagaggaaagaaattggagattagatcatacaattatcaacttttcattcctaggattcatcaattaaaatatcagtcttttaaatcactgtggttaacaactaattcattggtatcacttatttgatgattttttaatattcacgatatgttttttttgttactgatataaatgatttttttggatgtcctgagacagcggattgtacagtatgttatatttatatatattttcgtataaataattattattctttggggatcagagacttaagaagaggtgtagaatatcttggaaacgagttatctccaacttttggacgttttttggtaagtactaaattattataacgagcttcgttaatttacttttgtcttttactacggagaaaatgattagaaaactggttatatagtagtgaaaattattcacatgcatcaaataggaagcgacagagaaaaaaagacatatatatggtggatttcaatatcaaaataatatacaaaagtttgtttaaaggatgcaataaagaaaattattcagtgtagtgtaacttgtgtacaaggaaacctttgagagccgtgaaaaaaagaagatggaaatcttctacaaaaaataatgcacctcaaaatcacgaggtcgaatcttgaatataatacctgttttggttttccgagggaattatggacaagcggtccacaatatcttgattaagaaccaaatattaacatcgttattattggttctatttatagcagtgaatcaaacacgtatgaggatagttcgacacgtactacgctagtctcgtcgtgtaacgtgcttaatgaaaaagtatgtcacggttgtcgttagtcgttacctttaggctcaggttatgatgacatatgaccttatcttttatttattttttatgataacacaagatcacttaatgggaatactttttttcagaaaaaacattctgcttaaagctgcatatattgtaatcaaagagtttttcgaataaattttacattgattcataaaagaaaaaacattaacgggtaatttgcattatcaattgtcaatgcaaaagtaacaacaactagtgtttaaatcttgcggttaggtttttagacctttggccacctatccggtcatatatctaatgggtttaattcaatcttatctacctcctcttacttgggttaaaaatgtagacaagaatatatgtttttgagagaaacgtttttggtatagtagtggtggtgatctactagtataggttcttctcatctaaatgagttcgacttctcctacttaaaaataggtttaatttaagctgaagcatgcacaaacaatttggtctaaaacatgtaaatgtagcctacctaattccattgttgttaattgaataaattagtcttacttttgtactaacaaaagatcatttgctacacaagaaaaaaaagacatgactaaacaaaaaatacaaattaaaaaatatcataaaatgggttaaaaagaagccgaagtcaatatataaacaacttttcatcacaaaatacgtacaattatacgtaataggtatatgtatgatatatagtatacaacaattatacaaacacatcgttatatcatctggattccaaatacactatcaaaaccaaaacaaatttaatagaaagaattaagaagaaaaaaacaacttttgaacatttatgaacgacgacgtttacagtaaacagagagagcaagagtgtgtgaacctgtgacgactcgaagagaaagagagaggaggagagagaatcgttcttgttcatggttatgtagcttcagaggataagatctcaagctctgcccaccaaagaggagagagtcttggtgttgcttgttcttgagatatgtttattacttctttcaattgttgaaccacatatttcatttttggtctttggctttcgtcaagtttcagacaatgtcgtgccacgtcacatatagcttcaagttcttcttctttatacgttgttagtgtaggatcaatcatatctctcaaattatcattctccagatactttgacgcctattacaaatccacaaaatgtattacgttagtaatataagtttaagaaatattgtgatttggttttgatttttgagtttttttttacccattttagaattgatccttcttcttctgaatctgagagctttccagagattatctcaagcattaatactccaaagctatagacattagtctctggttcaggaggtaatggcaataaagattggtctaaatcaccactcatcggttttctcggtttactcccggtttgtccgctgaaaggaacctctccgacctgcaaaacgaagcattattttaccactaggtcttgtattaagaatcaagaacaccagtttcttgttaagcaagaaagaaataactactaaaacagttttcttgttaagcaagaaagtaagaacctttgctgcgtaatcatcggttaagtatattgctgatgagacaagtttagtgtgtgagattggaggattgagctcgtgcatatattgcagacaataagcagttcccattattatcctcgtcctcgcgttccaatcaagatgctccatttccttatctgaacaagaagatatagattggttggtgataatcgtaataagcctaacaagatcttgatgtagaggcatacttatgtatattactaaccatgcaaatgttcgaaaagagttccatttggagcatattcgaaaaccatcatcctattaaacggttcatcttcttcgcaataaccaatcagattaataaagttcttatggttgactcttgacattgtatcaatctgcaaatataagctctcaaaacatgagtcaagttttgcggtaaaaatggtcgaagaaaaactgtttattttaattacccttctgcggtaagtcatttccatagctcttgtccattccctagtttccaaaatggcggttgaagcaaccgcaatctcaacgccactggacaaagttcctttatagacagtgtaaccatcaaatgcttcaatgatattactgaaatcttcacaggctgtttctagttcagaccggtttagcttaggtacacctgaaaacatttctcacattaatgttaaaccgaaaagcagagcaaaaatcagtttgttttaacaaatatttttaccagtaacaaaagctttctgcaattgtccactcaaaccagtcttccatggacctatactcttcacagctcttttccggaagaagaatataaccgctactattatcagcatcgctacgaaagcagcaacaccgatcacaacatacaaccaaacgtccttaaaccctttcgatttttcttcgaatttcctcggtggatcactagcgatggtgttgttggtaggtagaggaggaggagaagaaggagggatcaatggaggtattctcttctttgcattagttaatgctggaaacgacccgctgcttcgaggaaacactatagttataatctcaggagaaggactgggcgtatcaggcgcaggcatagccgctaaattgcttgtttcctcgagtaactcacgtcttttgaagatactagtttcgttctcacctgcataaaaaacaaaggtataagattgacagttatgagttttgtgtgtttccaattgcagagcttggagtagtaatcttttagccttacttgggtgataattcactacataattcttcccatgagattctcttcgcaccctgtagatacataaaacatagaaaatcagtaacacatgaggattaaaacatacaaatcagaccaaaagtattgagagataaaagaaaatgctttcatgtaatgtcttgaagttgctctaatccgcaatacgaatgcctttgccttgtttcttgttattaaacttctccttgaaacactgtaaaaaaaattcaaattaaaaacaagttaactcaaagaaaagttttctccatccaaggactaaaacttttattaccagtatccaagttttctattgacacagtcgaggacatcagcggaaaccgaagatagctctcgattcttgttcatctggactttatacagcgattgaagtctcaggaactttacggtcataaaacccgcaaatttgttaccagaaagcaacctggatccaccaaaaaacagaacagtttgtatcaacacattgttttggattaaatcaaaagcactactacaagcctttaaaactcacaagttttctggtgtcaacactttatttagctcgggtggaactactccgtttaagttattatctcgcaaatccaagaactctaatttcgcgaaactcgcaaattcgtttggaatgtcaccagagagtttgttcttggatagtattctacaagaaaataaacaagaattggttttagtttttcttattctttcaagaaacagagcaaaaattttagttgaaacaaacttacagagatcttaattcactcaattgactaagctccggagctaaagttcctcccaaagaacaaccactaagattcctacaaaacaaaaccaatacactcattaggtcttgcaacaagaatcacaaagacaacaaaagaaaacattacttacagcatctgcactttattgtcgacacacgtaacaccaaaccaagaacagaaatgatcatgatcagaaacattccaatttgcaagagttccatgaggatcagaatcaactcttgcccggaatttcaacaatacaaatcctacaaacattcaataatacgtaattcaaaaaccctttaaacaaaaacattcaaaagaacacaatgatagagatttcaaagttgttcaccttcggattcgagggacaacgaagaacgagattgaagagtaatgatcaagaacatgaagcaagagaattggaacccaattggattccatcgacaacccattttaggtatacaccaatgctatacaaaatcgccagattttttcctaaatgaacgaatataaaaatacaaacttcacagaatccttggtaggagaagaacgacgaggttgatgattgaacattcagggtctctcattgtttccagttttgcaaactcataaaaccctaaaaacaatgttcatgtcctaatgagtcaacaactcgtacgttaattctcttcttcttgttaatcctggaaaaaaacaaatgccaacaagaaacaaacaaacatatatcaaaactttaacaacaaatgtataccaataataattaaaccaaaaaaataaagaataagaataaccctcttgaagaagcaatatgaagaaaacatggaacccaccaaacaaaaaaaaacatttgttttctcttgataaatgaagaacattgcaaaataattacctcaaagaagaaacttcttcaccaagaattgggtatagggtttgagaaatgaaaaattaaatataaaaaaaatccccagaaaatagaaaatgattataaaaaaacttttaaaaagatagaatttctgtttaaaaacaaatattggattgatattttctgatttcttgtagaacttgcccttatttttacaggatgatgatgatgaagatgatgatctcagagttttctctcttcgaccatctttggtctctccagggccaaagggtggtgggttctctctccttcctctctccttcctctctctttcctttttcttcctcttctctctctctttctcttgtcgaatctttttttcctattttttaattcttttttaacaatttttcccccacaaaactgtctctgtttttttatttttttaaaaaaatatcctatcaatgagtaagaccctattaacttcctttagattttccataattatagaaatgtttgtattcgcataaattaaactattaaaaaaactaagaaaataaacaagaaattagttcattatttcgtcttttattccttccgttgttaaataacgtgaacatatatatggcgcgaaagattagtaaaaaattaattaagatatttaacattaattctaaattagagttgacttggagctgcgatgccaatatacgaccgttaaatattacttagtgtgatgatcaacggtgctgtttagtgacgtggcgaatataataagggagggaggttacatgagattattattagttttcgagtcatgtgctctatacagtagtagtacatgtcacccactactttatattttaatcaatttttaattgtgtagtcaaccttaattagtttttccatataattattgatttgtttatgaattttttttttttttctatattggtgttattagttgatgcttcatctaatatatgatttagacttctttttttttataaatgaaaattgtgggcatttgttgggcttatttaaaaaatatgatttgatgtactcttagttgggctttaatctaaatagaagcctaaatcattcataattcatatcagattaggtgaatacccacattatctgtgggtttttgttttgaaatttgctatataaaaaatatttttatggtttttgttgtaatttatgtgtgttattatgtaaataataaagtcatattcattttatatagttatggtttttataattagattcatctttaactcgaaatatcaattatatgttttttaaatataattatttatatacctaagatcctagtatttttaattatcatgaattcatacaataactatatatgatgcattgatacaatcgtatttacttataatgtggtttgaaacttgtctaacttgattttaaacaaacaattttttttatgtattttctctcctcatctactatttcaactacattatgatagtaatttaagtactcattttaaatctttcttcttccatatagtcatataagagagagttttgtgtcttgaatatttttagtatgtctaacattttaaaatgtcattacatgaaaacatttgcatgtcaatatgaccaatttaccataagacacataaatgaaaagaaagaagacaatatggtaagtcatattcataaaacgtaatgataaaaaagattcaaaagaaaattattaaattaataaaagattaagtagcaaacatctaacttacaacacaattaacctttttaggcattatcgagtaatgactattgatatagaaacatttaacgaaacaagaagagtataataatagtaatgattgatacattaccatgattttgtttgtttgtaaaaaattagctaagaatgagattaatagaggatttaacaaaataaattttttatttctttcaattaaattttctaatcttttaatttaaataatgtagaaagacacatatcatttttttgtgatgatgatgtgacatccaataacattaacataatatcaataacattatatatttataatgatgtaaatttattaacatgaaataattttaaaggaattcgttctaaatatttaaacgaatacaattttctcataccaaatgtttggatcaaacacaatttctaaaactgtccggattgatgttgatattgtgtgaaaataatgtggctatttcaaacctaacccgatccggtccgacacagaatttatccgacatcatgatctcatgtacaaaatacatatatgtgtactaatagatatttatgtaccggaaaaaaggaaactctgtatggagtaaaaacgattccggttttcagaatttgtgttgacgagtaggatgaacaacaataagcccctgcacaattgaacgtcatccaaatttattgaaaccaaacataccaaaaagagaaagattcttaagagatttcttgaaactcggaccgattaatacatacctctgaatagcgaacatgatcatggtgtgaatacgatgttttcacaatcgtctcccattttttagactgagagtcagtctttttctccatattcttcttaaaacgggctgcttgaccggagacgactacggcgaattgaccagagacgacggaggaggtggtcgagcttctcggaagtgtccggcaaagccaagactctgaaggagttttaggcaatggaggttgagaaacagagagattctctgacctgtttttgtttctgttgctccttctctttacttcttccacaagaaacctaatctcttgtctctgattctgatcggttgtttgttgcaacctcgaatgatttctcgggatctggagtgtttctctggatttaggtagagaaatcctggaaatatcgtttgaaaatcttggcgttgcatcgatttcttgagacttactcataaccttgcttgatttgaagattctcggtgatgttgatttcgttttgtaaacagaatctatcgatttagggtttatgatattttccgattttactccaacatcctgacatgtcttgatccgagagagaaccggggtaagaacatccactgagttcttggaacagaaccatggcaagaaccctaactgacctttcttggagtcatttgagtaaactaatgcatcaataccatccacatgattatgatcacaatgctcctcatcatcaacgtcgttgttcaaatcttgattaattgccatggagactctctgtagagcaatgctctgtttcttcttcttctccgctttaactcgagaagcttctttcttcattttcaaggagattgcttccgcggctggtaaaaatctcgacatgatgagatcacgatattcaagaatgacgtcatctcttgaaacattactcgatctgtctccatctccattattctcgaactcacttactccacttgagctgcaattaacagagaaacttgcggttgaagaaaccatttccatagctttgattaggtctgactcttcgactaggttttttttatcctttggctttccaggtgtttgttcccatttgaaaggaactgacgatggttccattacatgctcgaaactctggtcttgtaataatcgaatcagaatttcattctctgtttcttgacatgaatctttgatttctctccttctcgtcgtcatcgtcttcttcttggtgttctctgattcgtttggatcatcaggtttagtcggaactcgcctcacggataggaatggagcatctaaatttagtttcttctcctccatttttgcttctgataaaaatcctttcaagaactctctttcaccccaaaaaaaataaactttaaagaaggtgtcaagaattaagaaagtgtaaaatgtataaatgaaaaggaatctaaagagttagtgatgttttctgtttctgctttgctatatacaatcagagaaataacaccatttattagaaaacaaaaaaaataaagacgatttaaagaatctacatagggaggaccgaaaaatgaatgttaggggaagagtcagtcaataaataaagtgtctcaatggtaaaatttagaattatcgcagtaaaaagataattcaattatggttttgataaaaaaaaatggtggtacgaaacgaaagaatggatggaatgataaatttattcaaattaaaaattaaaagaagaataataaaaaatagggataaacattaaaaataaataataataatagatatagtcacctttcttactgtttcagaacaatggggggtacaagatttttgtttgagaaaatatgactttcgaatttcgataggatcaattcaacttttgttgttggactgttatgaggttgagattctcgtgaacaactccattgatgattattaattaattaactagtgttattttatgttgaatggaattctaaacatgtattggaaatgaaatttcgttttatagtaaacgacattgttgatcataaaaccgaagttttgttcaaaacagaaaaatatcaaattattaaaaaaaaaatgtaaattactatgttactattcaaaatttaaatattatcaataaaattttcaatttatgtcatacattcacctaattaggcgggtcttatctaatatacaatacaattcaatatacttcaaaattttggttgtccgggtaataaatttttagaagaagattttgtaaaatgtgtatagttttgatattttaactatatattaaagctaaatcaattaaaaaactatgaattttttaaacaagtttacttttgatatttttttatatatcaggtccagacatctacaaaatacttgattttttacttttgataatattcaatattcaaatactctaaattccacaaagccgaaatttaattagatccagataattacatcttattacaaatctaaacaccctaaaatttcaaaaatatgtaagtcattttcattcttgagtaaccaattcataaataatgtaagacatgctttcgttattttgagggccacgcaacgtttttgataattcttttagctctctgcataatgtcataccatgctatatttattcatcttaaatcatgtccaatcattgttattgtttttaaaaaaaatctccaatcatttttttttcttttgctaatatcctatttcctgctgttataaataaacagaatgtatgtatttttatatatttttcttttttgcaacaactaattttaattagatattaattagggtttgatacaaacagaatagcctcttttggcaaagcatcaacttgacgatttagatttcgagatatgaaattgaaaaggtaatacgcgaaattagctaaaaaataaagataggttgtcatgtagaatcttgtagagatccttgtgatacagcttcaaattgagtactttgataagaattttccaatctgaaacaaagaagtaaatggtagaggccgattcagttgtaactctcatcgcaacaagagttgccaaagctgaggagatcggatgtaagaggcagtggaatttcctttcaaaagcttcataatgtatgtatatagcttatagtatacaagtaattgtgcacgttttttagtgcagtcgttatttattgtctctttcttgggcactatattttaaagttagaggaaaataaaaatagtaacatatggtctattttaaaggaaatcatgaaagtatattggcaaacaaaaaaatcatcaaataccttttgctgttctaaaaactactcccaaaaataaacaaggcgtaccttcttgtaatcaataatgtggaccttagatgcatcgaaacaaggtgaagaagatagcaaattattaatattgtcatttaatataatttattaaataccaaactcttcaaaactgtctgtaaatgttcattcaattcaccagcggcaattttgtttttatgtagaaaaaaaggaccaacgtcttaatggagtgtttttttaaaaactttggaggcttggaccaaaaaaaaaagtcaccgacccctacatttaatgtactagactatagacttttaaatgttgagcatgtttcattaaccggataacaaagaaccctaaatttgcggaggtgaaaaggacagggtagaactagtgattgtctttcgcatgacaactgctcttagatatcgtggaagatccattgcctatcattcaaaagctctgagccaaccaagaatctatttctagatttctaccacatcaaaattacagaaacttttttttaaaatgaaataaaagaacaaacgtaagatactaactaacttactaataattaagttactaacaaatactccttatatttaatattatacatatacttacttatttcccatcgaccatgactattgctagttgaacctgattataattcttaaaaactaaaactataatctaaaaattacaactttagatgagccaccctctccgagagcttagccaatgacttaagattaaacccaacgattgtatcagcaaaagacgtcgtttcctcctcactatttccttccggcacatccaccacataactctccaccaccaccgtcttctcctccgtatccgccgccacaaacgccatcgttttcgaccggtaattaaccaaacgatgatcaccacctataatgctaatcatcatcacatgagactcatcgtcaagttcatctaatctctctcggctgaactccgctggaagaccggaaaccaccgtcacttcacggacggagccttctcctccatcgccggagcttagattgcacgttttcacgaattgtttgtaggcttgagggttatcaaaccgacgtagaattgaccaaactagagatagtggagcatctatagtttgtactagtgtggaaccgcacgtatgatatttttgagaagtttccatttgtgtattgctgtttttttgacgaaattgtccttttatcgaccgttgttttgtgtgacagtatcttcaaacctttttgaagcttccatgcattagtgttcgagtatttatacgagaaatatctaagaacaatgccgactaaaaaaaaatatgagttgtcattttttggtgttttctgcaaaatatgaatgtaatatcaagtaagaaaaactttgttgatttgtataacataagatgataaaaagaagtttaaagtgtatatatattttaaaagaatacattgtaatatgcacataaaaccaaaaaaatgctttaaaagaaagactgattaatcagtgtaggatgtgtagcatatggtgacaatatataggcatatggctacatatttgtccgtaaaatatatttaaataaattgtaaactttagaatgcacatttgttttgtaacgtcattgtaatgaagaatgtatttcggttaaatttggagggttatgacatggattgtggaaaaactagtggcatgtaatagatccacgttttcgatttcgttcatacgaaccacacttatttaccacacatttatagacattgtttttgttgataaaaacttgactaaatgaaaaaaaacaaacaaaaaaaaaacaaacaagaacagatgagagagggaaggacatatctttaaacgccaagttgagaacaggcccaatgagcctacagattaaagatccatttgaagcccaaaatagcatcacttactccttcagaaggtaaagataattgaaccggaaaccgataagcttaaccaaattgtatttctgtttaacttttatagggtccctttttcttttgttaacaatttgaaaaggaccaaataattgaaccttcgatcgtaatcgcaatctcacattttcaaactcttatattttaatctgatcaaaaataaaaatagacacacaataaaataaagttaaacagaataaaacgtttacgagttcagtcgatcaatatgattagagatgaaaataatttcggtaagacttttgcatgcaatctatcaagattcaaggccgtattttagcatatgtaagtaggataatcgaacaatcctaattttgtttaagaaaatcttaagtaaatatgtataagtgaggttatttttttttttaattgtttaccaacatattagcaaaatgttttttaaatattaccttcaagtaaaaatagtttgaaatggctcttcattctactagtatgtaattagtttcttgtgagaaaaagtgtaaaaataagtagaagttgaacaattgagctacagccaaatataacagaatttaaactatttttcctctttaaaaagaagctgttggagacgaagggttaattacattaattaccattgtatttcaactttttgtattttttttttgtgcaagaaaaaaatgaatcataaaatatactttttattttataagcgaactatgtttaatttcttcacttgcacatgctaaaagacgctctttggcatcaagtttcaactgagaaggtataagacactgaacgatcagagtctgctttagaaagctatttcgctggacacgttagtactcacaagtcaattcctgttacaacaacaagagttttaatcaaaagaaaaaaaaatgattttaactttttaacttgaatgatttcaaaatttggcttatatcaatacatttacaaaggagagtttagaaatggactcaaactaaaattgtatatacttttgggcaaacagaataatgacatttaagaaagaaacttaaacaattatttttaatttcacaagacatataaatacataattatacctatattattcccagttgaataagcatattttgctagttgctatatatccaaaacctcgtaaaaatgtaagagttttacttttaaattctaaaaactaatactattattacaatcccacgacttttacaactttaagtgagctccatcatcttctccgataacttagccaatgacctaagattacacccaacgatagtatcagcaaacaacgtagtttcttcctcagtatttccttccggcacatccaccacataactctccacaaccactgtcttctcctcctccgccgccacaaacaccgtagttttcgactggtaattaaccaaacgatgatcaccaccaataatgctgatcaccatcacatgagactcatcgtcaagttcatctaatctttctaggctaaaactcgccggaagatcggaaaccaccgtgacttcacggacagagccttctcctccatcgccggagcgtagtttacaagtttttacgaaatgtttaaatgtttttgggttatcaaatcgacgtaggatcgaccatactagaggtaacggagcattgatagtttgtactactgtcgaaccgcatacatgctgttcttgagatgttttcatacgtgtttgtttggtgtttcacaattttgttttcctaccgacagttgtggttgttgtcttcaaatattttacgtagtggcaagttttttttagtatttatatatgagaaaaatctataggtcgacaaaaagatgagaaatatctttagaacaaggccgactgaaagaaatactaaaattatgaaattctgaacgcataacaagtaacaacgaaaatttatttatatattctatatgacatttaactttggaataaaatatttagtttaagtccattgtgatattttatacatgcacataaataccaaaatactttaacggcctgagtaagtatcaaacagtgtagcatagcaaattgtatacaaaatactgtaaggaacaatttgcggttgtggttggcgggttatatgacatggactgtgttaaaaatagtggcaaataatggttccacgttggtttacacgaatcacacttattaatcacacatttatagtgtattataagaaccaaatagttgacagatgttaaaagaaaagaaagtagacaaaaaggaaaggaaacaaataagaacagagatgagaagttagagattagaacttagacttaatccaaaatggcaagctcagaaagaggccagatgagcctaaaatttatagatccattttaagcccaaactagcatcactcttttacattagtttttaaccttcagggtagccgataatcgaaccaaaaccgatataaaaattaaaccaaaatgtgatttctgttaatataacttttctttttccatctccaaatttaaattcacggatatagactagcaaaaagagccaaaatcacaatcacaatctcacattctaaaatctctgacgattttgtttctttagtcaaaagaaaaaaaaaattatcgaaaaattaatcaaggagacatttacgagtttagtcaatataagaaattaagttggtttcagcaagacttttaattgcaatctactattgagttcttatgagagataatgtaaagaaagaagaggaagtttgaatagttaaattaaatcgaatgttatagattaaaaactattccggctagctaggttttaatctatagttatattttttctgaaatgtatgataaagactacaagatcgtacgacatataatttggcttatatcaatacatatttataaagagttttagaaatggagtaaccgggaatgattaattcatggcgttggagattaactccttcagacatgtttcacaataacatggaaggaagtaaaagggttcatcttactggttagttaaaccttaaataacatttaatttattaatttctagatagataaactatggttctggaactacatgaaattttttttaacatttaaaaaaaaactacatgaaaatttagcaaggagaatatggaaatttacatttgcaaatacgtctgctattgggtgcatcataaatgccacactcgcaatgaaaagggtattctttgattttattaaagcctcttatgcaagttttgtttccgtcccacccacaattttgttcgaatacttgtgccttttcgcacaccttcttcactctcttggccttagtctccaccgatttcacctctattcgttttttatttttatcaatcatacatacacacaacaaaaataatgtcaaaattgtaaataaaatgattatttaatatataaaaattgataatgcagtaagtttttttttgtcttttaaaccgaggatactaatctaaatcgaaagaacaatagtgtacattacgtacctctcacgtgactaagaacacaaaatatgagaacacaagaaaccatgaacaaggtagtagacttcatgatttaacaaaaatggtaaaagctactgtctttgttacctctctcttgtaacaagtgtgttacttctctttaacggaaactgcccacaccaaaaatagttatttaaactaaattaggggaaaagaaaagggacatgtaagaagatcaagtcaaccagatctacaaaattagctgtttaatcttaaaaggaaaaataattggatggaggagcttgtctgcgttctgattacaggacataatggatgcaacattttcataaatttattttacacctaacttaaatttaacaaaacttcaaaaattaccaatatgatagccaagaaacgaggaaaagacagcaatgttacatttggaagtttgataaacattcagaggctttagagcatcctcattggtgaaccacttttttgagtgtcttgaaactaaagtatttaatattttaatattaaaaatgttaaaagaatatacatggagggatgggtcttaattctttaaattctttttaattataacattaattcatctttatatttaaataccctatatttttatgatcaatgagaatgattttagaggttaagtgacaagaatatccaaaaatattatatcccttgttaagttgtgtaatgtgttatatacatatatatgagcacatgcatgaattatcaagagatatatataaaaaattagaggacttgggagtccgagcagatctctttcccttctaaatttggttttcgatctaaatccaatattcaacagtaaacttctactcattgatttattttttattttgtaataaactaatagtaatatataagttcctcgatcgtgtgtaaccaaattacattctttttactatagaacaacaaaatatcactcacacatcaaatcaaacaaaaccaaaacgtgaaaaggtaattaatgatgatattaattcattatatggttataaacttgataaagttaagcaaatagaaaatctctcatgttatatgtttttttcttttttttcttttcgcttagaatgttacgtcagggacaataccaagctccttgaaagcagcaggacaatcagccaatggagtctgaaccatgaaaccgagagggttaacaatacgtgtctcgtgggagacgattccgtcattcgccgttaaactgatcttagcggcgttacgtaagtaagcctctgtgctgacatcactgcaaccactgtctggtgattggaccaaaacaagctcgcaaacttcttcctcgtggtcaccggttacttccattttgtagcttcctgttttgtcggtaacagcttctttggtcaatgttatggttccgtttgttctgctcctgcactccaacttcactttcgcgcctgcacaaacacaattaaaaatgtaaaaaataagataaaataaatagaaattagttcaactataattagtttgcttgagtggatggaattttttttttgtgtggatggaaaatttatcatgtggatcaagatcacggatcaacttttaagatgtctgaaattttcgtcattttgttatgaccatggtaaatgtttaaatggaaaaatattcgacaagctatagacctcaagaatttgtttcggttaatttataattttatatatcctttttgatctaagagaaaaggatatattttggaaatttgaatctgatcaatgttaatcttagaagctgatttacgaaatatttgaaaaaatgtagtcaaggacattgcaatactctcattcgaatttagaaactgatatatttattttatgacagtgcttgcatcctctaggctctaacatgcaagatagtttgcgtgcgcatgcatgtatggccatctcaaaatgataagtttttttattaaacgaaaatattctcttaaaaagaaacggttgcacgttgtaaattagccatgcacacatacatgtgtagaaacatagatatacgtgcgtaaatatgttaccttcgaggaatttgctgagacgggtaacgaattggacacggcaagtgtcacagtaaactgatccttgaatctggaaacgatcgaagtcgtcagcatcagcggcggcgaaacctgccagagaagacaaacacacggcggagacgacaaagaaagagaagaagatagctttggaagccatttttattagagatttttgttttgtttttggtcttctcttctttttgatatctctttttatattcaaacaataagttgagatatgtttgagaagaggacaactattctcgtggagcaccgagtttgttttatattagaaacccgattgttatttttagactgagacaaaaaagtaaaatcgttgattgttaaaatttaaaattagtttcattacgtttcgataaaaaaatgattagtttatcatagcttaattatagcattgatttctaaatttgttttttgaccacccttttttctctctttggtgttttcttaacattagaagaacccataacaatgtacgttcaaattaattaaaaacaatatttccaagttttatatacgaaacttgttttttttaatgaaaacagttgaatagttgattatgaattagttagatcaatactcaatatatgatcaatgatgtatatatatgaactcagttgttatacaagaaatgaaaatgctatttaaataccgatcatgaagtgttaaaaagtgtcagaatatgacatgaagcgttttgtcctaccgggtattcgagttataggtttggatctctcaagaatattttgggccatattagttatatttgggcttaagcgttttgcaaagagacgaggaagaaagattgggtcaagttaacaaaacagagacactcgtattagttggtactttggtagcaagtcgatttatttgccagtaaaaacttggtacacaactgacaactcgtatcgttattagtttgtacttggtacctttggttcaagaaaaagttgatatagttaaatcagttgtgttcatgaggtgattgtgatttaatttgttgactagggcgattccttcacatcacaataacaaagttttatagattttttttttataacatttttgccacgcttcgtaaagtttggtatttacaccgcatttttccctgtacaagaattcatatattatttatttatatactccagttgacaattataagtttataacgtttttacaattatttaaataccatgtgaagatccaagaatatgtcttacttcttctttgtgtaagaaaactaactatatcactataataaaataattctaatcattatatttgtaaatatgcagttatttgtcaattttgaatttagtattttagacgttatcacttcagccaaatatgatttggatttaagtccaaaatgcaatttcgtacgtatccctcttgtcgtctaatgattatttcaatatttcttatattatccctaactacagagctacatttatattgtattctaatgacagggaaactttcatagagattcagatagatgaaattggtgggaaacatcattgaacaggaaacttttagcaaatcatatcgatttatctacaaaagaatacttagcgtaatgaagttcacttgttgtgaatgactatgatttgatcaaattagttaattttgtcgaatcatttttctttttgatttgattaagcttttaacttgcacgaatggttctcttgtgaataaacagaatctttgaattcaaactatttgattagtgaaaagacaaaagaagattccttgtttttatgtgattagtgattttgatgcatgaaaggtacctacgtactacaagaaaaataaacatgtacgtaactacgtatcagcatgtaaaagtatttttttccaaataatttatactcatgatagattttttttttttgaaatgtcaattaaaaatgctttcttaaatattaattttaattaattaaataaggaaatatatttatgcaaaacatcatcaacacatatccaacttcgaaaatctctatagtacacaagtagagaaattaaattttactagatacaaacttcctaatcatcaaatataaatgtttacaaaactaattaaacccaccactaaaattaactaaaaatccgagcaaagtgagtgaacaagacttgatttcaggttgatgtaggactaaaatggctacgtatcaaacatcaacgatcatttagttatgtatgaatgaatgtagtcattacttgtaaaacaaaaatgctttgatttggatcaatcacttcatgtgaacattagcaattacatcaaccttattttcactataaaaccccatctcagtacccttctgaagtaatcaaattaagagcaaaagtcatttaactttcctaaaacaatggctttaaaacatatgcaaatctttctcttcgtcgctatattttcatcattctgtttctccatcactctttctcgtccactcgacaatgaactcatcatgcaaaagaggcacatcgagtggatgactaaacacggccgtgtctacgcggatgtgaaggaggaaaacaatcgctacgttgtgttcaaaaacaacgtcgaacgcattgaacatttaaatagcattcctgccggaagaactttcaaacttgcggtaaatcagtttgctgatttaaccaatgacgaatttcgttccatgtacactggtttcaaaggtgtctcggcattatctagccaaagccaaactaaaatgtcgccgtttaggtaccaaaacgtttcttctggtgctttgccggtttctgttgactggaggaagaaaggagctgtgacccctatcaagaatcaaggcagctgcggtataactcaaatctttattcatatatatataagtgaaatcaaattgaaccaaccgaaatttatgtattcaatcaatttgagttaattcatagtgaacaaaccgatccaaaccaaatccatagtgtaactgaccgaatcgaataaccatatttttattaaatttttctatgttaagttatatatattttgtttcataccgttttattgagatatgtagttagacacatgaaaatatttatgatagtgacactaatgagtgatgtttttgtaggatgttgttgggcgttttcagcggttgcggctattgaaggagcaacacaaataaagaaagggaaacttatatctttgtcagaacaacagcttgttgattgcgacacaaacgattttggctgcgaaggcggtttaatggatactgcgtttgagcatataaaagcgactggcggcttgacaactgagtcaaattatccttacaaaggcgaagacgctacttgcaattccaaaaagaccaatccaaaagcaacttctattacaggttcactttagttaaagagctggcatataataattaaacagattaaaccgatttttaatcatattatccaaattaataaacattactatactagataaaattcatattttgaatcttaaaaagctcatgtacgttcacatatcataggttatgaggatgtcccggttaatgatgagcaagcactgatgaaggcagtggcacaccaaccggttagcgttggaattgaaggaggtggttttgatttccaattctattcgtctggtgtgttcactggagagtgcactacgtatcttgatcatgcagtaactgcgattggatacggcgaatctactaacggatcaaagtattggatcatcaagaattcatggggaacaaaatggggagaaagtggatatatgaggattcaaaaagatgtcaaggataaacaaggactatgtggtcttgccatgaaagcttcttacccaactatatgaattcaaaaccgtgttaagcttttaattgtgtatgtttgtgtgggattgatgtctaaaaataatttgaattgttttatgtaaaaaaattgtatttagactgttgtatgcattttatgaaattgtaagcttatgtaatgcaaaggattgataattttcgaaatgtttctttcaaatttcaacggtattagctagggataatttgaagcatatgcacaatcaaattccaccaagtaaaaatgaaaatttgttaaaaaaatgaagtttgaaaactcttaaccatttactgagaagactgtaataaaccgaatttggttcagtttgatttttatggaaaaagacgaaccgtccggttaatgctttttacttttttaaaataaaccggttttggtttgcttggatataaagccgacccgacccggattgaccatgttccttgcacgactcctttttctcaccgttctccgtcatcgtcttcttctttctcacattcattgactctcctccataataaacattgcaatctctcagaaagataagatcagccatggctgagaaagaaactccagcaatcatacttcaattcgctccattgaacagttccgtcgacgaaggtttctggcatagcttctcctctttgaaactcgacaaactcggaatcgatgattctccgatttcaatcaccggtaaacacacaatcatcgaattaaaaaatcatccaatgcatcgatttttatatattattcgatgagtctatgcattcgagctcttatgatccgtttaggttagagaagcaaaaaaaaaagttgaaaacttgaaaatcctctgttttctgggcaagttgttatgatccgtttaggttagagaagcaaaaaaaaagttgagaactttaaaagcctctgttttgtttagtagagattattcagatttagaatttatgtgcttttttggaactgaaattttcaggtttctatggaccatgtggacatccacaagtctcaaatcatttgactcttttatcagagtcattgcctttagatgaacaatcattgattgctagtactagtcatggaaataggaataagtgtcctgttcctgggattttgtataacaccaataccgttgaaagcttcaataaacttgacaaacaaagtctgctaaaagcagaagcaaataaggtaaatacaaaacttagctccgtgacttggtttttactggttcttgtctgcagaagttttaacaattttgttggtgaattttagatttgggaggatattcaatcaggaaaagctcttgaagacccttctgtgttaccaagattcctcgttatctcctttgcagaccttaagaaatggagttttcggtattggtttgcgttccctgcgtttgtacttgatcctcctgtaagtttgattgaattaaagccagcttcagagtattttagttctgaagaggctgaatcagtatccgctgcttgtaatgattggcgcgactcagatttaactactggtactcaacattcttgttctattttttactattaaaattcaaggagtggtagctgaaaaccttttgttacttctccgtgttttgctgtagatgttccattctttttggtttcggtttcttctgattcaaaagctagtatcagacatcttaaagacttggaagcgtgccaaggtgatcatcaaaaggtatgtgttaactaactcttccatatgcgttagatacagaaaaaacaaaattcacctttatgtgtctctcttcctgcagttgcttttcggtttctatgacccgtgtcaccttcctagtaatcctggctggccacttcgaaactacttggcactgattcgctcaagatggaacctcgagacagtttggttcttctgctacagagagagtcgtggtttcgctgacttgaacctttctcttgttggtcaagcctcaattacactttcatcaggtgaatcagctgagactgtacctaactcagtgggatgggagcttaacaaagggaaacgtgtaccccgatccattagccttgctaattccatggatccaacaaggtacatttttgctctgtgtcaatgatctactcaactaaatgggtaaaatctgattagacaaacggaatcacgttctttcgcaggttggctgtttctgctgtcgatttaaacttaaagttaatgagatggcgagcattaccgtctcttaacttaaatgtattgtcctctgtcaaatgccttcttcttggagctggtacattgggttgccaagttgctcgtacccttatggtacgtattgaagaaaatgcgagatttgacattattttacaaactcactgattaactaagaactcgtttatcttttattttcttagggttggggaatccgcaatatcacctttgttgactatggaaaagttgccatgtctaatccagtcaggcaatctctctataattttgaagattgtctaggtcgtggtgagtttaaagctgttgctgctgttaaaagccttaaacagatatttccagcaatggaaactagtggagttgttatggctataccgatgcccggacatccgatttctagccaagaagaagattctgttctcggtgattgtaaacgccttagcgagttgattgaatctcatgatgcggtgttcttgttaaccgatacaagagaaagcaggtggttaccgtctcttctttgtgctaatgccaataaggtaactaactctgtttctttatttcttcttactggttatataagtataacaatctgcttgatatgtcggtgtttgatgtgaatttcagatcgctataaacgcggctttaggttttgacagctacatggtaatgcgccatggtgctggccccacctctctgtctgatgatatgcagaatcttgacataaacaagacaaatacacagagacttggttgttacttctgcaacgacgtggttgcacctcaggatgtaattccctggtttcttcattttgaattgttttgtttcgtgttacctccagttcagtcctgattcgtcgtacccactcttttcttgtatttgcagtcaatgactgatcgaactctagaccaacaatgcactgttacacgcccgggtctagctcctattgcaggagctctcgccgttgaactcttagtcggagtcctacaacacccacttgggtaagcctttcgaaactcgaatacattgaaaatacaatcctcaggcttatcgtcttacatatgtttattacatacagtatcaatgcaaaaggcgacaattcgagcttgagtaatacaggaaacaatgatgattcgcctctcgggatattacctcatcagatacgaggctcagtttctcagttctcacagatcacgctgcttggtcaagcttccaacagctgtaccgcttgctctgaaaccgtaagtttccacatgacatcattcttagaaaactgcgctcgagaatctgatgatgtttataaacttgtattttcaggtgatatcggagtatagggagagaggaaacagtttcatacttgaagctattaaccatcctacatacctggaggatcttactggtttaaccgagcttaagaaagctgctaattcattcaacctcgactgggaagacgatgatactgatgatgacgatgtagctgtagatctttaaagacagatttatgtatcaaatgtccatagactatattcactaggtggcttcttttatgaatcttttgataagcatttttttaaactaaattaaagtacaaagaaatgaagaaatcaaattcttaatcacagaatgattagttcaatatctactaaaccgaaaatcacaccaacagtgtatatataattttagataatcatagcttataattaaatttgaaaagaatacattcaaagattttacatatcacattagcaaaaactatggagtttgcgtagaacaaatccactcaaataaacagaggttagcgttgacgcagctccattcaaatcacaatttaaggagataaaaggataaaattagatttgtttaaaattgaaatagacataacttctttttttttttttttgctaaattgtaaatatttcatagataatgaaaacagtttaggttacaaacataaaatttgaaacctatatatatggatctatggcaaaaaagaataaaaacatagacgcataaaaaacggttaattaaaaccaaattttcgatcgatcttctcaaccttgcaatgaatctaagggaatagatgaagcgatgacgttcaattctatccttcccgaaagagatgcacaagcagaagggctgaaacagattgtgatacaccaaaaagcgatggactaagagctttagaagcctttcgttggaggcctgacattgagccgtcaacggttcgaaacacaaaagcatcaaacacatactttccctgcgacatgtgaaagcgatacttcaatccaatccatgagctctcccgaaagcagaacctcacacgccaaagtagcaaaagatgcaagctccctctaaccaagttcatttcccgaagtcagcagcgcagagcaagataagaactaatcaccactacaccagaagccataacataacttctttatatagacacaatatgttctttcttttatcatttgaaaaacaccgtcaataaatttttaccatctacgaaactacgataactaaacttattcaactctcgttcaccgttttagctatcttcagcattttcgtgcttggtatgtatctatatctaaaatcgactaaatatattataaacaaacgatctaaaataaatgtttgtgaatgccatgttaatttttttaatatcagttcatatatattatttccaaacatcaatatatatgaaatcaaagaaaacttttttctttttaatttttaataaaaaataatattttggtgtaataaacaggagtggtcgaaaatgagtataaatgttcggaaattctgtttcgaaagagtaagtgtgattatcaagagtgtgggttgatgtgtgttttgaagaggcaggggttgtcaagttgctctaatgagggcatatgttcttgccagtatcaatgcccttaatttttattttttactatgtaaatcaaattatatgtaaactttaaagtaatttgctttacatgttttttatatatgcattatccattagaatgtattgtttctgttaaaaaataaattacaatttctaagttagtaatttaattaactgtttttataagaaagtatggtaaaacgcccggagatgagattagatgcaatgtggtggatattttagcatgggcagtgaaattttgctaacttaattctgtaacaaaaatgtgaaagggaaaacaatgcaatctatttatttatgtatactctactaacatgtatatgaatcagaaccgatctagttgtacctttttcatacatttaatgaaatatttctatagatttttttccccaaaattgtcgttaataatgtgaagcccaaagctatgagtttttatgcttatgctctcgaacgagcttgatataaatatgatcgatttataggttttcaattaggagttatatgaaaagtttgtgtgttaaaaaaaaagttacaacttatgagtaacttaattgttattaattataagtaggcatggtgaaacggccggagatgagaccagttgcaatgtggcggtaagccgcttcagtgaggtgaattccgtcccaatttgcgtacgttgatggatcttcgcaagtggttgaacccttttctccgcaccgcacgtttggttgcacgttgtatcttccatctcctcctccacaacatgcctttaggacacttccagtgaaacctatattacaaaaagaaaaacaatacatatcgaacaaagtatcaaaattgatttgtatatcgaacatgtctactagttataggaaataatatggaagtcggattaccgtatttggaaggtgagttgaagaattgcatggcagaactgtaataatcagcatatataattttggcataagggtacttttttcttagagccgcgaggcctttcttgagcttatcattgtgaagcttagccaaattgttcaatggcatgtagcattggttcctcgagtcataaagccatccactattatcattaaaccgctctagtagagccgcagaacaaccgattggaaggtttcctggaactattagtgtcatggcaccttcctctatcaatgccttcagattataccaaacccaaaatcgttggttaatgaacgaatatttggactaattaacgttatatagataataattaatgtaaacgtttactacttacacttgtgacgtccatgattttgttaataacaaatggtaccaaatccatagcatgtttgaaacttcggaatgccaaaagagggtagttataatcgtttccaccaatttctccaacgagaaatagagattttctaaaatattgttcacattctgcaaaataaaataattaagattaagcaaatatcgaaaccatttcgtaaaggatattacatatatcaatctatgaccctttttttggttttaattttttttattttatttttttatttataattatcaagaagcaatctacagagtttctgccaaatattatattcttacaaactcttatatagttttcataaagtatattcaaaaataaatgtgcaaactatcatcagaggttttgttttaaacttttgaagtttcaacataaataaaataattgaaaatcaatcaaatatcaaaataaaattacgatacattcttttattttcttacctggcttggttttacacagagaaggtttcaacttcttgaaccaatcaagttgaatatccagtgtcttgtttgtcaacaatgttactgaaagacctctgtttttaaagaagctaaattcgttcgctgttgctccagccaccgcaaaatttgcacctctcttgaaatctaccgaatcattcgtccgtaagctttggagatacggtggaatgtacggtagtccactagcctcagctgcaataagtcacaaaatacaaattataaacattttgtgctcataagtttcattttgtgaaaatattgatttttaatataatgttttgctccatcaaattacggttatccataatttttatatttaataatctacttataaaagtgattatattttaatttttttgagagagagtgatgagaagtaaaccgatgaaatcgatgatgagacgtccgtcagagcaacgaccggtggaacggttaaaaaaggtttgtccgtacggtagtcttccaatgttcggagagtcaacatcaccggataataaaaagtttccggtatcgcttaaagaatcgccaaaattaaagattgactcgtactttagagttggtctcatcggtaatgaccgaacagagactaaaaatgagaatgccactatgaataacatattgattctcattttatgatttctttttttttttctttcaaattcagttatttcatgggtatttcgagaaaggttttatatataagaaagaatcattaatatataaaaaacggtgatgattctagagactaatcttacaaaacgtaaataacattttttttctgtaacgttgttacagtttcttaatttaagctttaattgtaaaccagagcatatgtttatgattaatgttgttgtagttattgttattattggttgaaactgagagtctgagagtggcaatcacatagaaaataatctatgcgttacttacataagtgtcgacaaataaaatgttatttacgtacataaggtattgtatgtctatctatgagtgtatttcacaataaaccatgaaaggtcggtgattagtgggtgaaagcatttagtgcatccacttttactttatttatttatgtttcccccaacaataaataaagcatttctttactaaatcaaacacgatcacttcagcaaaaccactacacctatcttatctctcagattttctcaagaagattgtgtggaagatgatgagacggaagatttttctctttggtgattccatcactgaagaatcctttagtgacggtggctggggtgcttctctcgccgatcttctccgccgcaaggtaaagatatgttgtatatattaagtaaagattcataagttttgattgataactcttcgatgccatagctaatttgttttatagatgattaatgtttctcatgaaaccataatttttcaggaaacaaatcatattattattgtctagtatagtgtagtttcggctatgtcttaaaatttgatacataaaattttattaggctgatatggtgctacgaggatacagtggatataacacgaggtgggcactgaaagtggtggagagagtttttccggtggcagaagaagacggcggagattctccggcagctgtgactgttttctttggagcgaacgacgcgtgtcttccggagagatgctcggggtttcagcatgtgccacttcacgagtacaagcagaatcttcgctctattgtttcgtttctcaaggtgatcattttttttattatctcattcaaatcttgcacatgcatatttattatagtactagtataatataaatatggaaatttgttgtatacatattaaatgcgtgagtcagtgttgaagaatacgcatacatattgtaatttttgtttttgagaacaaaccagagtattcgcttcatagttctgtttttcgaggtgaccaaattttttttcattatctaattaaaatcttgcacatattgacatgcatatgcatatatatactcctttgaccaaaaatgattacaatctctttatttgttttaaatttgtaaagtggtgaattgtgatcctgctatatacacagaatttatttttgaataaaatagaggagaataaacatatttgcgtgtataaatacattaaaaaatttatcattagcgttttttcaaatggtattttcattaatctataaagttatttaatatattgtcttttttactaaaaggccagagctttgatcacatattcacatctatagtacacacatatctctttttgggaaagtaaaactttagaagcaccatgacgtatatactttgtcgaaccactaagtgaaagtatttttatacatccttctttctacattaataatggattcttataatttcttgattttattaaatgaaattttgttgttatgtttcgtagaatcgttggccacaaacggccattattcttataactccgcctccaatagacgaagaggcccgcctcaggtacgagtcattaatccaataatcccaaactttgttttatcaaaatcaaccttgaatttttcaattccatagactctcatgtttatcactttgaccatgaaattttagatctaattaagacattgatctttacattcttagatatccttatatcgaaaacacaacggggttgccggaaagaacgaatgaagtagccggactatacgcaaaagcatgtatagcagtagctgaggaatgtcaaatttcggtcactgatctttggtccaaaatgcagcaaattccaaattggcaaacagaatgtctatggtcatacactaagtcttatttacacacctagtctatggtgcatctttatattcgaagcgaataagtaaatcaactatgttttgtgttttcgtgagttttagggacgggttacatttgagtcgggtcggtaacaaagtagtgtttgaagaagtagcaaagaagcttaaagaagaaggcattggagctgaggacttagctgtggatcttccccttatagaagatgttgaccctaaggatcctctcaaatcctttgatgagttttgatgctttatattactaccatgcagtttggttcttctatctttgattacttcttaatttcgatattattttagggaatgtattattttagggaatgtgacattattaggcactttgtgagaatctttttacgtttgaggcacttgtgagagagagggcactttgccatctttttttagaggagattgaaccaatttgcccctgaagtgatgaaaacacaataatttttaaacttattcttaatgagatcgtgtgggtgagaaactaattttttttttttttatcatttctcctttccatattcttttgtttttcatcattttcaattcctctttcaaatcatagtcgttctcaataattcttacaaaattatgaaaattctgaggttatctcaaaattcacaatcacaatctatgtttaccctaaatttcctttatttttttagttttgtattcttttctccattctccatcatcaaatccatttcattatctgcaacctccatcaatgaacgactgtgaccaacaaaaaaagtaacatcatcgatttctccttttcgagacgaagaagaaggagatccttactctctgctaccgaactccctcttcccttaatcttcctctttttctggttccatgctcttctctcttgtcttacttacggtttctggtttcgttgtttttttttggtaaaaggtttctttggttttgaatcataaaggccaatggtacatgtgattcgttgattctagcttaggctttaaattgtaaatctttaaacttttttttttgttatgggttctagattttatgattttatccttcaatttaaatttatttttgttagatctgttgaatttattgccttgtttttgaattgaaaaatgtttggatgtcatttgcgtagacgaaaagtgattggacgcataaggctgggtatgtggtggttatgcaagaagattggttgatgtttatgagctttttttgaaactttggtccatgaggctgcggtggccgccgtgagctccagtgtcttgtctggcaactccatacttatgtcgactcatggatgtcaagaaaagtttacgagaaaacacgaaatgtatatccatttgttcggcgctaggtggatacaccttcatttgttgcactatatccatttggtcgatgtttcatggatacaactctacttctaaaaatcatagatgaacacgtacttgccgattgtcagctataggaatccgtccattactcttcgaagatatgttatccaactaatgaaatattcttttatttgattttggtgaacaatgtttacatttggtgaacaatgtttagatttggtgttattcatctttcgtatatttgtttgtgcagataaaacattttaatgtaaaaactgtaaaatataggatcattcctatggtaatattcgtatgattatattcaaaaatggttcatacgagtgtgtaaaccctctacccttaacgctttacactaaatcctaatttacttaccctaaaattaaacccaaaccctcccatgatccttctccactaaatctaaaaccataaaacaaaactctgaaccatacaaaaaatgataattttaccaaccaataaaacacatttgaagcaaatcaaagacatagttgtccattgatgactatccaagcggtttagtccatgtggtaatctagtgactcatgaggtcgtttcatttcaatacacaagtttatacatgaatgataatcaccaattcaaacacccattcaaagtacatcgtctatttttctttaaccatttattcacttgtgtatggaaactcccaacattataaccaaaattgtctactaatcctagatataacaagaaacagatttacttatatagtgtataaaaggagcataatatcgatgtttgcgtctgaatggacagattcccttggatgacattaacaagcaggcgtccagctgaccatatatgtttgtactatcatctatggtcaccaatcatttgaatcaagttgaattcatggatgcacagtacgtcagtttgtgatgtaaattaatgtaatgcaaataatcatctgcaaaattgaatcaaagagaatataagatcaacacaaaagcaagtgtttggggaatcggatgcatcataacaagcgaatatctactcaaacaagtttaaactcaattcaccataacattcacacccaataaaaaaaaactcaatatgaataaatcagtgtggaaagaacctgatacaaagctgctccatcaatggaaaatcttcaaacactccacaagaagcaaaagcatccactaatcaagttttttttatctctctctctcaagctaaaatcttaaaccaccaatatagaataaatgagaaatcgtttactctaaggaaataaaaactaattgaaaattgagaaaagtgctatataagagaacacaactttgattaaataagcccaaaattttctctcgccgctgtgattatcagagaagtgggagaaccacgactgatgatttgccaccaaaaaccagagaaacgagatcgcggcttctactgctacacgagatccttcactcggtcgctcgttcacttattctttcttttcttttgttctccatattttatggtatctgaaattctaagatctagcaagtgaagaactggaagaaaaaaactgcaaactttaaggttttggagcaattgaatgaactttaggtagaacgcatgaaactacaataacatgaataaacacatagacaacaaaattatcagggtacagatttttaaaccaagttgtaattctagcaaacccatcaaccatcatcttccgctggattttgtgttttctaaagaaaaaaaagagatagaaaaaggaaagagacaagagattgtaaccgatgtaattaaagggtaaataagtcaaattgtccatacaaagtgcctattccttgaaaagtgtttaatcacgtaaatatttttaaaaaagtgctctacactgtaatattctcattaatttatccaataactaaatacgacgtcgtttagttacgaaaggtaatttggttcggcgtcgttacaaagactaaagattcacatgaatgtaactgttttttatccatatcaattttcaaaccaaaccaagaactgaactcgaaccattttttatccaaatccaaaccaaaccgaaatttaattggacctacaagcccattatatattcaaattttacaaaattggcataatataataatacaatgtttaataaataattaaactaaactgagtaaaagagggaaaatctacgatcctctctatctccttatccaacaacaacaaaaaacgaattctcgaagagaaagacactgaaatcgaaaaatctatagagagctcactcactagcaatggcgtctcttctcggaagatctccttcttcaatcttgacctgccctcgtatttcttctccttcctcaacatcttcaatgtcccatctctgcttcggaccaggttcgaaactcttttaccctaacaaacctcaaaagtacccatttttatctgctcatacacttgttgacatttcaatgaaaatgtgtgttcgttgtttttgcagagaaactttctggaagaatccaattcaatccaaagaagaacagatctcgttaccatgtctctgttatgaatgtcgctacagagatcaactctgttgaacaagtatgagtcttttcaacattatgttcatgtaattgattaaaagcttgaacctttggaatgatttattggttagtataaaagatttacaaagttgggttcttttggtattaggcaaagaagattgattcaaaggaaagtgcaagacctgtttatccgtttgctgctatagttggacaagatgagatgaagctatgccttttgttaaatgtgattgacccgaagataggtggtgtgatgataatgggagatagaggaactggtaaatcaacaactgttagatctttagttgatttgcttcctgagatcactgttgtttctggtgatccgtataactcagacccgagagatcctgagtgtatgggaaaggaagtaagagagaaagttcaaaagggagaagaattgtctgttattgaaaccaaaatcaatatggttgatcttcctttgggtgctactgaagatagagtttgtggaactattgatatcgaaaaggctttaaccgaaggtgttaaggcgtttgagcctggactactagctaaagctaatagagggattctttatgttgatgaagttaatcttttggatgatcatttagttgatgttcttcttgattcagctgcatctggttggaacactgttgaaagagaagggatatcgatttctcatcctgctcggtttatcctcattggttcaggaaatcctgaagaaggagagcttagaccacagcttcttgacaggtttggtatgcacgcgcaagtagggacggttagagacgccgagctgagagttaagattgttgaagaacgagctcgtttcgatagtaacccaaaggagtttcgagaaacttatcaagaagaacaactgaagcttcaggagcagattacaactgcaagaagcaatctttctgcagttcagattgatcaagatttgaaagtgaagatctctaaggtctgtgctgagctggacgttgatggattgagaggagacatggtgataaacagagcagctagagcgcttgcagcactccaaggaagagatcaagttacagctgaagatgttggtattgttataccgaattgtttgagacacagactcagaaaagatccattggagtctatggattcgggaattctcgttaccgagaagttctatgaggttttcacttagagtaaagatagattcttgaaacacatttaaagaagattcaatctgtatcgcttattatacataaaagtttcaattttctcaatcagatcaagtcaagaatcagttaggctgattccagaaactcggtttacgttcttgaaactccggtaatctctgataaacaatggaggcaactctgatcagaataccagcagtgagtgcccatatgataaagcttctctctttatcttcggaatagtaatcaaagtattgaagaagatatctctctccttcatgctctcgttcctctgctcgcctgtttctgtcctgcgtaaaaacccgacagagagagccattaaagattaaggtttagcaatggagtttaacggaaacagaggattttccagttcaagaaccttgaggaacatctctaatggcacatcaaagatctcttccacttcagctggatttggtaactgtttaaacgctttcttatcgtgtagaaaaccgataactggtgctaccgacattcccttctgcaataaccgaaaactcgataaaaccgaaagataacctatttagcaacttgaattcagatgttctgatgcaatatttattaccttgttaacaaatggttcaagaacagaaatgattgtaacaagagaaggatctaaaccgatttcttcacgagcttctctcaacgcagtagctatatcatctttatcttcttggtctctttttcctccaggcaatgctacttcccctgtttttttttaacaatttcctctgtttctagtttaaagatgaaaactttactaaaaagagtaatgtcttaaaagagattttgattttaccaggatgagaagagagagtagtagatcgtttggttaagattacgcgtagctcgtttttgtcttctctttgttcttggtatagacaaactaatacagctgaagattttgcaggaaaatgttgacgaggatgagtttggcaattttgaaacagtttgatcagattttgcaattctgtagaatctgttgttgttgaagacatattaacagagacttcaactatgtttcttcttcttcttcttcttcagatctgaataaagcgactttgttttagtaacagatccatatctttatttacaaggaaagaagaatcagatttgttagagtggacaacaaatatttagtagatcatatggacaacaatagcccattgtcattttaaattggcatattgtaaattcatttgactaaattactatagttaagaatttaatttcattttcaataaaagttttttctacaaattaattcctgtaaaattttaattattctattcatttacaaaaatatttttcctcaccaaaaaaaaatttacaaaaatattttttgacttgtcgtttactcaacattagtttcaaaaaaaaaccgggacggtaaaattgatggtaagagtgtgcatcttgaccgatttgaaccaattgaacccaaagagattcaaactgaactaaaattatatgtacaaaccatgtgattaacctttttttttttttgaaagagggttaattcaaatatgagtgattaacctatcttcgacccaaacggttaggagaatatatgttcaaattatttgattaacctatctttaacccaaatgatttagattggtttgaaaccgaaccaaaccaatagctcaatcatgaataagatgatttagtgtagcttggttgtatttttcttttcaaatatataagtgaaaatatgtattaaattcaaagaaaattattagaaaatatataaaaaccaagaaaataacttattttggatttttttttttttttttaagtgaactcgaacccataatttttcttagtcagtgttcttctattgattttctttattttgataaagattattattctactgatttacaatgaataaaataaaaaagagagtagatctgtttccttatccacaataattcaatttggtagtgaattacaattatacgagtaagtaacagtcgatcgtgagagagcaagagatatagaaaagtgggtgatgtgtctaataaatataggtcacacaaccacctaatcttacgaatcattctactctccatatttaaagttatatagcaatcaatgtcagctacattttcttacgtatcttttttttggttataatatgccatgattcttgaaaattttaattcttgattcatagaattgtatactaaaggttgggatttatcataataatggaaacatgaattctatattaatacataatgaactggattctagaataatacagagatttgggtactggattaaatcgaaaaaataaaactatactgtttgataggtacatttagataactattgtcctggtattattttttaaattttttatttttaaatctgtcgcattttgtttttcctcaagtattaaaaagtaagaaatggtatccaattttgaaccgaaactgcattaaataaactgacccgaccttgtgtgtgtaaatgtatagagtagacacacattaatagttgaaaaagggcaatgctaattgttagtgaccctaattaatactccggcaaggatatatgaccattctctaactgttatgttccaacacattaggtgacctaaaactgtttggaaactttcatgtcacttaataagtaataacaaagcccatgtcaacatccttttttatgtgtttttccccaacattttggtttaattaatcactcattattatatattacttacctgatgaattagctatctgatgaaagtttcgttagaaatatttacatgattaaacacttaaagattaaaaaaacaaaaaattcgatgagatatcagctaagaaaagagagaaaaagataaggctaaaaagtttatggctgtaatataatatataataaattaaacagaaaaaaacttgaaaaaatctaagaggagtaattaatattgaaggaagacagatgaaacaattgtataaaaaatgaatgatagaaattatttatcaactataatctttttttgaaaatctattgtttgtagattataatgaacaatatttcgtttctattaaggtaaaaattacaacaccatagagaggacaacttagctaaatgaccatcaacattgaataaattaggtttgaatgattaaatcctttaacaaaaagtaggtaaatgtttatggaacattcttattaaaaaagcatttttattttctcaagaaatataaaagaatgatatttcttttctttttgcccaacactatgtttttataaattaaatgtttgtatataaaatagtcccaaacaacaaactaggcgtacaacggcatgttattcaaataaatagcactctgattacgtgtttttttttttgcaataaaaaaattcataaacttaattaactctctcaaaatggttacatatatatctaccaacttgacttaaaaggaagaatgatctgacttctgagttctgaaattcatatttaacaaattatccataaatgatgtgttggacacctattaacaaattagcctctagtgtacatgttagacaccgacgtattacttcttggtctctatccaataaacatttggcaaggatcttaaatatgtataactatttgatgtataagtctgttaattgtgaatgttaagaccgagagtataaaagagcttgttaccagtttaagtcattatttatgtatctttattcccatcatggccaaaaatggctgcgttaattactccaccgcaacacgacacttaaacctaatacttaaatgatagtagataagttggatatggaataatggatacaatcctcacaaaataaatacaatttagaacagagaatgtttgattgcttgatgttttaacattttataaaattctgttctttggcaaaagtgtcgttcggtggtttactttcactttattagtaaagacggtgacagtaatttatatatatatatatatatatatatatatatatatatatgactttctaaatttggaaggttagtatgaaatttggttcagaagaagctacaattcatctagtcggtgaaaataattgttgttgtagtcaaaccaaaattacttacatgatttcatttttatatagttaaaagttaaagtttgttatattattacttatatgttcggatttagatctgaagagagcagtacggatttaaagcccaaaattgtacattatttcacgaatataaatcccatatatatgttttttttttctcaaggaaatcccatatatatgtaagataccataaatagattatttgaaagacaagaaaatcatgaagatatgatatatcaacaaaaaattaacacaagaagtcaaattaaatttctctgttggccactttacattatgtctcaaccaacaacagaacgccaagctgtccaaaaaaaaaaaaaaaaaaacccctcaagagtctatatatataacaacattctcaacacaaaccatatgacatttacattctctcaaaagaaactttctacataatataaaaagtcacacattctctctattaattaaacatgttgcttgttgcgtttgtgactcttttggtagcagtagctttgcagccactaccgtcagtgttgtctttggacgttcaccttcttcggcagctagccgcaaagcacaatgtgacatcgatacttgtgtttggagattctagtgtcgatccagggaacaataatttcattaaaaccgaaatgaaagggaattttccaccttatggtgaaaatttcatcaaccataaacccaccggtagattatgcgatggattactcgctcccgattatattggtaagttttacactatagtatttatataagtcagaaattttcaatatgttaattgaagaatttattttacattttttttttacagcggaggccatgggttaccctcccataccggcttttcttgatccatccctaacccaagctgatctaactcgcggtgcaagttttgcctctgctggttctggctatgacgatctcacagctaatatatcagtaagtcttaacattttccttttaccttctaataaaaacattcagttgaaatactcttttcacacaaaaccaaattaaacttaaaactattttgttggttgaacagaacgtatggagtttcactacacaagccaattactttctacattacaagattcatctgactaaattggtcggtccattagagagcgctaaaatgataaataatgctatatttcttatgagtatgggatcaaatgactttcttcaaaattacttagtcgattttactcgacaaaagcaattcacggttgagcaatacatcgagtttctctcccaccgtatgctttacgacgccaaggtatgtttacgtctccactaaactcttgtatacgtatgcattaagtattacgataactatattatagataaatctatatatatatatatatatatctataatcatataagatatacatgtttttatcaaacaaaaaaaagatttacatgtttccaataattttgtgaagaaaaaccaattatatttctcactattgcatgaattaattgactgaaaaagaacgtgtctctgtgtgtgtgtgacattaatagtagctgctgaaataaatgcgttggtaactagtggcattgaaaaattctacaaatatcttgtggatgtgtatgtatgtgggtcgtgtaacaaaaaaaaggtcataaattacaacaaacatagaggaaaaaacagtacaaataaaatcatacgaattctatctggttgttgggagaatttaatatcgatacataatttctaccctacaatcatgaattttcgatttttcatgtcgggtatctgtaacttgtccatgaatcacaactcataaccacaagtatataaaattatttttattttagtttgaaaagtattttcagcatttactttcttgaactatataaggtcatgaactttatcccaattactgggaagcataaatataatcatgcagccggtagaagtgtccaatggtattttgtttcattacatgtataatgtttcattggaaaaactggtttgcgaccaaaacttaaattctgatttggtccaccttataaattttaaattgttaaatactactcctgtactttttttttgttgaattaaatttgttagtttagttttgggttaattttgtaaactgaaccaaaatagataaactatatagacacatgtataccggctaaaaaggctatgaattgcattttaaattataggaagaagattcgtagcatcttttgagcttctttttttcttggtaaaatcttttgagcttcttgttattattttacagatgttgcataggcttggagctaaaaggttggtggtagtgggagttcctcccatgggatgcatgcctttaattaaatacctacgaggccaaaaaacttgtgtagatcaactaaaccaaatcgctttctcctttaacgccaaaatcatcaaaaatctagagcttcttcagtctaaaatcggtttgaaaaccatctacgttgatgcttattcgaccatccaagaagccattaaaaatccgagaaaatttggtgagaacatatatcttattggtttaaaatataactttgagataaatttgacaatcaaaagaaaaaaaataggttctcatttatagtacttttggtttcaattttaaggtttcgtcgaggcttcgctaggctgttgtggaacaggtacatacgaatatggagagacatgcaaagatatgcaagtatgcaaagatcctaccaaatacgttttttgggacgctgtccatccaacacaaagaatgtatcaaatcattgttaagaaggcaatcgcatccatcagtgaagagtttcttgtttagaaatattatatgtttgtattttactatcatgatttatgaaaaattctagatgtaattgaaaagcattcaaaatgttaaatttaatggttcaaatcatctacgtagatgaagaaggccaacgacgagaagcttataagcttatactgagaataattatctgtaaaataaatattacactattttatttattactgatagaaaatttaaaatattctaatattagaattacaaaactgatatttatgatctaatagaagcaattttgaactcatatagttctattgaaattttattcgcattagttaataatattataacttaacaaaagtatttacttattaaaaaggagaaaataaaacaattcgataaaaaaagaagcaaaacataagcaaaaagttattaagtaccaaccaaacttctcatcacacacattcttcttcatttgctatgattactaaattcagttcacctttaacaaaagaaaaaaaaatagaaacagtacaaaaaatacaagtacactaattattttgcatttcaaactgaaatattaacacatagaccaacattacatttcgtcactcataatggaagaaagaggtgtatgtaaattgaaattaacttatcaattagctaatagtgatcataatattaattaaaaatttcagaaagaaccgagaatagaatcataaattggtcggagagatctaaaaagactgaagtaagtcttctcacttggatggatagagtcaaagaagacataagcagatgtattgggacacacatatgactttggattacacaaaaacgatgcctctaggtatccacttccacaacatccactgaagacttcctcgaaccctaacatacaaacataaaaacagaaatgtctttgaaaccagatttacttgcactggtaacaatggaaaagatcaaatcttttttctttaaaagttttatttttattataagataataggatactctaataatagttatagatccaatttttgtataattttatcattggtcctttctagaattgtaggataattttggcattttatatagtactgccactaaaaactatataaagttgaaaattaataatataccctaaattatattatacatgtttgtaaattaataaaatagttaacgacatatcctaaattctaaactctaccatgggtgatgggtcctaactcctaaagatcaaaatatattcactaaaatatatgttaactaagctaataaaattttctatccgaattacttgttatgttttgtacttaccgaattttcgagggtcacgaatgacctcataaactgggttatagacgtcgaggtaaaagattttggatccaagatgggccaaacccacttgcatgagggccaattgtttttgtaagaggaaattgtagtttgtggccacagtggagaaacggtcaatgcaacgacggttggtcaatgcttcgccggagaataatgttataacaatcggcaaacacccaatcggtggtaaacctgccactgttatctttcttgctccttctttccacaaaccctaaaccattaataaccatatgataagtattttcataaaagaaattaaaccagtctaatccaaaccgaaccaatatggaccattttgaaataaaccagtctataaaatccgatttcaacaattcgaatgagatcaaagccaaagtcaaacgtttaaactttaaacaaattaacattttaagtgtaccaaagtttagtttaatttgtaccaaacgtttgaacaaattaacgtgtatatggaaaaaagagagaacaaattaaactttggtacacgttaattataagtgggatactattatatttccctacacttttatattttgtttgataaagctacgataagttttaaaaaatcacaaaagatcactgatttaagatgtaagaaataaaaaccataaaattctaggatactagaataatctttataaactttatgtaagcctaattaatgtttgtggtatttttggaactttatcaacattgtggtatctttggaaccaaaagattaggttaggttataattttgtgtttaagaaaaaaaaagaatatctacatatcctaattgactacaccaaaatctacatagcataaacatccataattaaaaacggattaggtatatggaaaatcaggaaataagaattttcacctggataaattgcttgagattggaaataacgaattgttgataagcttcgatagtaaaagtcttccttcgtatgggaattgtgaaataattaatgacgaaatcgttggttcctgcacttacacaaaacatagcttcttctatgtgtttttccatttcttgttttcccattttaccctccaattttctcttgtattctctgaaatactctagctgagtcggaatgtctatcacgttctgtaccatccccagtgaaagcgacaacacacccaacaacataattaattaaatttattccacaaagtatacgaataaattgtgtttagttatttgcaataaatgttctaaaattagcatattttttctttcttaataattggataatttgaacatgtgcgctttttttaagagactagagttaattacctagtagcgactaatctatcaactgcaacaaataaaatactttatctgttttcactcgtcaacgactgaacgacattcaagtagtagtgattaattaagtttttgtcttttgtcattatatttaatttcttcaattattagttgatttagacatcacattctagaacctaaccataaataaacatgaggttttattatgccttttggatttaaaaatataatatttcaattattttttgaaatattatgagccagaaaattaaatgattggtttattcataacttcatacgtctatatattatcctggaatattgaaaaatgtaatcttgccggtaaaagaaagaagtatgtactccataatttgttttaaaatgttgataattcgcgtacaccaattatcctcaatttgttgtccttaagaacgtaacttagaccagttggcaaatgaatttagtaataatcatttcaaaaagtttcaatcaaaccaattatgaaacaatcataatatttgagcataaatatttggaagtcccattagcagtaatatagttatagtaataataaaataacgatccagatgcatagatatagttttttctacgttcttgtttatgcaaaaatttaaaaacagagaaaagagattgagatcggacactaacagttatggttggagtgagaggatcatatccagagccagctgaagcaaagctaactccacttattaactcatttattccaagatttgggtccaaatacggtggcacattctccttcacaccaatgtatgaagctgtacataaatatatatatgatgtttaggttattaggttcaatatatatagtgaatatatttcagttgtatatatgaacactaaccgataaaatctgtgacgagtcgaccgttgcaaaatctaccggtcggagttttgtttctgaaatcgagtccatagggcggaaaattacacttgaatactgtgtcaatgtagttgttattgcccggatccactgttgaatctccgaacacgagaatagctgaaactgaatgttttcttttaggttcagactttgcgggttcgagttttgatgttgaggatgagaaggagatgaagaacaggaataggaagaggatgaaggaaacatatgaagaaaaatgtctgtgatgacttctcattgttgtgaaagtttggagtggagacaaatgagtagtctggttggtaccttcaagtgtattagcacattatatactaagatatacagtcataattaataggggttgtctatttcagtttaattgatcgaactcaatcaaaagttcattaaaaaaagctgaagtaatagtgattaaaaaaaactcgacaaagaaaatggaattagattttttatgctagaaagaattagtgctttccaaattgaaccgattaaaaacattaacgttagtattatttaagaaagaatgaaacaggatagctttttaatttattagattttattaatagataaaaaaacataacttccgtcatattaaaaaaaaaatgatgtctaacgacaatcatgaaatgtacaaattaatttgtttcagaaaaatttaaatccaaaactaatgcatctgaacccaaaattatatatgcaaacacacaaaatatgttctatacttacatatttcaaaggtggaaaaacgaattcaataatcgaagctcaacatgaactagtcacatttttaataaatatgatacacaaagtacatagtacaaatgtataatttaattttggaagatgtaggctcccattggtgatataaagttgtacaaatgttttagcttttattggtaatttttaaccaaatagtacaaagttgtataaaacaatggtacatgaaagctgtaaaaaaatattgaggataacgtttttaataataaaaaaattgatatcgtttttgtaatttggttaatgtcaaaaccgtacattccttattaaaactctacgaagttaccattcaaatccgtagtattctcttttattgaaccgagattttcacgaaacaaacactaattaatctgcaggaaacattaacttccatctcaaattatttaggtaatgctttaaatgttgtgatgctgtatattgtgggtattcattaaatttatgactacatatatctttttttttttgtttaaataatttatttcgagctaactatatattaacgctactacatgactttatacctaaaaatggatcaagtgatttgattatttcatcaaggaatcaggcaaacaatcttttacaggtattaggtacacatttaatagtgacatggatagctcataactagtatacgtacggtgttaagatacatcttattttttcttgtgacgcaaaataaaacctttgaatagttagattccttgttcgttcgactttttttctttttctttcattaacatacatataactaaaactatacataataatcatttcactctacatataatgcggataaactacttagtttattttattatatagcattttttttgtcaacctgttttattcgattatacaatggaaccagtaatagggataaaaaaagatttgttgagagatcaagctagagtctcgtcactctgatcttataatcagctagctcagtgaatggttcaactctaattttccttttgttaatctgatctatcaaggagaagtcgatgattgctcttacaagttacatctcaagatgagatacttgaggcttattgggctcttcttctttggatacttctaggttcaagttgaggcttttagtgggcttattttgataagtttttatctattatcgacctgaattagcaaactagtcagttttcagaacatatttagaaaattagtcattttactagtcacaatttataaaaaagtcacttttcactgtttgatttgtacatttagatttgtacaatacttttagtatacatatgtatatagatatacacagcgtacacttacatctgtatactaaaagtgttgtacaaatttaaatgtacaaatcaaacagtgaaaagtgactactttgcaaattgtgaatagtaaaataactagttttctaaatatgtttgaaaaattgactattttttcatttatcccattttaaaatgtatgaacagtacaatattattaat

SEQ ID NO: 841 - DNA, 84510 bp, Arabidopsis thaliana
attatgctctattttaaatcaatggaaaattttatataaaaaatgcataatgaggaagagacacacaaattcaattgttaggaaagaaagactttcactacattagtgctcctaaacttttgctctacgcagtataacctctaatttactggtaacttatatttgaagtgatttacgtatgatactacttgaagcaccaaactgtacttctataaactcaggtaacagtagctacgttattataataataataaaaaatgttataataaggttttaaagaaagtaaatatcaacattatatatggggacatacattgattcagtttttgataaatagtgtaatttgtatttgagttaaaaaatttgcctttatttatatattcccctcgaagaaaaactttatttacgtcccaaaaaagtatttttggattcgccatgaatgtttgatcattcatatttcagaaagtattataaatcatcgtatatctgcatgagagtttcatgcataatactctttaaaagaaaattgttggataacgtaaaacaaaagtgttggatgacgtcaaaaaaactgtgaggtgacgaagaagacagatggaaattgtatttttgaacacactaaaaaaatcgtaatatgtaagccaattcatgtcattattgaatgttgttaaaatgaatcaaataaggcaaaacataaaatattgaagaaaaagattttataagaaaatgtaaaaacactagagaaagtaagatgagagttccttctccaacacttaaaaacccactcacaaccaacaccaaacggctacatcactttcggtgaccgcatgatcttgcacttgaagttaaagaaatactcaattcctaatcattttaactcattaatttaattaaactaaaaatatcaaaccaatatatgaaaggcaaaaggtgaacaatatttcagctttttggtaaaatttgtttcgattctgctaaatatcattttgctttggacctggttagaaaagtcagatcaaatttggaaagaaatacaaattagtgagtacatgtaataataaaatttaactattttcaatacatgattttaatatttgtatttatttaagaagattataattcaattgtttcagtgaggagttgtttggtttactcggtttattatatatgatgatatacaaaaccagttctttaatttggtatttgtttcagtatgtttgcttcaaatttccttcccttacgaataagcaactaataatgatcaatgaaagttgtaacagagacatcctccttaccaataaacaactataatcatcacaaaagcttcttaagaaccttccaccacttctcttctcttctgaacataaaacccaaacacattcacaaaattcataaacataaaaaaataaaagaaattgaagacaaaagcaaagaaaatgagcacagcaagattcattaagtgtgtgactgtcggagatggagcagtgggaaagacttgtatgctcatttcatataccagcaatacgtttcctacggtaacttttaatttcttagcaaacttgatatatatccagatatattttcaaattgatgttttaagatatttatgttaggctcctgagatctttgctcattttaaacgttgttcatggcaaattaataagagcctagtttcatcttttgcgtttatatttccatatccgtttaagcatatttttcctagaatcattaacgtgaaatatatctaaagctgaattcaaacccatgcttctggatttttgctatctgtttacttaagaaacatggtttaatgtatgttttttgatatataaatgatttaactatctaatttacaggattatgttccaacagttttcgacaacttcagcgcaaatgtggtggtcgacgggagtaccgtgaaccttggcctgtgggatactgccggtacgccgtatgattacttgattatactaaaactgattattaatgaatgctagttacgataaaagttattattgtggaattacaggtcaggaagattataataggcttaggcctttgagttacagaggagcagatgtcttcttattagcattttcccttataagcaaggccagttacgagaatattcacaaaaaggtaactttaaaagtttttccatccgtttttttttatagataagaaactatgattatatgataaagtatttctagaaaaatttgttgacactgactgattaattaatctggtgattaatagtggcttccggagctgaaacattatgctcctggcatccccattgtgctcgtcggaacaaaattaggtaacgaaaactttccccttatgagttcataaagaaacttaatttatcaacatttgtgtcaaattagatatggtcttgagtaataatccgcagatcatacgtttttcatttgcaaaagaaagaaaaaaattctacaagaagctactttttcgtcaaatagtaatacactctctttcactctgaataatattgagatatcactaaataatatgttatttagaaaataacacctatagtaaatgtattttgaaaaattacctaattaattcaggccagtaaattatattatttgttctgttatgctacagttttaatgaaaaacatgtgaaaaaagaataacattttcaaattcgatagttgtataaaaacagttagattttcatctaatagcagaaaaatgttcaaatgtaggaagatatagccacttggatcgttaatggcatcatgaatagtggcccaatttaacatttattcaacaacttatattgaaaaagctaatacatttctccatttgatttatggtatctcttgtgttattgataatatctttttattcaaaacaataatgttacacaaaaatgaatatagatttgagggatgacaagcagttcttgaaggatcatccaggagcagcttctataacaactgctcaggtaccatacacaaatctttaaaaaataatctatacaaaaataaattcataaacaattatgaatggatttgagtaacagggagaagaattaaggaaaatgattggagctgttaggtacttagagtgcagctccaaaacccaacaggtacttagagtaaattcaacatgtatttaggtacttagagtgcagctccaaatgtttttttgccaaaattttcatactaataatttgaatccacaaatatatatatatatatatatatatatatatatagtaaattgaaatacttaatgaagttaaattaaataaactgaaaaagttttttgtttgtgaatgtttaatagaatgtgaaggcagtgtttgatacagcgataagggtagctttgaggccaccaaaggcaaagaaaaagataaaaccattgaagactaagagatcaagaatatgctttttcctataatatctgaacagatttcaataaataacaaacatttatatatacttgtattttgatatttttttgaatattttctacttgaaatagtggactttgcttcatcacgttattggcgagagtattgtcgaatcatgttaccattattcgggagaaatttgtaaaatagtagtaatttggcaagaaaattgaggattgatattttttccccataaattgtggaatcacgctttttggtgacaatttgcgaattctagtttttagcaaaaaaaattaaagagtaatgttttttgatgaaaaaattatggatacaagtttgaatcaataatatgagattttcgtctttgaaaaataaaatttcaagtttaaaattttggctaaaaaaatgtggattcaatttattgataagaaaattgtattaatcctcacttgaaactccttacactctttctacatgagtaagacataaacaaatgtgacgttcatgctccagttcttatatatgtccaatgtataacctgagcaaaatatacttatgcacttataataccttaattacccgtcttactttgaggctggatcttgtcctttaagtaatctatcttctgggaaaaatagaactcaagggctcttacgttcaatgttaaaaaatggtaccatttccttgcaaaaactcagctgtttcagaaaagatttcaaaagctagcatacctataccataacacacaaagttttatacattggggtagtccacaataagaactgagagaacgttgtttgctagataggaggctctttcattgaagagtatgatggttcagtaccatcttcatcatatactctacaattaaagaaaaccaaagccacacacaaaaaaaaaatcaaatgcaaatatagaaatactattacgagttctaattctccaacaaactgagacatagtcgtacattcttgttaacaacttaacaaataattgtttataaaagattgtgtagaaagacaaccatgatggaagggatcataaacttataaagaccgccaaccttaaagcaagcttgtcaagaaaagtctatctgttaacgagatacgattttgaaagcaaccagacctcacaactttaactggatagttgtaggataaagcaaagaagactcacaaaatgaagagttagagagctagaacaatacaatagataatgtatcatgcgataggatgagatagggaggcgccacacattgcttcataggaagtcgatcatcatcaaccctgtaattgcagaaaaacattcaaggttacataattgcagaaaggcttcattaacgatgcatccatcatagattgttctttcataagataccacgttgatatgaacaatcaccagtcaatacataataattatataggtctaactcgtcgttaacatttttgttgtagttagttataaaagttattaaaagacgactgcgatggtttgatggattagtatcaagaaaataaaatgtgtccaatctgataatcattaaagcggcggggattggacaaaaaaaaaaggtagtgtgtagcaatggtaaaagtgacaaaattagaaaccgtaagtcaaaaagaaaacaaaatatttgtctccctatgtaacaagcccactctacgaacagctcattgcatatcaacatgaaccatttaagcttaaaatatttacattcatttttgtttaatcattcattgtatgtgttcagttttgtttcagattaaatctatatgcaaggcgttcatacttgagaaaaaagatgacaaaattttatcaaacaagaaagatgcttggagaaggaaaaaaacattagaaaacaaaatctactaaccaatatcaatcatttagagtgaaatataaaaacatgtgaacatttaaataataaataaataaacatgtatgaacttaagtttgagaaaaaaaaagtctgtaacggattctttgatgtgggtttcatgttctttatacgtcggatttttcatgtttagggttgtttttgaaatttagtgtaacggaatatatggtttgtgtttttatttattaaaaaaaaacagataatatatttatgataatatcaaaactatgtgaaaatggaaaaaataataataagaaggaaatagtacctgaaaaaagcaaatagtaaatctagaaacggcagaaaaatcactttgatgcaaagtctttcgtagtttgtgaagatttgtatttttcctcgtcatagtcaaattagattatgagactgaaagtgtgccgtatttgtaatgggacaagtcaccacttttgcaccagttacattgttctttttctgtctattttccacatattgacatacttaaagaaaaggatttaaagttacaatgttagtatttactttttcatctaataatattgatagagcataattaaaggcaatccattactatatcatttaatttatttcttttaagatttctcttattattgactaagagaaaaatttaatgagtaaaacgtaaatatgatccctcgagtcaatccaaatctccagcttaattaatttgtacaaccatttatgaaaataagagaaattaagaattagaaaaattcatctaaaagtagataaatttcctgataataatttaagagtaggaattcaagtaaatggttgtacaatagttgaaaaattcatctaaaagtagaaaaattcatctaaaagtagatgtaaaaattcatctaaaagtaggagtatatgaatcgtagtatatatttttaaaaatttaaacactttgtacgtaattggttaaaatttcatgacttcagatacatttcctgataataatttaagagtaggaatttaagtaatccgaattaaaaggatacaaaacgaatgtaatgaatgattatgttcacatgataaaatgaaaattttgtgtctcttgaaaaatgcatacgatatgcaatttccctttctttcttttgttcttttctctctaattttacgttttataatttctattagttattaaatgtagtaaaacaaaaaaaaccaaagggtaggtaaagaggctaatatataacgtgagagtagatttgctattctctcattaccctatcaaccctaagtaatctctttagctctcgattatcatcattacaccatcatcatgtcctcctcaaacaaaaattggccaagcatgttcaaatccaaaccttgcaacaataatcatcatcatcaacatgaaatcgatactccatcttacatgcactactctaattgcaacctatcatcttccttttcctcaggtactcacaaaatttacattttcttctgttaaatttataaaaagtatattgttaattttacttgattatagaaacaagctatatgaacgatgttatgtatatatgttaagacatgcatgcatgatgatataaaccgctctatgaaacagatcggataccagatcctaaaccgagatggaatcctaaaccggagcagattaggatactcgaatcaatcttcaattccggtactattaacccacctagagaggagattcaaagaatccggatccggcttcaagaatatggtcaaatcggtgacgcaaacgtgttttactggtttcaaaaccggaaatctcgagcaaaacacaagcttcgtgttcatcacaaaagccctaaaatgtcaaagaaggacaagacggttattcctagtactgacgctgatcattgttttggttttgttaaccaagaaaccggattatatccggttcaaaacaatgagttggtggtaaccgaaccggccggttttctatttccggttcataatgatccgagcgctgctcaatcagcgtttggttttggcgattttgttgtaccggtggtaacggaagaagggatggcattctctaccgttaataacggcgttaatttggagactaacgaaaattttgataaaattccggcgatcaatttatacggcggagatggaaatggcggtggaaattgttttcctcctttgactgttccattaaccatcaatcaatctcaaggtaaattaatcatttcgaaatagtaatactgttcatatttttttcttttcgaaatagttttattacctcatttgctcaacatacatgaaaataaatattataattaatgcttaatttggtatatttcgtagatgtataattagtatactaaatttagtatatagcatatatatatcgaatctaatatcatatagttcttaccatatgcatgctggtgttatccaatgtcacatatacatagatatgtacgtacactcatttctcatatttcatatattagtgtgtatatatatatatatatatatgtatatgtatcttggtcataaaaaaaaaaaaggaatcttggtcatatatatatgaattataatacttagataggtcatagattatggtaaataaattattaaattattccatattttggaatgagtaacgcatgcatacgatattttgggaaaaagacgttttggtctttagatttgaccatttactgtgtatttttttgggtaaattagtattatttaattactttgactaacattaattaccaaaatgtgctctattgatcacaagaaaaacgagatgtaggattatccggtggtgaagacgtcggagataatgtttatccggtgagaatgacggtgtttattaacgagatgcctatcgaagtagtgtctggattattcaacgttaaggcagctttcggaaacgatgccgttttgatcaactcgtttggccagcctattcttacagatgaatttggtgttacttatcaacctctccaaaatggcgcaatctattatcttgtgagttttgtgtaatggtcttaaggtttttgtttttcttgtatgaattgctgaaagcttttgtgtttggttttgcagatttagaagatattgaaaagcaaatgttatggtgctatggataaatattaatataataataaaagatttctgcgatttatttagttattaattatataagaatttcatttcttatcttttaaatttatgaacaatttacaggacatttacattttcgagactttgaaaaataaagaatgaaattaagttacagctttatttaagtttgtttccaatgtaatatgttcatttgtgcatttctattttctttcttttctgaatatatagcttatctagtatgtcattaaaaaatgttaattcttttatatatgtattcataatatttttcattataaaaaaaaggaagatattcattcatgtgagaaaataaatgggccattgctcctagttttgggcttttgggctttttcttagtttcttaatgtgtttgggccattgctcctggttttgggccaatattgagatatcctgagcctaacttatttaggcccattaagaacccattctattttgtgcgtgtatgttacgctgtgttctctcgttcaatcattttcttctctcatttccaaaatctagaaaccctagagcaaaaagtgatctcatggcctccggcgaccgtaaatttggttatatgaccgggaaagatgctgaagtaaagcttccacggacgacgcgggtcaagaacaagaccccggcacctgtgcaaatcactgcagagcaaattctaagagaagctcgagagaggcaagaagctgagatccgtccacctaagcagaaaatcactgattctactgagctttccgattacagactccgacgtcggaaagagtttgaggaccagatccgtcgagcgagatggaacatccaagtttgggtcaaatatgcgaagtgggaagagtcgcaaatggactacgcacgtgctcgaagcgtgtgggaacgagctttagaaggagagtacaggaaccatacgctttgggtcaagtacgcagagtttgagatgaagaacaagtttgtcaacaatgcaaggaacgtttgggatcgttctgttacgcttctccctcgagttgatcagctttgggagaagtatatttacatggaagagaagcttgggaatgttactggagctagacagatcttcgagcggtggatgaactggtcaccagatcaaaaagcttggctctgttttattaagtttgaacttaggtataacgaaatcgaacgtgcgagatcgatatacgagagatttgttctttgtcatccgaaagtatctgcttttattcgatatgcaaagtttgagatgaagcgtggtggtcaagttaagctagctagggaggtttacgaacgagcagtggacaaacttgcaaacgatgaagaagctgagattctctttgtatcgtttgctgaattcgaagaacgatgcaaggaagtagagcgggctaggtttatctacaagtttgctcttgatcatattcgtaaaggaagagctgaggagttgtacaagaagtttgtggcgtttgagaaacagtatggagataaggaaggtattgaggatgctattgttgggaagaagaggtttgagtatgaagatgaagtgagtaaaaaccctttgaactatgactcatggttcgattatgttaggctggaagagagtgttgggaacaaagataggataagagaaatctatgagagggctattgctaatgttccacctgcccaagagaaacgattctggcaaagatacatttatctttggtgagtgttatttttttggtagcatacatggttctactgttttctcaaccacttacactgatgtgactaattattgttgttgtaggattaattatgctttgtatgaagagattgaaactaaagatgtggaacgtacacgagatgtttacaggtattcttgaactttttgagttgcattcatctacgtttcgctcgtggaggattagactgactgtttttgcatttgtcttacagagaatgtctcaagcttatcccacacaccaaattttcttttgccaaaatatggttgctcgctgcagaatatgaaatcaggcaattgaatctcaccggtgcacggcagatattaggtaatgcgattgggaaagctccaaaagttaaggtaagcctgaagactcgtaatctggaaatggtttacattattgctcaatgtgttttttacttactgcggtgattttttttttttgttatctgcaaaacagatattcaagaaatacattgagatggaactcaagttggtaaacatcgatagatgtagaaaattatacgagcggtttcttgaatggtctcctgagaattgctatgcttggagaaactatgctgagtttgagatttcgcttgctgaaacagaacgtgctagagctatctttgaacttgcaatatctcagcctgctctagacatgcctgagctgctttggaaggtaaaattttactgtctaatgcatccataaagatttctcgtactttgaaccgattggatcaacaaattctctatatattgtttgtggcagacgtacattgattttgagatatcagaaggggaattcgagaagacacgggctttatatgagcgactcttggaccgtacaaagcattgcaaggtgtggattagctttgcaaagttcgaagcttctgcttcagaacacaaagaagacggcatcaaaagcgccagaggtttgaagctacatgttatattaagagtttggatgatttcttgtgacacaagttatctgtttcttatattatttatttttgttctgcttttttttctttcttctactcagtgatcttcgacagagccaatacatactacaaagacaccacaccggagcttgaagaagagcgtgctacgcttttggaggattggcttaacatggagacaggctttggtgagctcggggatgttagtgtcgttcaatcaaagctcccgaagaagctcaagaagagaaagatgaccagtagagaagacggctctacagagtaggcattacatacatataatttctcgactattatcttttgaatgttaaagctcaatgtgaaaaaaaaaaattggcaggtatgaagaatactttgattatctgttccctgaagaatcagggacgacgaatctcaagattcttgaagctgcttataaatggaagaagcttaaaggtgaggaatgcgtctgatagtggttaacatcataatgtactaggtaggtgatgatgtctcttgcggtgttattaatattataaccaaatttatttatcaaactatactaggaacatatatctgatctatgtatgcttatttatgactcaatttaaacatattatctcttctctcctgaatattgataatattaacactgcatgttatgtataacacacatttattgaagaaaaaatgataactagtaaaaaatataaaagcagagagtataaacagactagtacttcattcaaacataagaaccataagacagtgttaatgaggatactataaaccgtgtagaaacaacaactatgacgacaacataagaccataaattaaggagattataagcatatatagctttttctctcaattattctatcaaagcaaagattaaaagcttaagcgttagcgattggcttgacataaaccccaatttggttgagagaaacttcagtcttcccataaaacccaacaatcttgtgatctttctcctcaagcttgaatgatgttccctcgtaagtgtattctggactgtgacttaacacttgatatgttgtacggtttgtattgaacttaagcatcgtcatataaccggtaaaaaatgaagacatggcagatgcggatgcattaggtgctgctaacctcttaccatagtgtccttcaacggatgtgatgtattccttgttaaaatagagcttgaactacaacaacagaaaaaagacaaaacgaagttatatatatatatatatatatatatatatatatatatatatatataatgttagcgtatgtatttaattctagattaaagcatataactctttttccttatcatctctatggatgtcttcatctccgtgagcgtctccgattacaggtccattgatgtactcaaacttgaccgatttcactaatttgtcattgtatcttactgttatcattcgagcatcgtcgtgaatcccatcatcccactcgttcccaaggacaccaccttttgcatttagtttcttgaccggaggaactaccaccaccgcaaaatttgctccgagtgcattgatacgatttacggacgaccttcctcggaaccccacaatcttatcgaacccttttgcctcaagttggaattttgtaccaaccggtttcccaaatttctcagaacttctattcattgatgttttgaaagttaaagacgagatgaatccatctttgtcgtcttgtcgacagttccctccacggatttaacatactcaccatcttgatcctttagcacaaactgcaaaaaaaaggactcttaattagagcgagagggaaaaaaacaaaaaaaagaacatgaattcaagaaactgatatacatacatatatatatatacctctttacgttctttcgaatcctttccgtgacaatgagttatccggtcgtttcccttaacatagtggaactcaacggagctcacacaatgagcatcttctccaacacacaatttactcagacgatcataagccccatcatcccaagagaccccgttggatcctccttgaggttccaaatgcttaaaagtagaagaaacaacgtaaaagtaagctcctatggcgtcgagaaagtcaccagaacgtccatggagaccaagaagcttcgttccattttttcactccaaaacaaaatctctgctaccagtaccgggcatacgaaactgctcagatgttctcccgtgtgatgttttgaattgaagctccgacaccgtgttccaatacattggagttcccatttttgcagcaagatttatgtcgtatttgtctgcagcagtgagctacggaacagaacaattattgtacttaaaaacaaatcaactaaacgaagatatgactaataaacagagccaacaaacacctcagttttttggtaaatatgatccacatgtttatagccaagaccatcgggatgaaaacagagcaagtaaaagatcagaattatttttgaaaaaaaaacagagcaactaaaaaatgagactaaagaaacaacgcaaacaaacacctgttcaaatgttctcccgccggtagatttgtatctgtgatgatcgtttctgcatgttccccaaatagacgtaatgtattcgtctgggcacttcacttcaaactcggtcttaataacatagcaaaacaaaagaaaaaaaagagcagttaaaagcaagagcaaaaacaaatcatggggggagagaattatgaataatattaaaaatgaaatttcaaacctctgtaatatgtgttcctcttgctcttccgtgttctttaacaacgacatcaccgtttttcacgtactggatcttgaggtaaacgatgccatgaaagtcttctccaactatcaatttacgcacaccgtcgtaagtaccctcgtaaacaccatcatcaaatttgtttccattggaaccaccgtaagctatggtcactttctttgacattcctagctctctgatgaaagtgatcagtgaaggaaaatgttttgggtatatgtgtatatatactgaaatgttttatgcaccgagatttcttgatttttaatcttatatttcaaagaaaaattagattatatttcacatactgtaattggtaaatcatcacaattcaaacagattccacaatatgttttgttttatatcttagttggtatatatcatagtcaattctaacacatccttacgactaattatgatagggtgaatttaagtaaatgacaaacgaaaaagtgttattggcagtaaatgtaatagaagaagagaagaagacatttatatatcatatatgcaaaacatgtgtataaatatatacttacgtatattttgatggtattaagaaatatacagaatgatggatttttgaatacatatatatatatatatatatatacataccttctgaagatggagaagaaatgttgcaattaaagctttgcatggatgatggaagatggatatcatcgtgttgccttgatgattatgatgattatgatccttattataattcttgttatagctagatgacattatgatgatgcaggagatagatagatcaatatattaccattttcatcaaatttctacgtccatcaataaatcaatatattaccatgcaattttcatctacgtacagtttattacgcgtctctctcactgcaattaatatcgatggtagaatcactaaggaaaaaataaaataaaaaaataatataaagcaaggcatataaaacacacagacctatgatttgcatacattgtataaatatgcacgcatcacgaatacacggtcataaaaatatatatgaaaaaaacttggagaagaaaaaattcaactaatttgaacttcttttactcgtaagtaggtaaaacgcattaatttatatatatatatatatatatacatatatgtttactatcagggcggatcgagaacctaatttagcttagggcacaataagttttacatcattatattattattttttttaaaacatttcttactttcttcactattttgaaacattttcactactatcacatttgtcattttgaacaattatgttttagcaaaataaactgaacaattgtttaaatttgtttagctcaacgatacctcatatctcataaccaacgtttacacttgttacacattgtacttctaattggctaataaggcatttttaatggttttttattttgtattataaatgtggagtattttagtgtctataacataattacttggaaaaaagagcatagggcacgtgcccaccttacttatgccgtggatccgccactgtttactatgttaaaattgttctttcacaaaagtctttgagatctgtattatctttctttttttgtttctttttgattaaaaccacaactttttccgattaggaaactcccatatttgtagtaaatagtagttctttatttttcatccattagagtaactaccaactcattttttttttgtcttttactaaaaacactatatgcattatgatatatattctgtattcataataaaaatacagatattcacgtcttatacattaatttgaagacaagcaaatgcttgatcatctgttgcctttaagttgaaatttcataaattaagtttattaattcataaattagtttattaattaccttacaaaaaacccatgacccatacaaaagaaatcatttcaacatatttccgcgttttatagattgtatttctttaagcctaacggtggaaaccacaaaatctctaaacgtcactgagcagttctcggtaaatttttttttttttttttttttggaaaacagttctaggtatttctttaagcataaatgttactttatttctgtctatttaaattatattgttttgtaaagttttaggttatgaggaagttgctaaaatcgaccctgaagaaaccaagttgcttataatgctcatagagttcatcaagtaagtgaagagcaaatttctatgcacatgtagtccataacatattaacatgtaatttaaatgtcataatcttcttataatataccttacaaggaccatatattatatatgtatatatatatatatagatcccacggacctacgttaaaaaaagtcatactgttattctgttaactacttttagaaatttcctttcttatagctgatgtcatggtaaatttgcattctccatgaaacattttacaatttatcaatatttttagttttgttctactgagattttttattctaagttattttatcgtatatatattattgatacatgaaataatgtatatgaacaaaaaaaaagtattgactgattggatacttgttaatgtctctcctctatttatagatcgattatatatagttcaagtaggtgcgttaagttttgtgtttactacgttgatgatattcttttaaaaaagtcttcaagatatttccctctatgtgttcacttgattaaaagcacaacttttttcgattgggaaactcttgcacacagttcttactcctaaatttgtatgtaattatttttcacatccattgtatcaaccaccgactcaaatttacataccactttattcaaaattgcactaggatgtgaatgtgactcatatacatatgtgtcttttaaattttataaacacatagatatccacgtttatacatttgaacatacacaattcgtaatcttttagttgaaatttcttttagaaaaagaattatttccatacaaaggaaatatttcaacatatttcactgtgttatagataatatttattttagcctaatgaacacaacacaatctccacacatcactgggcaatattccgtaatatagtttaatagtttatcagttatatatacaactaaaatatctattagtttgcttaaaagaaaataatatatatattaagaaacttaatcgaaaacgatatctgaattcctttttttttactatagtaatttgaatctaaattatgtataagttaagacaatatgtttattttcaacattatgcgtgaagatggtacttagacaaactggtgaagataaatgcatgttctagcctctaggtgggatatcaagtggactcctataaatagaaggttgtacagtttatatatgtgaaaatttaggatatggacaaattaaaataacgtgaaaactccacttaggatatatgttttgagttatcttggaacataattattgcaaacaattccaagaagagtttggcgaaccatttagaaaatatgtttcatactcgaaatttttatgtaaaaatgttctatatatagtttttttattttttttgcttaattgtacataattaatataatgcagcgcatctctaattaaaacgaacgtgtcgtttatcacgttcgagctaattcgtaatttggaatttggttttatgggcttaatgtttatttaggcttagaatgcttgtgtttgtatgcttcttcgagcaaaggttttcgttctctttgacttatttaagaagacgtgaattcattattgtgactgtttttgattattgattaaagatattcaaaaatatattgtgacaggttttgagaagaggactttcaatcttaagcaattttcgtgtgcaaagttaaaaagttatgagagaaggatccatcaatcacacgtatcattatgtattacacaatttaatccactagaccatattttttctttttcttttctctttttttttttcccacccgaatatgtgtattgttgtacctttagcaatctcattgcgtcgtgtatattttcctttttttctgttgaactcaactaactatatatgtatatcatctaatcaaagaatgtggacgagtaaaaagttgaatttcatcttcgtcaagtttctttcataaatatctttatgtgtgtatgcgtaatgcgtgtatatttatactatctttgtgtgttttatatgccttgctttatatttcatttaaatttctttaattatttttaccgtcaatattagttgtagtacgaaacgcgtaattaaaggtagatgaaaattgctatatattgatttgtaaaatggagatactttgttatctatctcttgccttagcctaagcacttctatctatctccttcttctttatcatcatccaaatgtcatctagctcaaacaagaattctaataaggatcatgatgatcatcataatgatcaaggccaacacaataccatccatactccgtctttcatgcacacctttgaaataagtaacatttcttctccatcttctccaggtatatatatgtattcacaaatccaacaacactatgaatatttttcttagttacatcaaatatgtgtacgtatatatttatatacatgtgtttgatttgactatgacttctaaatgtcttcttctcttctttgttacatttactaattaataacacattctttttttgctacgtaattacattctcttaaatagtaaacgatatctaacaattcacccttttatgaattagtcgtatcggatcctaaaccagaatggaaaccaaatcaacatcaagctcaaatactcgaagaacttttcatcggcggtacggttaacccgtctctaaccagtatcaaacaaatcacgatcaaacttcaaagttatggtgaagaagtcgacgacgcagacgtctacaagtggtttcacaaccgaaaatatagtcgcaaaccgaagttagtatcatattttatgttcttgtaaataattgtgggtattattaccggtatctattatttactttaatgttttggttttgcagatcctgatctagaaatgttgaagatatacagtgggttaaaaccaaaatatataaagaggagtttgttataaacgctttatatttctatttattaagaattatgatagagaaaattactgtgataagttgtcatacttctataaatgtattttctgaaaaatattaattataattattcaaaatatagcatccatacttaaactaatcatctaatttttttgagcttttatcaatatataggtttcatatttcccataaaaatataatttaagtcactattcatattatgtagaacaaatacaattgaattatacaaacatacaaatagtcatatgatctcttggactatttgtctatgtttgaccaaaaaaaactttatttcatatgtcaaaatcatgtagaaaccacgtggacgcttctcgttactttttctttttataaagttgttgaaaacgcaacttccacgaaattgagtgacaagaacacgaacagagcttacaataaaaattgaaaatgagtcatgagtgcgtaacaagtttgtagtcttgagcggttttctccatttctattttgttcacacggctaaattcatcttctgcctcacttcttaattttatgagatcttgaagaagaagaagaaatgatgttgatatcggatgtggcttcattagttggaggtgtctcgaggagctccaatttctgagattttcaaattggttaatcgaagaagccaagaaagtgaaaaggattgcaaacccttatctcaagatctggcgtccacaatggagagattggttccgattttcaaagaaattgactcagtgcaagaaagatccaacggtgaactaaatgttgtgatcaaaacgttagaaagctgagaagatggtacacaaatgttcaagagttccgaagagaccatcataatgaatgtaagagagtcttgcatgttgttctatttatatttagcataacactttgacataaacctagacgaataagaatatctatcgattaacgctctcatgcctactcttgtatccagagatacttaagcgtctaacaactcttgaggaggattcatgcagtgacacagacgaatctgccagctggttttgcttaatatgcaaatatcttggtggccaaggcttggaaagtttaaccagtcatctctctagtcaaaaacattcacttgaggcaccaacatctgtataaggcaaatgagatttatatttgtagaagaaacatcaaggatcacaagcatggatctttgctttctacaacaacaaatgaaaaatcattatgattgttgtttcctagaatttacatcgaaaatttgaaaaacttacgaccgtgatggattgtagacaaacaagacctaactagctgctacgtataggatttttattttgggattgccaatgttttcaagtcttaaaacaacatagtttatgtaaacttcaaaacgttttctttttttgccagtttctaaggacttctacagatcaatgttacgatcaggataaattcttagtagtgttaccagtgactagtgtaggtatgatttgaatttgttgcaggtaacactaagttaccgatttctaattcaggtaagaacacaaatgtcatcattatcagtactgaggaagcttccacgcataaatcttaaacgagtttatattttgaactacatccaatccttttaaaccgaacttaaaatcgagagataacagagtaaatagcagaggttttatcttttatcaatcgaaaaagaacaaagtaaaaacaacacatcttaatcgcatagtaggcaggtcttttgagtgtgatcacttctcatttgcgcccttcgactttcttagcgtctcttgctgcaacaaaccaaaacattacacgatcagaaacatgagtaagaagtttctattcgaaatcaaaacatcacaaaaggtaagcaaacgcttcagaggttattaccggctttttcctcttctcgcttcttggcagcttcttctctctgttggcgaatcagagccaaacgatctgtacacacacaaagaggacaagataatcgataagcaaatttggaaacgtagaaagaaacaactgagaacaaaagatatattcttgtttacccaagtccttccttgcttgttcggttttgccttgctcttgcaacctcatgtatcgctcatgagctcgctgcttctctagctcctctctacaagattaattttaagacgctaataatatttagaggattcctgaacaagaactgttgaagaatatagagcttaagagtgttttagtagtagtaacagacctttcacgccttgagagttcagtggttttactagcctaacaaaagggaagaacagaaagaaaatcccaagttataaatacagacaaacatatataacagatttacagaaactgactactgattagatgacttacatcgaggtcttttgctttcaaggtcttttgtcttactctgttagggttatcaacttcgataacagcttcagctcctttcttcttcacctgatattataaaccaagtaaagatgaattgtccaacaatgataatagatgaggccgcatacaatgcagaagttttcactcacatcagcttcatcttcggattcttcttcagattcctcctctgactcttcttcaacatcttcttcgtactcagcttctttctgataatgtcattaaaagaacaatgattcacccccacacacacacacatcaacaaaaatgtgaaagcaaaactacaaaaatacctgtttgaatgatcgaggacgtgcagcagatgtgccagcaactacaaaacacacacaggcaataagtttaaaacattcatccacataaatctcaattttacagcttcagagaacccaaaactggaccagattacacgaaactgaatgcttgtaatgcaaatcctatgatcatagaccataaaataatcctagacacgaaacacaaataactcattgaatactcaaaaacacaaataagcaaacgaagatataccaaaaacctaaacttattgaatactcaatggtcatataactcatatcaatcaactaaacaacaaatatctggacttgcacagcagaataataaaaaaatcgtaattttttaccaatcgttacttatatatcaactattttattccatttagattaaacaagctcacaattccaaaactgctacaaccaagaataaccaattagggcaatcacgaaaattccaaaaaaatcaagattgatttcaaatcgaactcaaaaatcagagcaacgaatcaaaattacttacgaatatcagcagcactagagaatcggcgttggccggtaggtttacccttgaacttgcctcttcccattgtttcaaacaaaaaaaaaaccaaactttttccgaaagagagagaacaaatcaaaaacgaaaaacgaaaccagagaatttgatacttgaacccagataacgaatcgattcgaaaacgaataaaaagatgagctttttgtgaaattagtggaggatcttgtcctctcttccggttacgagtgaaagagacgaaaaccctaaagccacctgtggatttggggattctttctttgagtgtggatttttatttttattcctctgtttcgcggtgtactataaaatcatctcaacttatagatcaaacggttactaactcgttttgctgtaaatggtcaaatacgacgacgtgtttcgataagcgtactctttatcgtaaaagaacaaaaaaacggcgtcgtcgcggtccaagtttataggccaaagctgttttgggtttccacaataacttggtaaaggtttagggtaagttaagttatattgatggtattgtatagagagattcaagaaaatcatttttaacaaatcaaggcaattgatgagtttcattttaaagttgtcaaacataaatgatattatattgatcatcacaaacaaagttgtaaccgaaaaagaagaggatgaaatcatcatggactcgtgacatcattgtagatctgagtcaaaacatttgtgaaacattcttcgacgttggtggcatcaagagctgatgtttcaatgaataaaagtttttctttctctgcgaaagactttgcttcctccattgatacttctcgacgatggtcaagatcagatttgttaccaacgagcatgatcatgagcttgtcggtatcaaagaatccacgaagttccttaagccactgctcaacattcttgaacgttgtgtgactcgtaatatcgtatacaattagagctcccatggctcgatggtagcgagcatgtcttacatgtctatagctatacgaatacatggaaacaaaaaaaagcatgtaaaaaaaacttaactggagtacctaatccggtttttggttttttgaattttagataatataaaccaaaggattacctttgatttggtttaaatgcagtttcagttttagtacaattgtggttaaatctatatataaactttgaatgtgatattatagaaatgaggtttttcggtttatcttttaatctaatttaatttcagtagatttcttatttttttaaaaaagaaaaaaaaattggtttgcttatttcatttggttttccctagcttttattcaatagagattggttaaactagaataaatctcttagaaagatagagaaagggtttatagatcgaaccgttctcgacaatcgatgtctcatagttgagccgcgataattttctcattgttgtgaatggttcgggtctcaaatttactaccgacagttgattttaactcattgaacttattttttgtgaatcgagtcataatgtttgatttacccacaccagaatctcctaacatcattactttgaatagataattgtagttgttgccggggatgttcactgccatgattcacaaacctcgaatccgaaaagacagaaaaataaaatttaactatttgattaaaagactaaaaaaatatttgttagtatttaggtgtgatttagaatgatatatatatatatatatatagcacaataaataaaatttaacaatcctttcatatccatgcaagtacatagaaaaatattaaattgaggatctatataaatttctaacaattttgtctgttagatgattttctaggaacattacaagtatttctttcacttaacattatctttggacatgtgtaggttagatgttaatgttttaaatttattactatacaataacgcttcttttcatgactttaatgatattatagaaagtaaataaatgaaagattctaaactattgataaaagtttgttataattttgttggttaatttttcacaatcttgtataggtttccaaaaaatctttctattttgatgacatttttcatgactttattttgtgattttttttttagaaagtcataaactaataacacaataatttaattcattaacaatcatagattttttgttttaattgaataacacaaaaaaaaaataacttgataaagtatgaatccaataactctatatttattgaagattttaaattatttttacaaatcttaaactaataacatcaaattttaacaaaccttttaaaaatcttgaacattataagtcatcacggaacttccaatttaacattatctcttttttagatatgtgtatgtttttcatttaattttatcccatacattgaatatatatttggaatcattgttttcttcacaatcgttcggatggttttactccaaaacgcgtgattatctatcaacaaaattaggatattttcttgagtcttggttttctttagatatagagatttgtatagttgtgaggtttcaattccttggatcaggttgcaatttttgagattctttaaagttaaaccaccatcaattctctaacacattattaaaattttaaaaacactactatacaattttcacatacttaagtctttaattttaaaataaatgaaattattcaattgtcacatagcgagaaaaccctagaacaatcaatactttcacatactctttttttttcctcaacttttttttttgtcgggtttttcctcaactttgacatactcaaaataaacaagggaatgttccactataagacactttcaacgtaagtttagacaatatagacactttctaagttagaggcacttttctttctttttgaaggaaaacttgacttttataccccttaactaaaaaatcgaaaacaataactaaatatatatcttaaccaaacaattaaaaaaacaaaagaatttagatacgtagttattaatatagaccattagattgaaaagtaaaaattaagatctatggctgagattaaagacaataaatggattaattttttgatgttataaatctgattagaaaaaggtatctctcttcgtctctagaactaaatctctctctttaaaaaaacaatcgtttctccctttctccttcctgaagatcgatttttcataaatccatagtagtttaaaaaagaagcagagagatgttgaaaatcgtttctcatggaatcaatcgattattctctatgaagttctttaatccacacaactttcctcaggaacatgataatagtagtaaatggaggtttttcctatggttactctagacgaaggaggatctccttgtgttggacaggtttgtgatttctttccagggataaaaaaaatttgattgtttgtttatgatgaacgattttttggctacggaagagtgtcatggagttctggtgaattttttggctatgtttggtgatttcatttttaatcaagttgggaatcaataggaaacaactaagcatacaacatagattagaagagatatcaagatggatctgatttaagtaagatttggcgactaattctagatgattagggttatttgtgatttattacaaggaatttgtgttctcattgatttggcgagtaattctgtatgactagggttatttgtgttttcttaaaaagaatttgtgttcttgttgaaatcttgttcattggaattatttgtgtttggtaaatcttcattggtggctaaggatgtgtttgtagctcttacggcgtttgttattggtgatgtccattatgaatggcaaattatggatggcacattatggatgatgaatcatggatggcatattatggatgacgcatcatggattgtacattatggattgatatggtgagatttgtaaatcttttggtcttacatgttaagagtaaaagatgaagaattggagaagcatgtctaacatcctaaaaacaagctatatccggttgatttgctacgattttgtttttgtgaaacggtggctgtaaagcggtgaaaaactttgctgttctcctctagtataaacattgacctttatgatggttctacgacttagatcgagttggtctccaatgttaatgttcatcgtactattaaaggccacaaaatgttgatcatcgtgagattataccgtgtatcactttcttctataattccagaaattcttatacaaacacatatttaatgtccacgcgctaatgaccatatggtaatattctcgtggcatcaatatattgtcttaaaggtagagatctctgcaaattgaaagaaaaatcaacaaataatttatccagtatagattgtccatttaaacttgtccaaacggttcacttttatatttgcccttaaagtaatgaaaagaaattgtaccaatttgcccttaaagtaatgcagacgcaaataacttataaatgaagctctccttttttagtcatggccgttcactccagatgagatcgtgtctgagaaactatcattttttatcttctctgtcttccatgttttttttttttcatcattttcatttcctttttcaaaatcatcaatcatggtggttctctataattcttacaaatcatagaaattctgagattatctcaaaattctctatcataacttaaaaacgaaggatatattaagaatcaacaacagaacattgctgctacaattgatcttcttacacgctttatatacttaaacttgagtacttggacactcatcaatggacaactatgcttcagatgtgagttactagatgaccacttggactagagtgcttggacacttatcaatggacaactatgcctcaaatgtgagttattagatgaccatttggacttgaatgcttggacactcatcaatggacaactatgcctcagatgaagttacatcgacaatggcctttttgctgctactcgcgttctcaacatcacgaaccgtttcaagcccagattgcttagaaggtaactgatcatggttaacatcctcacttttcattgtaatcgatgacagagattccttaatcaaggagagaaataaatggaaccaaatcaaataattgttgagagacagggaagatgatgataaatcatatgaaattgggcttttagttttgatttggaatattgagattcccgtaaaaaattggttttgattttggaaagagagagaaataaagacgatggagaaaagagttgagagagaaaatgaggagaaagcgttgtggttcagagggcaatttgggaattttgatttggtaaagtgccttctcctttcaaagtgcctaaacgggtaaatagttttctaaaagtgtcttataatgtaataatctcaataaacaattcaaagctgtataccattcaagcccattattcaaaattttgtttgactaatactattcaatcgggtctatgggcctcagaaaataataaatgggccttaaatacttggaaacaatggatagatcgatctcaactttaaaatgcgtccaaaaatataaacaaacaaacatctctcgccgtcaggttacatctatcgccaccgcaaagagaccaccgtctcctccgcaatcttcataacctaaacaacactcatcccctggtaagctcaattctctaatcaattcaatctcctgtgatgtcgatctgtttctactcaagttcaatctcacgaatcccttctttgttctgtaaattagggtttcacgatttgtgtgtctagggattcaagatccctaatatctgatcatctagtaattgtgaaagtattgatttttgttcttttgatttgagtttagcaattattgagatttctttgaagttgaataccttttctcaatcattataaaagtattgatttttatgtgtgttttgtggcaaaggtacttaaacaatgggaaagaggaaatcaagagcaaagcctgctcctacgaagcgaatggataagcttgacacaatctttagttgtcctttctgcaatcacgggtctagtgtcgaatgcatcatgtaagatgaatcacaatatgtgaatgaaaacaattgaaatcattcactgaatcctttgttgtttgttttctcagtgatatgaagcatctgattggtaaagcagcttgtagaatctgtgaagaaagctttagtactactatcacaggtttcttcgatctttcaagtcgatatagaatcgggttttgtggtttacgtatctgatcattctttttttttgttctggttcttgtagctttgactgaagctatagacatgtaagttacacatctattttcaacattatgttttggcttttgtatttctctaaaatctctctggtgtcttcaaaatgaatgcagttatagcgaatggatcgatgagtgcgagagggttaataccgcggaagatgatgttgtgcaagaagaggaagaagaagtagaagaggaagaagaagaggaagaagaggaggatgatgaagatgaccatgtctctgtcaaaaggaagtataacttctgagacgagtgttttatcgaaaatcatgtaagtcgtcgtcttagagttatctgctttatgttgtaatatctatctgatgaaatcacaagaacaatctttagtgttttctcagtgtctgatagagaaacatacatttaagtgaacaatctttaatcacaataacagtgtatgattatgatttgtaagtggatttaaggctttgcttaattggttccaatccatacattttattacaaccaaataaaaacctaatgtctttccttactcattgtagttatctaccatatttggttctttctgttctacgtttgctgattgcgtaacatcagctctgtactcataaaatctaattacaaccaagaagaggatgaagttaagcaaattaagtaccgcgaagaacatgtaatagttatccagcctagactcattcaagttgttttgaatccatcctcttccctgcttctttgttatctgagacactgacgaaagcaaaatgctgctcatgaaatacccgactgccatacttgtgctcgtatatgatgtcccgaggcttttcatactctctggtgcttgatcgtagaaaaactccagctttgctatttctatgaaagcatctgccaaacccattagtacatactgtggaagcaatgtgaaaatgctcaaaggaattggtacagcggtctggtgggttagcccgtgttcagcagcgaccttgagcctataccgttcggttatggacgcgatgatcatgattaggatgtgaaggatcataccgattcccattcgctgaagcaatgtgatacctcttggatttccggttagttttctcatgaacttaacaaagacacggtcgtatatgactatagagacgagcattgagaatgttgtgaagcctaggagacttgcgggtgggatgctgaagttgtttgtgagacgacggtcgagggtcgttccttgtttgatgaacagagtcattatttgagcaagcatcatgcttgggacgaatgttacgaagaggacaggtaacatttttagcatctgttttgtttcttccacttctgtgatagtacagagcctccatttatgggttgatccggttttgagtgaagctcgatttaagaatctgtaacacagttaaatcttaggtacatatggtattttaacaaaatgcagcaagtatctaaaatatttaaactgaaccgaaccaaatcgaacgttcacttaccttagacttgaagtagaatggattgggaaagcccttttgctagcatattccataggtggaagctcatagaagcgcgtcgaatcactcgacatcggctcgcgggctttgcgaagtgaagccacgatgactctagccatcttggtgaatgggcttcccattgggagtttatgtcggtataaccgagttcccaacaagaatatgaaaatggagaaagcaagtcccaaagttgaaagcccataacctatggcccaaccaacattatcttgaacatagacaagaacagttgtagcaaagaaagtaccaaagaagatactaaacatccaccaattgaagaatgaatgtttatgaatcttgtcctttgggtcaaattcatcgaattgatcagcacctattgtagaaatgttcggttttgtaccgcctgtaccgattgctaatgtgtataacgctccaaagaataccgctaactgtataaccgaagctttttcacagttttcaacattagccgtcgaacatttcggtggtttaagtcccggtagcgatactgatagtgtcagtaatgccattccctgtaatgtcattagaaaaatgttatgtcgtatctttaacacaaaactcactctaaattcttttgtgtaactatttatgtggttattagaaattgtcataatgtcaggtaaataaatatctttaacacaaaactcactctaaattcttttgtgtaactatttatgtggttattagaaattgtcaatgtacataccaataaatagatagcggaagagatgacgaaagtgatgtagcgaccgaaatgagcatcagcaacataagcacccaagattggagtgagccaactagtcccaacccagttggtcacattgttcgacgacttgaccgtgccttggtgcaatttggtagtcatgtagataactaggttgcttgatattccataatacgccattctttcaaacacctcgtacactaatcacatcaacactcaaaatatcaatcaactcttaatcatatacacaaaaatatctgaaacaagagaattttgtttgactaaaaatgatatttaccaacgacgaaggaacaagctttccaacggcctgtttgggatcttcggacgcgatttcctcgaagatcaactgttccatcttttgtataatcatctcctacctcttctactgtcattttctgtcttgttcaatatagtttttatacggatcttttgtttgaagagagttggtactttggtcacacaatatatagaataatatacatctatatatatgctagttaaatgagctgtcttgccatttcatcaccatttaaaaagtaagagttgaaattgtttatattttaattaattactataattgatttatagtagtttatatgtagacaaaactggtcaaatatacaatttattatcattatagttatcatcacagctgtaataccaagataagctcgcttcatagaaatgacacctcttcaacaatttttgtaatatttcatatgaatggaatgtattattaacttatttgaaagccgaaaccgaaaaccgaaaaaattcacgttaaagtataattcatgcatatatatcaaactaaaacaaatcgtatatcaggcacaaattgaaagcttgaaacactctttcatcaattgtttttgtttaattatttacaagtgttaatgtattaattactattctttccttgagttcaaaatgtggttaaagatacaatttcttatctaaaattcgttttatataagatagatgaaataaaaacatgaaaaatagataatatcaaaatttatccttaaaaaataaaatatagatcataagcatatccttccggccttaagaaagaaaagaattgtacctaaataaaagtaaattttagtattaaaaaatctatcccaaaatgagttttctacatatttaatgccacatcatgaaatgaaaatatttctttctacaataacatgtaataccaaaatgagaattatttacagatggtggcaagtggcaatgtaacagtttcttactaaattagttattttgaattaagaatatacttcttaaattcttaatttgtttctcttttttggtaaaattttcaaataaaatggaaaggaatttcttaatcttttttaatattgggcgacatgtgtgcctaccaacaaaacattggacgacatgtgttgtttgacttgttgttggtaatctatttaaaaattatccgttctaatgaaatcgaatcaattagaaagaaaaaaaggataagcttaaacgactcctttttttacctttttgtttgtgtaaaaaagccaacccatttgcttaattcaaacagacttggatccgggtttgacttggatcggtttgtggtggatcaacgtgttgcaaggatttggggcaagcgtggaagaaaggttatctctagtatgggtccaattggatcggtttatggtggatcaacgtgttgcaaaacaagtttggttgctgccatgtcgaattatctgcaagctcatctatattaattatctagacattactgtgagttaattaccaacaattctcagcttcggatgttctgctaacaattccatcctagttgtggaagatataaattacttaacaaagtccatgaataaaagttactgatatagagaaatctatattattcattatttgttattcagtctctttcatttccacctctttcacatcaaccgaatcagtaacctcagctctataaacataaaacttaaccacgaccaagaacaaaacgaagttaaccagattaagtaccgcaaagaacaggtaatagtaatccaacctagactcattaaggttgttcaaaatccatcctcttcctcgtttctttgttatctcagataccgtagataacaagaaactgctcatgaaattcccaatcgccaaactcgttgtcgaatatgatgtcccgaggcttttcatgctctcgggagcttgatcgtagaaaaactcaagctttgcaacttctaagaacgaatcagccatacccattaggacgaattgtggaagcaaagcaaagatggttaatggtagttttactccggtttggtggatgagaccatgatcagcagcgactttgagtctatacctgttacataaataccaaataaagaagtttaagtaaactaatgcaacacaagaaaattatttgatatttctttttcgttaagaataatacctttcagtgacagatgcgacgatcatgatgaggatatgaaagataagaccaattcccattcgttgaagcaaagtaatgcctcttggattaccagtgaattttcgggttatcttgacgaaaactcggtcatacaagactatggaaataagcattgagagtgtgacaaatccggagagactcgctggtgggatgctgaaagatccggtaacctttcggtctagagtggttccttgtttcacaaacaatgtgttgatttgtgcaagcatcatacttgggacgaaagttatgaacaagactggtaacattctcagcatttgttttgtttcttcaacttctgtggtagtacaaagattccatttatgatttgttcctgttttgagtgaagctctgtctaagaatctgcatcatagttgcatgttaggtactttctgatatacttaggatataatatgaatttagattgagattatactaaataaatatacacattaccgtaaacttggagtagggtggatcggaaaggcgcctttccgctcatattcaagagaaggcagctcatggaagctcgtgatgtcatgcgtcattggtgcattggctttgcgaaatgaagccacgatgactcgagccatcttggtgaatgggcttccagtgggaagtttatggcggtaaaacggagtgcccaacaagaaaatggtaatggaaatagccaaacctaatgttggaagtccataacccaaggtccagccaacattatcttgaacatagacaagaacagtgttggcgaagagagtaccaaagaagatactaaacatccaccagttgaagaatgatagtttttgagtcttctcctttgggtcgaatacatcgaattgatcagctcctattgttgatatgttcggtttcgtaccgcctgtaccgattgctaatgtgtataacgctccaaagaaaactgctaattgtaaaaccgaagctttttcgcaattttccacattagtcgtggaacattctggtggcttaattcccggtatagttactgataatgttaacaccatcatcccctgtggatattgataaaatgatgtttatatgtgataacgtacgttctcattcttgttattgaagtatttgttaatgcaagttgtgacttgtgagtataagtgtatgtgcaagtgtaagttaatgcaaatagtaaataaatatgcatatggctacaacttgtgacttgtgagttatgaatataagtgtaagtttatgcaagtagtaaataaatatgcatatggctacaacttgcaaacgtttttgtactatcaaaaatagtttagtatcatttgtaactgttatttatacatgcattaaatagaagtgtaaaagaaaacaatcgaatcttaaaccgacatttacatgtacgtacgtaatggataagtctttagctaattagtttattttatgtttgttccgatccacaatttttctcgtgtgtacaaaaactttctaggattttcgatcgagacaaaaagacttaatgctgtaataatgttctttcaaagtcaactgttggtcaaagtacacatatagttccaaaacaaatacacatttttctcgaagaaaagtattgcacgcttcaatcaaaaggccaaaaagactaatgcgtagtctctagtgtataagaacttggagtgatatatttttgactttaagtgtgggaatttagatcggtcgttatcttatctcttaccagttctcgttgactcgcatttaacttttttcttcagataatatatcacttatctaaaaacttattcgaaatctatcactacaaccgatcgcttctagcttaacgtaaaacattgaaacttttttttaggaaaacataatttttacatttgattttaggcattaaaaacagtgaaactttttataggaaaatcggcaataataatataacagcaacttcagttttgaattttaaccgtagaaacgctaaatactatgtcatgcatgaggcttattggttattttgatgcttacacaataattatatttacatatgaaccttcatgtcgttggttctaatttctaaattatgacatacaaacaatgtcaagagagtgttactacttagttaaaaatatgctcatactatagacccaaaaaacgcaattatgaatcaccacgtttttcggctcccatgcttagattcacgtttttgggtatacttacctaatattagttatatatgtcgtcacgactttgatatgttaaaatcatacataacatatatatatatatatatatagttttaaatctttagttcatactccaactaactagaaactttaccatataaataccatatttagtagtgcagtcgataacgtgatatcatcagaaaatgacatcagtgtccttggatcggccgattcgaatagcaatagatagataaattaattgttttgtatggtggacgtttttgtgtgctttatactttataaaatcagaaataaacaacgtaccgagaaatagatagcacaagagatgacgaaagtgatgtagcgaccgagaagagcgtctccaacgtaagcacccaagattggagtgagccaactagtcccaacccaattggtcacattgttcgacgacttgaccgttccttggtgcaatttggttgtcatgtaaataaacaggttgcttgatatcccgtaataagccatccgttcaaacacctcgtacacttatcagaaaaaataaatcattaattgatgcaagaaaaatgaacaaaatagtgccaatataactaaaagaaaaaataatctaatgtcgaaatatgtagaatattttcctaggaattcctatactatttttttgtttatatttattttttattttattttgtactacttaatgtcgaaagaaaattaaaactaaaaatttatatacgaaacaatggattatgaattattaatttacccgttaaagattaattttgagttaatattgtttttcccaacatagttgatattggtttttttttttgccgatagttaatattggttttaaacactagtgatcagcctagtgttaaatctgttcagactttaaacttttatgtggaaaataaaatatttatgccaattttataaattttcttttcctaattaggataagatacgtcatcaacttttagttctgtcgtaaccattgaaaagtttccaagactcatggcaacttttaagatataagatagatcttaaaaacttcgaaaaaagactgttaataatcattttaattgtaattaaactctatgataaagaatataaaatataaaggaaactaaattagtgaaagaataaataccaacaacgaaagagcaagctttccaacgacctctaatggatcttcgaacaggattgccttgaagatcaactgttccatcttttgtgtaatcgtctcctacctcttctactgtcatttcctctctaccttctttctttctttcttttctctctctaatttgtttggtagtttctgttttttttttaatgtcaagagagtcggcacttttgtctcatatatatacatattaagtagatgatgggtcacatgaataatgcgaatctttcaacgtaacacttataattactgtctgaaagtgaaagttattaaattagtaattaatcgtccaggagtttacaaaattatactaacctttatgtacataataataacataactaaaatatgcagaaatgttattacgaagtaagtttatttttgacttattagagactataaaatgattgttgtgctagcttatcgtcatcatttgtctttcatacacctcgctcgctatatgtattcaaagatcaacccttttatctatgtgttttcacatggaaaattatttgcagatgaacatatgtcttactttccaaacggatcctcctacatctatatataaacactggtttagaaaaatacacaagaaaaacacatcaaattgttgattcagagtcacaaaatgcaggacttactattaacattttggacattaagaaataattttaactggtaattatttccaaaactcatttataattcagatgaaaacgaaagacaaatagataaaagattcactatagaattatggactaaaaatatgagtcttctaattgatattttgagtggcaataatattcaactttattcaggttttggacattggtatgagttttggcatgatatttttaattatcagtacgacgacaaaaaaaaaaaaaaaaaaattatcagtacatctacttttaaattttgtagtagatggacaataataactcataattctttaaagaaagaaataagtgtcattacataatttgcataattatgtttccattatttttggttggggaagtaaaaatctcacgagtgatgctaaactccttattaaaatgtccacttgtaaattgattaggtttcaatttttaattatatttattattaaaatattttcgaaacttaattagccatgttgacatttttatactatgtttcgtcgtaacgtgcgtacaaattattccaaaaacattgcttgagaagcaattatatatatacatgacaaatgagtttgaatatttttaatagtactgcatcttcttacaaatttgcctgcctgtagtttgttttattttatgtatttttttgtgtatttaattactttgtgtcattgtcattgttggatatataaggcaaagagatattttcacactatcatatttgacgtgaacaaagagatacattacgaatctttgacttcgatgaaatctagctactataataaatttcttcctttatgtccgataatctccaataaaaatagttttgattctgctcctattaaatctttatgaaattgtaaatgttttatggattttgattattggaccaaaaatcttttgtctatgcaagaagtgttactcacttactcataaatcgagatgcaaccaaatttatcttgtcattcgtgttgatcacgacaaaatcattttcctaccttttaaatcgcatattttggtctctctcacaaaaataaacactaaatttgatttctccaaaaataatttctgtgtagtctccattgtagtctcatatgggtttattatgaaaaagtcagcgactcggcgctaattttaatttataattcattattagatattagggatttttaaatggaaatcatataaatttatatgatcaagaaaaaggatgtgtttcaaattttgatatagtttaagatatttatttgtaaaatttgtatttgaataaaaaggataaactttttggtagaccggttcgaaataaaaatttgtgtagaattaagggattaatgattcttctttaatgttttaaataggccaagcccgtttctattagcctcgttgtcttggcccatatccaaatctctccacacttcactcttttggtcacaaactcataattggcaacttttataacgttttttttttttttttttttttttgcttctacaatgtttctttgtggcatacgcaacgttactactgaagaacatcctatttcatgcagtttattttaataaagtgttagcgtgtatatataattctcattactattttctattcaaaacagttacatccaaaggcatatctaattatatattaatataagtgaaattaatatataaaagtcgactcagattaaatgaagcaaagtggattattctatacgtctaagattcctctaaatctttatatccatctcagttccttactctttattttatacgcaaaaaaataaaaacgtatccatatatataacatttatgtgtgtgtaagaatatatattataaatcaagacagacattttagcacagaagtagagaaacaaaggaagaagatggagatatttgtgaagaaagagtacttagatttggttcttgtcccatttggattaatcatagttttatcttaccatctatttcttctctatagaatcctttactttccttaccataccattatcggtttcatgaacatcgataaatccatttgggtcgaccgtatcatgcaggcaagttatcatctctctttacgacaatcttttcaaaattatcgatatcgatttctatttaatgttttgtccaacttattacaagataaaaaaaatgatgatttggtaatgccaacatttttctaattattacttttgctatatggatttagatataacggttagctcgaatgattacaggcaagaaaagacgaattgggtggtgctttaactgttctttcgagcagcatatcagcttcaacatttatggcatccattgctttaacattgagttcacttatcggcgcgtggatcggaagctcgccggttagtatgactgtttttaccggacattttatctatggagacacgagttcaatcacaatggtcatcaaatacacatcgctcctcatatgtttcctagttgcattctgctgttttattcaatccacgagatgttttctacatgcgaactatcttatcaccactccgggcgaagatattcccccggacatggtgaagagatttgtcttgagaggcgggaactattggtcgctaggtcttagggctctttatttggctcttgatctattgttgtggcttttcggaccggttccgatgtttattaactcggttttgatggtcatttgtttgtattttctcgactcaaactcggtggctcagcctctttatcaccggacttttgaggcggagcaaattgtcaagaagatgagaggagttttgcctgaacagttgacttttagatgtaattgaaaagaaaattatttgattcttaatcactttgccaacttgggattttccaacgaattatatttgattataataatctttggaaaattcgtaagaagttttagtttatcaattattgcatgagatttgtgaaagccgtacggagcatgttccgggagcgtctcgtcttatgttttataatcatccacacgataaagcattaacggatagagaaaaaaagatgagctgtttaattcatttcttggaagcaactacttagacatattctctaactttgaaaataatgattataaattgggttcactaatatagtattgtaaatctgtaatttaatttccacttgtgctacgaaaacagcatggtcacatcacattttttctcagcaagtatataaatgcatgtctgaatattgatcatgcattttcacgtaagttgacataatttgtttttagataatatgcaatgcaaatatttaaaagagaaggtgaattcaatggtatttttttttgtgtgtctattttcaaaaatagcacaaatacagatttttaaatcatagagcatttaatgtaaaatatttgcaaagttatataaggtttttataagattgtatatataaggttttataaagttcataaattttgataaaacagattataaaatggtattgctacttgctagcacactttgttagcatgacctttaactcaatgcaaactcatgctaccaatcaaagcctttcattagagaaaactggataacaaaataaataaatagaaaccacacatttaggcccataaaggcccataataccttttcttgggcctattattaaaaacttaacccctttaatcgctgttttctctctctcgcgacggatcttcttaggtctctctcttctcctccttttccccactttttcaaaatcagcaaattttggattttcagaatttgagtgaacttaaagtagaagacgaattgtctgaattcgaattttaagaaaaatttgcagagatgaggagttttttcggtagaggagggaaggattcaccggctgattctgcttctccgtcaccgagatcatacccttcgacgtctccggcgtcttcgtctgctgtgacgggaccaccgagacctattcgtttagtgtattgtgatgagaaagggaagtttcgtatggaccctgaagctgttgctactttgcaactcgttaaggagccaattggtgttgtttcggtttgtggtagggctcgtcaaggaaagagctttattttgaatcaggttagggtttcgcttcttcttcaagagttcgttgttgggtcttcgttggaaaaatggggtttgttttgaattgggtgctttgtacttcgttttgaggtctagggttttggcaaattagggttcttttttgtattacctcgagttgatttgttaggttttggaagctttttggattcaataatggggaattatgtttgtttgatttggttctgtgtacattgttttgaggtctagggtttatgtttctgtgtgtttcttaaattgttttgtggtgttgtgcgtttgtagcttcttggacgcagtaatgggtttcaagtagcatcaacacacaagccgtgtaccaaggggctttggttgtggagttctcctataaaaagaacagctcttgacggaactgaatacaatcttttgttattagatagtgaaggaattgatgcttacgaccaaactgtaagtcacatttagcgaatttgctactcatgaatttgatctatatccaagaattcgtgtttaataacatgttttgattccctttacttcgatttccacagggtacctacagcactcaaatattctcattagctgttcttttgtcaagcatgttcgtgtataatcaggtttgaaaaattttcagtttgaaacttaatttaagctttttgtgatattattttcacacttgtgttgactgatgtttttttgttggtatgtgtcagatgggaggcattgacgaagcttcactggatcgcctttctcttgtcactcaaatgacaaagcatatccgcgtaaaagcttctggagggacgagctcacgttctgaacttgggcaattttctcccatctttgtctggctgttgagggtaatcctcgttatatttgtttgtagaaattattgcttagagataagtattaacattgatataatttactgtaggacttttatttggatctagtggaagataatcggaagattagcccacgtgactatttagaaattgccttaaggccagttcaaggttcgggaggggatattggtgctaaaaacgaggtactatgttatttctttttcgagtaattttattttaatagtcaggcattcttgagaaacccgggtttggtgatcaagtgtaattcctttggtagaataattgtatgtcagtgacacagtgtaactgaaagcaatttctttttgcagatccgagattcaatccgtgctctttttccggacagagagtgctttacccttgtaaggcctctgaacaatgagaaggacctgcagagactggatcaaatttcggttagtattgttctatcatgccctttacctataatacttagttgtttaatgtttagttggataatatcctgtgtgcttatgcagttggaaaaattgagacctgaattcggtgctggcctggatgcatttaccaagtttgtttttgagaagacgaggcccaagcaattagggggtactgtgatgactggccctattcttgtcggtattacacagtcttatctggatgctttgaataatggtgccgtgccaacaataacctcatcttggcaggtttgatatctcttgcctctatggatgttcaattctttacattgtctgatacattacatcttaatgggtaaacatatggttgattattgcattcatacatctatgtacttcaaaccattgtgtctctcagttttaatgtttttaccaatgccttccctagcctattttcccctagattaataacgttatttttcttgactacgttcttgtagagtgtcgaagaaactgagtgtcgaagagcatatgattctggtgtagaagcctatatggctgcctttgaccaatcaaaagctccggaagaagtaagcatcttagctttagcctactgttttttttttctttttctttttttgtaatatatgattcatgtcaattctgctatgtgtagggtgcactgagggaagaacatgaagaagcagttcgaaaagccttggctatatttaactctaatgctgtagggaatggttcagcaagaaaaaaattcgaggatcttctccacaaggacttaaagaaaaagtttgaggtaatagattctaaaacagtgttgttcagtaggaagcagttgtttttgaatcctgactgtttatttacgcatctttcacatgagatttctcctctcattgtcttatgctaatatagacaatactttggtgattcaggattacaagaagaacgcttttatggaggcagatttgcgatgtacgagtactatccagcgtatggaaaagcagcttagagcagcttgccatgcctctaatgccaatatggataatgttgtcaaggtttgttatttatggatatatttttggcatagaaggattaggtttaaagtttctgtgtttttttttggcttgtttgtaatgatcgattgtatctcaggtcctagaagctcgtttggcagaatatgaggcatcatgccatggcccggggaaatggcagaaactttctgtatttttgcaacaaaggtattttactacttccactccccactgttcttcatttatctttaggtattttttgaggtttgatcatgtaatttgtgctttgtggtctactttttactcatgcagcttggaaggacctatatatgatctcaccaaaaggcttatagatagcatcgctatagagaagaattcccttgcaatgaaatttcgttctgttgaagatgcgatgaaacatttaaaacagcagttggatgatagtgagagatacaagttggaataccagaaacgttatgatgaatccaacaatgacaagaagaagctggaagatatatacagagagcgcataactaaactacagggggagaatagttcgctgaacgagcgatgctctacgttggttaaaaccgtggaatctaaaaaagaagaaatcaaagaatggattagaaattatgaccagattgttttgaagcagaaagctgttcaagaacagcttagttctgaaatggaagtccttaggacaagaagtactacttctgaagctagggttgctgcagctagagaacaagccaaatctgctgcagaagagaccaaggaatggaaaaggaagtatgattatgctgtgggagaggctagatctgctcttcaaaaggctgcttcagtgcaagaacgttctggcaaggaaacacagttgagggaagatgctcttagggaggaatttagtatcactttagctaataaggtatcattctttgtcccatttttttaagggatgaatttgagcttgtaatcatcagtatatattatcaatagttaatcaattgcaggatgaagaaattacggagaaggctacaaaacttgagaaggcagagcaatctctaacggttctaagatcagatttgaaggtgagcgttatcaaaatgatagtatatttatgttagcctcgtctatcttcctatgttgtaaacgtttgtgcgaagtagattacttgttactcctagcattctgttaaatatgctgaaacagttgaacctttgtggaatgtggatcttagcttgtgttgtgtcttttgcaggtggctgagtcaaaacttgaaagctttgaggtagagttagcatcactaagattaacattaagtgaaatgactgataagttggacagtgccaacaaaaaggctctagcatatgaaaaggaggctaataagttggagcaagagaaaatccgtatggaacaaaagtatcgatctgagtttcaacgcttcgatgaagtcaaagagagatgtaaggcagctgaaatagaagctaaacgcgctactgaactggcagacaaagctcgaactgatgctgtcacgtcgcaaaaggagaaaagtgagagtcagaggttggcgatggaaagacttgctcagatcgaacgagctgagaggcaagtcgaaaacttagagagacagaagactgacttggaggatgaactggacagacttcgtgtgtctgagatggaggctgtctccaaagttacaatcttagaagcaagagttgaagaacgagagaaagaaatcgggtcattgataaaggaaaccaacgcacagagggctcataacgtgaagtcacttgaaaagctgttggatgaagagcgtaaggctcatatagctgcaaatcgaagagccgaagctctttctcttgagctgcaagctgcacaggcacacgttgataatcttcagcaagaattagctcaagcaaggttaaaagaaaccgcacttgacaacaaaatcagagctgcgagttcctcacatgggaagcggagtagatttgaagatgttgttgatatggacattggagaaggaagtgatagaatcttgaggactaataaacgagctcgaagcacgagaggagatgatcacggtcctactgatgaaggcgacgaggactttcaaagtcatcaagacaatggcgaggaggaagaagaagaagattacaggaagcttactgtgcagaatctaaagcatgagctgaccaagtacgattgtggacatttgttattgaacagaggccatcaaaacaagaaagagattcttgcgttgtatgaagctcatgttcttcccaagaaagctttagcgagagaggaagagagaaagaaacagagagaagtcacttcttcttagaggacaagactctgtacagagtaaggagataaacatgtttaatctcaaaaggtttcgatctctagagatttagtaagagttggaattagaaaaggctcgtattgtttctctctttttatcggttttaccggtttacctggtactgcagaaagtaaaccgaattagccatttgtattgaatctgagggtttaggtttttttatgagtgttttttttttgtgtgtttggtatttaatttgtgtggagtttgagtcggtttggtgttttgactttttgatttttagattcaagtctttttcagaattctgttactcgtttgagatcgaccgtttgctttgaattttactcttcaatcctaagtcagcagtattgactaattgcgtttaaaggaataattctaagattatgttaacttggtgataggctcatctatatttgacttgtatccatgggatgtgactcggatttgataattcttagttaagtaataaatgattctgttagtagtcctaaaaattacgtttcatttagaatgttaattttcaaaaattacagtttacaaaagttattaacaaaattcagaaaatgttacaagtcagttatataaaaagaaaaaaaaaaacaaatcttattgtaaaaaagataaggtttcatatcagttattggtttgtaataaatttgtaagtcatagcaactgttacatttaaccaagcacttaacactgatgccagcttacatgaatttaagcaaaggtgcaaaaaaaaaaaaaaaaaatctaccaaacgtttttcaccaaaaaagaaatatatgacttgttccacaagatgcaatattattaggtccaccgtccaaatttgacgaaaatttagcttccaagtctcgtcaaaatcatctgaatgagttaaaatattctttcgtacacacttatattaaaatataattcatcgtaatctatgattgttttggacgaagcacacgaaaatacattttatatcaataatgtatttgaattacatagtatattaaggattttgtatgatgaaaccgagttaatacggcgggaaaaaaattcagtaaatttttctacaacaacacccttttaattttagttttctctgtaaagtcccaaaacattatgaattgttaaaaatcacccaatgtaaattaattgattacgtaaccgaattctaaactctaaaaactaaaaaccatataatatacacggcattaatacaacatttacgtttctcttcccctaataacacctataccccttcaattccaacttttatccctaaaaccccaaaagttttaaaattatccaaatcaccctccttccctctccaaactattcaaaatcgccgccacttcagaaatcgacggtcgactcctccgtgaattcccgacacaagctaaagcaaccttcgctaatcttattaccaaactcttgatctcactttgaacaacaatcctcggatctaaaagctcagcaaatctctgttctttaatcaatggagttgcccatttcacaatcaatccattttcacttcttcttccactcaaaatctccattaaaacgacgccgtatccatacacatcactctctttgcaataaccttcttctatatacccaaaaatcccagatttttcaatcggaatcaaaaacccaaatccgtaatcgcaaatcttagccgttgatttctcgtctaccaaaacattcgatgatgtgaatctaccgtgaacgattctagggtttgcgatttcgtgtaaatactccaatcctctcgctgctcccgccgcgattttaaaacgcgttttccatccaaattcaaccgcagtcgctgaattggaacctccgtgtaagtgatcactcaagctcttaccttctccgacgaattctgttacgacgattctttctccgggagcttctgagaatcctaaaatcgaaacgacgtttggatgatgagaagaagaaagcgatttaataaccgtggaaaaaccgaaacccggtttactcaaaaccaaaccgggatgtattcttttaaccgcgacgagatttttatgatctggaataatcgcagcgtaaaccgttcctaaccgaccagaaccgatgattcgtcgttggttaaatccgtcggttgctgagtctaattcggttaacgaataagaaagaccagccggtttggtttctggaagaagatattcgtcgtcggaccggtttggtttttttctgcataataagaagaggaagattatgagaagaagaagagaaagagagagaagagacaaaactgaagcgtaagcgattttttcagatttgtccatttgatttcaacaaagaaaataaatgtatgattatggattatgggtgttgtgtaatatttatatacgaagagaataataaaataaaataaaggtcaaaaaagacaaaaggaaagaaattttcgtctagatggtcaataaatattcatggactactctttaggttaggaagaaaaatctttacttttcataaatatatgaaaaatatgtttttaatattatatatatatatatagttatttttcacatggtaagatttttaaatttgttaaattctaatttcagtttgagtattattttcattaaatcatagaaattacttaagatgttgatttctcataaagtcataatattaataatcatgcgtaaaaaaaaaaaaaaacattaacaaacatatttgtaaaatagtatgcataatttcgattgtctttttcatggtgtaacttaagtttgtcggtcctaaagaatttcaaagtgcaaacgcaaactatcacatgatgatagaacatttaattcatcaatggattctaaagtaaaaacaaaataatcagaaatatgacacactatattattaattatcataccgtaaaagaaaaaaagtgatcgaaaaagtttagatagatcgtcagaaccacacaaaatcaccggaaaagttgagaagtcgaattttaaatatgacacattatatcataccctaaaggcctaaactataaatgatattgaaactttactcattacctactcattgaaagctgaaattatatttttataaatgttcatatgatatcaaaacaaattgacttactattatttgatctaaactagtgttcaacttatactacatgtattaagatcaaaagaatgtgttgtaaaaatcacacactgaaaagctaattaagagtatattaaatctaactaatgccatttatataagaatgaaagaaggacccatctaactttggcaggtgaaactcgcacctatataactaatgccatttatataaattatagttatttatttcccccttttgataagtgtatatatacatatcacgaaatgtttacctactatgtattaacctatgttgtacagtgtttcgaatttcccatcaagaatatgttggattctttttggaagaaagtggagcatttcaactactagagaatgaacaaaatataatctacgttctaagatcttaattttttacttgaaaaatgaatatttgtttgtaaagtaatcacatatcttaattcttatatacattttctgactatacaataatatgagctaaatagtagtatatctaagatcaaacgatgactacggatcggactacggttacgtttgccatatatacaagcaccctaaatcctgaaattcttagtaaacattttactaatgctccactactataatattggtacgttagttaaaccatcaaaaatttccttaaaaattccaaaattacttaaagatatatgtgaagatataccaaacctatattgtttattatctaaagcccatgctcaccaataataatcattgaactataaaattattttatttcattcattacctatgtccgtagattctctcttttcgaaacaaaaagtaatactaaaatagtgttgcaaaaacgaagacagatgcactgtatcgtccatctttgagagttttcattttagtgttttcattcatattcatgtcaaggagacccatgggccatgactgattactctgatggctcaatctatacaattagagattttaacaataaatactttagagatctttagctcaaacataaagattaaacaaaatactcatttactaaaagagcttaaccagaatccaacatttatctggatctgaactggatccagtatgaaccaagaaacatttggtttgaatccagtctaatctaaaaaaatattggattcataatgcagttcaaacatgttttttttttgaagtagttttcttgcaagaccaaagaaaccatttaaagagagtctaaaatctaaatcattcaaaacctgtagaatcccattcaaaatagttgggcttcttgttaaggattctttgtatgggcttttagttggcatatcaaaatgctccaaaacatttccttgggaaataataatcccaaatattttccaagacatttcgtttctctgtctttttttttctttgtcaacgacacttctcgtaaattagttcgttaatatttgaaatatcataatgaaaaaatgtaacgtgcaagtctaatcgcatgacacacccaagaatgcgtacaactaaactgattttgacgttagttaacatttatagaaataataatttaattacaaacaagtgctttgtcaacgtgtaatattttattacgttaaggacatttttacattaaatagtatgttttagcaaatgattacgtatagattataatcttacttggcctccacgaaggaattactcgaaattatccaaaggctttgaagacattttccaaacatcaataaaaaaaatgttcatgggaatttcaaaatcagaatcacattcccaaactatttaataaatccaatcatgcaaccaaaaattataatccttttgtagacaaggtcaaaagcttatccttcacataaacaaatgactacaaacttgcttgcaatacataacaaagtaagcagccataagttacattaaaacacaagcatttgctcaaaacaacaaagcacctggaaatagagatttgaatctcgagtattatggagattaatgttgatgaagaagctgggatcatcaaagaagaaacagttccactcctggatgatcaaaatcgaaatcgggacttacctgacatagaaaggaacactatgatgcaaaaggcaataggtaagacttttcagacaacagctaatctagctaatcttttacctacggggacagttcttgcattccagattttatcgccaatttgcacaaacgttggacgctgcgatctaactagcagattcatgactgcgttgctagtttccatctgcggattctcttgtttcatacttagcttcacagattcttacaaggatttgaatggtagtgtctgctatggatttgcaacaatccatggtttctggatcattgatggctcagctactcttcctcaagaactttccaaaagctacaaactacggtttatcgacttcgtacatgccattatgtcgtttctggtttttggagccgtggttttgtttgatcagaatgtggttaactgtttctatcccgaaccatcagctgaagtagtggagcttctcacaactttgcctgtagctgtaggagtcttctgcagtatggtgttcgctaaatttccaactacacgccacggtattggttttcccctctctgctaaatgatgttctgaatcaaaatgtaaaaatcctcataattcttttggaatttctgaaattctctgttgtattttgtgatttaccatttcttctgagatgatctcttgattagaatatctcaatgtttgtgtaagttgttccatccgacatgtttgtttcagctgtcttcatctaatcttccatgcactaaacttagatatccaaatctctgagaagagtatctgaagcctctcctacaatcgttttatccaatgtgtgacctataagtagcttccatgttcctttacttggaatacacccatcagtcactatttcatcgactaattgaacagctttctggaattcaccctttttgcacaaacacttcaccaaagattctagtgtttcaacctcaaccgagattcctctactcctcatgctaagatatagagtaaatgcacgacttggatagtttgcacaaagacctcggactacttcattacttgtcttaacatggatgttccaggttaaacgatttggagtaattcctccaagaatcatctcgtcaaggaaattggcagcttcacgaaacttactaatagcacagaacccactgattactttcccatataatccagcatcaggtttcaaaccctgaagattcattctatcaagaagttcaacggcttcttgaatcttctgctccttacagagaccagtgatcaaagtggtatacgttaccatgtttggcctgcagcctctagccatcatcatctcaaatagttccatggcttgcaaagaacgcccatctttgcaaagaccgtccatcaaagaactgtacgtgaaaacattcggctcaatgcctttacttttcatctcttctagatatctcatagcttcatcaacatttttcgatccacacaaaccgttaatcagagaagtataggtaacaacagttggtgcacagtctttctcaaccatctctgtaaacaacttcttcgcctcatctatccttccgaacctacacaaaccactaatcaaggttccatatgtgtaagaatccggatcacaccctctcttaggcatttcaagaaaaatcttaagaccagcatccacagttccgtcatttctgcaaagagctttaatcaaaacattgagagatgccacagtaggaggcaaaccaatctctctcatattcttgtaaaacttaaatgccaaatttaactgattctcttccacgagaatggcaagaacagtgacataagccttctggctaggatcacaatcaaaatccttcattttgtgaaaaacccttaaagaatcaaacggcctatgaacccgaccataccctcgacatatcgaaagcaatatatcttcactaacaacacaattctcaatcttcattctaacaatcagatcttcagctgctttgaacttattagcagagaccaacctcaagaccatataaccaaaagaactctgatcatgtacgtacccatttgcgtattccgccgttgcggaatcaaaaactgccatagacttctccacatctttttcagctcgcatcagtttgataacctgtgaaggcgtgatgttctttgaccacttgaacatcatcactttgctacccattactaaacaatgataccttccaacaatagcaaagaatacacctttttatagagaagaatctcagctacgcattacgtcgaacaggttgtgtgcataaacgatttcgataggctcaaaccaaatgaaagaaacacagaccagaaaaatcatttgatcttcaaaacatacgagttccaaaagtgaaggaagcaacaatgaaactcgttacgaactagaaggttaatcaaattgccggagaagaatcgctcaccagttttggctagggtttatgaaatgggagactttagctgcaaagagaagagtctctggacgatttagagggtgtctctctaacaggcaacaaagtacatattattacagtattaaccaaatttaaacgaattaagtgtcaacaaaagcttatataaaaaatttaaagtttaaaaattataaaatatgtcaacaatattttagtacttaaaattattatgcgaaatatttagatcaatggactactcatctaatatatttgcacctaattttaaagtataaattcaaccaataattagaaaatgatagcttatactcaaattcaacaaattatatataaatgtatagatactacaatatcattaacaaaagtcaccttaaataaatacacatatcttttatgttctctattgttttgcgtacgctaacacaatttctcatatgcaaaaggatgaatgagtaacaaattacctcataagaacaatcatctttgcttacatactaatacaataatcactcaatcaaccaataacatcaatcacataggtttacatacaataatcactcaatcaacttcataagaagaatcatgtttacttaattcatcaattatccccaaaaacactactattaagtataaactataacatatttgtagtgatgggtcaacatttttatcatatttaaactcgggtttcctcaaatcgagaaatagtgaacatgtaatattaattttaaatcgcaattacagaaattaattgaatttggtcaaatggacagaattttataaattgggtggaactagaaaaaaaaaaaaaaagagtatagggtgaattgagtacatgaaagtacatggtaatcctagttaaacgcataatacatgtgggttcatttgtatttttttgtaacttacgagtaaactggctacaacaaaaaaaaattagaagatttttttgttttgtagaaaaccctaattttagttatagttgtataactttgataaaattataaaattgtattacgaaaaaagtaataagatattcaaaaaagcctagaataacgtatatgactatgagcatgaaactgcaagtcaaatgctgacagacaaccataaacaaaagaaattaaatagagatacctttaaaataagtaaaatttcatttataaaaaatctactttcttgtgaatctgtcacgttcaataatttgaagaccactcaacatacaaggtaaataatgaaaaataaaatctaccaaaatttcaattattattatcttccaaaaaaacaaaattatacagatgatgatggtgatatggaacttcgattggctaatattcactgtgtctctaaaaaccatccacttatcaagataagatggaccctacactcatccaatctaaaccagtatctcaagattcttatctaattacatcattctctaccgttagatgaaattgaccattaaccctaccataactccatacaccgcgagatactggattaaccaaatcgagatcatcgtagccgtccgatcaacaagtaccatctcttgaaatactcgaaatcctcataagtccgtccctctttgctctcactatcaaaactctgaatttcgatttcaatggagtcacgcgtgctgttacgcgccaccgcgaatgtcgttggaattccgaaattgagacgaccaatcggagcgatccaccgtcaattcagcactgcatcgtcttcctcgttctcggttaaaccaatcggaggaatcggagagggagcgaatctgatctccggtcgtcagcttcgtccaattcttcttctcgattcgtcggcgatcaacggaggagagaaaagagaaattctcaaaccggttaaagccgccgctgctgaaggtggagataccgctgggtaagaggtccgtttctagcttactcggtgttgactcatttgactcggatgatctgaactcatttatttcgcagggatgctaaagttggattcctcgccaagtatccatggctagtcactggattcttcttcttcatgtggtacgtatcattcacgcgcttttcttaaaacgttatcctgcgcactttagcagattcttatgattttaccgccaagttttggtttagtgcgaattgacgcttttatcctcatttggtatttacaggtacttcttgaatgtgattttcaacatccttaacaagaagatctataattacttcccttatccctagtaagttcttacacatttttatttttggattaatgttttaagagttaattgcaaattttcatattttgatctacaacttatattctgtggtcctaatttttttttttttttggggccaaatattattctgttggtccgattaagaatcgaatctgaatattatatcaaaagaataaatttgttcatctcaaaaagaaaaaagaattcatttgtcttttattaattttaaatataaattaattatgcctttttacaaaataataataataataatgttgtgttatttttgtttcagttttgtatcggtgatacacttgttcgtgggagttgtttactgcttgatcagctggtccgtgggtcttcctaaacgtgccgtaagttcgttcatctctctttatagctcactttacagttttgagtttatataaaagcaaaatgaaaaatagtggggcgttccgagaatcgaactcgggacctctcgcacccaaagcgagaatcataccactagaccaaacgcccaattgttattactttgaatgttagtgtacttatcgcttgagtttacattggctcatgtgaatgatttgatggttgcagccgattgactcgaacctcctcaaggtattgataccagtcgcagtctgtcacgccttaggccatgtcactagcaatgtctctttcgctgcggttgctgtctccttcactcacaccatcaaaggtattttttaaacaaatttatacaacataaaaaataacatttcactgaatcaaaatctaacattcatacttttgcgaaaacgcagcacttgagccattcttcaatgcggctgcttctcaattcattatgggacaatccatccccataacactatggttgtctctagctcctgttgttcttggtaaacactcaatcaaactctttccatgtttcttgtgtcctaagtttattggattaacctttaaaatgttgcaggtgttgcaatggcttcactaactgagctatcattcaactggctcggtttcatcagtgctatgatatcaaacatttctttcacttaccgaagcatcttctccaagaaagccatggttcttcattcttcccctctacattttttacgctactaaatcatgttaaggtttgatttcggaaactgtattgtgtttttgcagactgatatggacagtacaaatgtctacgcttacatctccatcatcgcactcttcgtctgcattcctcctgccatcatcgttaagtcactttcattatttctcactagttacgtatgaaagaagtaatgtctttttttttgttattaattagggtttctggttaaaatttgttcttaggttgaaggtcctaaactacttaaccatggtttcgccgacgcgattgctaaagttggaatgactaaattcatctctgatctcttctgggttggaatgttttaccatctctacaatcaggtaatgtaaaactcaagttacaatctttaaccataaacttgcgtttataaaggaaactaaaacattgaggaaaccacggttgcagctggctaccaataccttggagagggttgcaccgctgactcacgcggttggaaacgttctgaaacgtgtgttcgtgatcggtttctccatcgttatcttcggtacaagattactaacctctcttcatatatttttacttattagaccaatcccgaatgaagcaattcaaatacttttacttgtcaaatatttgcaggaaacaagatatcgacacagacaggtataggaacaggaatagccattgctggagttgcaatgtactctatcattaaggccaagatcgaagaagagaaacgggtcagttcattattcgcattagctcaattttcattacatagcttaagaaattttgcttactattaaagatataaattgttttggatcttgagaaaaagatgattaatatgagaactggatcttcttttgctacagcaaggaaagaaagcatagaaagcagctgaagacggcggtcgacagttgcataaacaagttctccgatggatatatatatatctatataataaataaccaaatgcaatagtatgttgtattgtaccatcaaccattgttttcgagtttttcctttctttgttttttttttgctttctgaaaagttatatataaattttttattctgcttcttctctttttaatggagaacattttcatttccatttcttctgatatgcaattatcttaacggataaaaggcataataatgtatttatttgctctttctcttggagcatatacccatcatcgtgacgtagagcttgaggtttaatttatttcttataacatttttctccttgctaattttgtttttcaactagtaatttgttatatattatttttgtaatttatatgcgttataaaatttgttactgctcggtcaatagacttaacaagttggtctgggttgtgtggaattttaccatgtcgtcttccgttgcgttctccccaaatagaatgagtcgtagcctgaaacacatgagtatataacggatgatgagtgatagtatgtccccgaagctaaaacagacaaaagttaaatttatgacacattaacaacaatgaagcgttgtttttttttttgtttgagaaatgggtttcttgaatcatgggctgccacaaaaaccgtttataactctaatttgcataatgattcaccatataatgtatacgacgtacaccacaacaaagttagtaacccatgtttatttctctctgtttttgtaacgatattaatgttagataaataagtgtaatgaatttatgaataaattttttctaatgtatactttcggtggtcgatcattcgaattgcttttccgcaaatcaagcaaccaaactaattaaactctttagtctcttttcgttactttctcatcactctttttttgtgaacccatcatttgtttttgtaccgggcgtttggtaatatatgtctaactaatttgaccaattaactcgacctaatgtttggtaatttacaacaaaaaaagaggcaaaaaaccatatatatgtataatctctaattgaccaacataaaccacaaaaaaatggctcaatcactaaaccttacgtctcttctctgtctcaccttcttcatctcatctttctagcttacgcaaacacaagcaagaaaccgccaaactttaaccggagtaaccgataaaaaccatattttattcatgccagagaatcaccggagcacgatggatgaggaaaacgagcaagagccagcctttgtccgagagactggacatggttatggtctctatggccatcgtgagattcacaccaacaacgacgaaaacaagaacagtgacaacgatcaattttactatagaagcgacgcttatggaaaccgcgatggtagatttaagtagagagattgagatttgttttgttttcgataatttggaattcagttatgttttgtaaccgaaatgttaaacaaagttttttgtagtttactttagagaacttttatctttcacaattttttttttttggttacaacaagataatccttcaataaataaataaattgtaattattgatactataataataatagaagtgacgtaaaaagaaaaggtaatttggattacctcattttcctaacgacaacaacatcaacaacagcgagttgcgaaagagagattgagaaagaggtaccaagactgattcgaaacaaggtccgaagctttacgtggaatctacgcgctagactccaaccacttggactagatcagtcttggtggtatgtctttttgttatgtgttatttatacttacttgaaattgtttcgtactttcgttgaaattaaattaacccggatcttgttaattatcattttttgcaaaatctcagatacgagtgacgcgactagtttgtgtcttgttcttttgtatttatttgatcttttgtcttaagagtatttaactttacctttcataacttttttccttttgagcaaaattttaagctttctatttcgtaaattatgttgattatatgtatatgaggatttggaaggccgttatataaaatcgttataaaaatgatgaccatataagattgacaaaaaaaaatgatgaccatatacaatgacattttagaagctagctttacgggaattctttgagttacaaaatgcactggaatggagttaattaattctaatttacaaactaaatgtagccaagtagaaaagtctctgcatgatttttttttcttttttttttgaatgaatgtaaaatttattcaaacaaaaaaaaaaactttttacaatgaatgcatccttaaattgaatgttgtgttttaaagaaatagtatcgaaagtgctaagaatgttagttccttgaatcaacccaaacccgaaatccatcttcatgttttcttgggtttgttcggtggattgacgaaattttgttccgtataatcctgtccaaaaacttgattacctgatctgcagtgctaggaggttcactatgtcgcctcttgttccgctcaagccatattgagtagacagtagcttgaaaaaagtagtcggtgcatgatggaagaaccagattgctacttttactaattatgaaatgatgcataaaaatagttctgctgcacgatggtttactagatggctaaataaaagtgtgtttcgtatcattgatatactagtaaaaagatccttacactttaattatcttagtttaaataattgatttttcctataattcacttcaaataaaacgtaaatagaataatacaaaacccaacaccataccaactaggtaggagtgagtgaaaatggatgaggccagtaaggaaatgcagtggatcttaatggaccttcctctgtgtagaagagagtgattgtttgcgtcgtgatatcgtaaacaccaaagttatgtcccgcgaaatagatgcaattaggcttaagacctggagacgagcttgctgggacacacataggttcaccatgtccaagaaaaatacaaagatctccaatattttcagtgtaatacatatctttgtgtcttttagcattttctttctctttaaacaccaagaaccgctttgttttgtgcacgactgtgtctgactcaaaggcgtccccatagtacctttgaacacatgagagagccattaatgaatcagctaataggtgtttacttataaaagaaaagaaaaagaaagtatatatgtagtgtaccatgagatgaggaattgttccccggagggtgactccactagatgatctgtcctggtaaacgaattcatctcctccaactcatacaacatatactgaggaagatcttttttgtcaattatatgatacgtgggctcgtctttctctttgaagttgagaccaaatgagcacatccaatcgcctccaggagttgaagtgtaaaatctttgctctttcttagagtacttgagacttgagtatgggcatatacactcatgcccatgcgtggtttcgatattgatccaccgtaagtctttatgcctatagagcataagctgagataccgaaaacttgatagcaacgacccaatcatcattttttaggtcaggaagagaggtcatggcaatgttttggatttgagagccttttggaagaggaggtagatgaacagaaacagattttgatttagggtcagagggcttgtaatagatatttagacgaacgttgtccatatcacggagggatgtgttttccttcatgtgaatattcactccactttgattcaatcccatactcattgcctcgcagacttctccagccaaaaacttgctcttaattatgatttcgttttcaccctctgatccggaccttctagatatcgagctgctaccatttgaagaacctccgatcttaaggaggtggtcaattaacaaaaaagggtagattggcgtagacgaacaccatctaaccaagttgttttttctctgtcaaaatgtaagtacgttgaactaatcatacaaaaagaaattaactagtaaaaccctaaaataaatccacaattatagtagaatataagaattagaaagaaaaaacttacaaggacatttgtgtagacaaggggattcaagattcgtatgagaggttgagacattttttagaatctttaaaactatgttgaggtgatttctcgtgtgggtcttctctagtctctatagagacttatgcttgaacaccaagttgacattgaagaggagaataatattcttaagccttaaggaaataaataattaaacatacttaaggtagaaaaggaaaggaaatattaagaataatttgacttttgatattttagtatccatcggcctcagttttctttgttccttgctttttagattcttctctgatttagaacgaacaaaatgtttttgaaatttcttaagtgttgcttgacgtattttgattaattttttctatatatgatattatttttgctaaaactgtaaatatcaaatattttatctaatggacacattagtttttacataatctcatgaatatttttcaatatagtttttttttagccaattaattatcacccttactccatatagtcgtctactaaaatacacctatattatatattgtcctaggctcctagcaacataaatttccaccattgagcagtttcatgcatatcaaaatatggatcaaatcatcaaataaatgcaaccaacctgattttttcatctttttatttctgcagacagccttgttaacgtaattcgttcataataacttcaaatactaataatttcatcgtagaaagtgttctttcaaataaagcatataaaaaatacaacatgacatcatattaattaggagtgagcgaaagtggatgaggccacgaaggaaattgagtggagcttagcagaccttcatcggtggagaagagatagcaagtttgggtggtgatatcgaaaacaccatagttatgtcccgcgaaatagatgcaattaggctttagaccaggaatggtgctcgctgggatacacaaagcttcaccatgtccaagaaaaatacaaagatctccaatgttttcggtgtaagacatgaattttgtttttctatcggttaactcttctttctctctaaacaccttgaattgttttgtgttgtgaatgactgttaactctttgtaattaagtttacactcgtccccatagtaccttcaaaaacacatgagagagccattaattcaagaaaattgatttacactaagatatcaaaatatatataagtgtaacaaatttaagaaatatataccatgagataaggaattgttcaccggaggatgactccaccatgtggtctgtcctggtaaaggaatttatctccataaactcgaacaattcatacttaggaagatctgtttttcgcacctcgacaaactcgagcttatccttctccttgaagttgagatcaaaggagcacaagtaattgcatccaggagttggaacgtagaacctttgatctttcttagaatacatgagactggaatgagggcttatagactcatgcgtggtttcgatatcgatccaccgaaagtctttgttatgtctataaagcttcaacttagatcctgaaaacttgacagccataacccaatcttcattgtttatgtcaggacaagaggacatcgctatgttttggatttgagaacctttaggaagaggtggaaagtaaaaattctcggttatgtttcgagatgatatgtgttccatgtagagatgaacattatcaataaacttggggagtgtatactctgtcttttccaccatgtgaatatcttgtcccctttggtttaatatgatatcattgaactacgaacaacttcagctagtttcgggtctgtaatccagacctctttttcacctaatgattcgtcccctctctctacgcgaccatctgaagaatctccgaccttaaggatgtggtcaatcatcatcatcgggtagcaaccgtggctttgcgtagacgaacgccacgtccgaaccattatgttgtgtctctaccaaaatgtaagtacgttaaactaatcatacaaccagaaccaatactagataaatagacaacatttttgattttattgttgataaaattctataacagaggaacattgttcatatgcatgcgctttagggacaaggagcttctatacatatacatagaaactataattacgtatttgtataatgaattgaaaagaaaacttacgaagacatttttgttgacaaaaggcttcaagatttggctgagaagttgaggcatatttctaaaatctctaaactatgttgagttaatgatttttatcgtggatcttctcgtcttctctagacagatttatcttgaacaccaagttgacattaaagacgagaataatcttttttttgggtgaatacaagaataatctttttaaggaaatgaataattagacatatttgatggaagtaattgaaaagaaaaaacaagtcaataaaatttaactcaacggttcatatttaaaacaaatagaagctttctatcaggacttattcaattaagggaatcagaataagaaaaatatatatatatattttgtcatcagctaacatctccaatctctctcttttattgtcccgaatattctcaccatgacacattaaaaggtctcaaaacaaaattaaaaagtcgagtcaatttaataaaattattttgtcaataatgtttctttaatgtcactgacaattcggctgagaggtacacacaagaaataaccacaatagtttggaaaatttagcaaaatgcctcaactgctcaaccgactcgtgaaggctcttgtattcaaaaatgccatcgtaagcttttcattattttctattaattactatactagtgtctagtggtacgagttgtatgattagttgtatggttggtttactttactaccagctttatgttatttatttttacttttaataataatttatttatgtttgttccaaattataactaactcaattacttataaatatgatttgattttgattaatcttgtgacaaacaaatggattattattaatcttgtgagctcaagagtttatccctattattcagaaatttgctattagtaaaatttttaaggaggatactgtatatgtatgtgtggtatttggctacttaaagaacataggaccaaaaacatatagaatttggctagttttgtcatgatgtgtagaattgaatctaaaccaaacaaaataggaactaaagccaatattttgtctggaactcatcagagtttattcagtcaaacgaatcaattcaggaatcagaataaaaatgctggaaaatggaaaaaggagaaaataataaaacagacttttcaatttcaaatctctcttgacctaaattcatatagagagattttgtcatcaacttcccaccattaacaacatttccaatccctcctctcttttatcgtcttgaacattctcttcttctcatcatcacaaatttaaaaagtctcaaaaatcaatagacaaagtcaaatcaataataacctatgatactcttgtgcaacaccatgtacaaaatcattgagagtgcaagaggaagaaagattacaatccgcttcggcgccctaacagtaagactatcgacgcagcatccttcttcaaaaatcgtctcaagctttggcaagtctgagaattgctgttgttgtttctggtgagatgcaataagccttggtgctacctctccccatgtttgaacaaacctcatttccttggtcatttttttttcttacacccagttttcttttccccgacaacaatgcaatgcagcagaaggaaaacacgggtttagtttgagaaataaaaaaacggatcttctacgggtgaggagggcagaggaagattgaaaggtgctgcttttgactaaatgaatgaaagatctttcaatgggagaacttagaggtgcatatgatgtggaggagacaaatgggagaggttaaatagagatacttaaggtgacaaatatggaaatatgagaaagaaaacatgaggatttttcgggatatggatgaaaataaatgtacgctttgcagatagccaatgatgcattctctataatgcttttgttagattttctaaacttacagggctctaaaaacagatatacccaaataaacccatcacgttagaggtttaagagtaaaagaagggtcaaacaattatctttttgttgaatctttagaacccgcaatccgaacacacaaggatcgtaaagaaaacagaggaaccttatcagttttctagaactataggctcatacatacgttatatactccttaaacctagatgatcatatatatatagacaaagtatggctcttgagtatgtaggaatatatatgaacctggaatatgaatctgttagagaaagaatgtaacagcttctcaacttgaaaggcttttcttgttccaagaattgtcaccgtatggcctgagattgagaatgatgcatataagaaaatgaacagaaaaagggtttctgcgaatgtagccttttttaccttggatttttcaaatggagcaacatgaagatgatggatatgactatggaagaggaaccaacgacaagataggtgatacccaggaaatcatttcttcctcctaaccaatttgatgtggagagaataagcttcttctgcccactaaagctataagtgttgtaattgttcatcaaatttacttcaacaacttttcctggttccaagtcctcttcgattcttccatataatttccggaagcttagtaaagcagctgctcgcatccacactataaagtcctcttggtcacttagctacaaagtaaacagcattgcctaagctaaaatatatgattaaattttttttattgtaaagtggttgagaatgcatactggaatttttggatccaactttgctccaccaatcaaagttccgttctggaaattgataggatacacattctttccaaacttgtgctcgcggtcactcttccacgcaatgttattccggctcacattcagttttgttctttcgcgagaaaacgtaaatgtatcattgaacatactccaagcaattaacccacaaggaacaattgggagaccattagatgactcctcgggttcacaagaacttgtgtggctatactccagtccatgtaatagttgctgatcacttctactctttacatacctgcaaaagaatcatcagctaccaaatggctgactttctcatcactagatttgaaaagtaaatcaataaggcatctagctattttaccggcgatggttttgatagtagttatcaagctggtagtagataaaaatgggagctttcatatacttttgtacctgatattgaaaagtataaaacctcaccaataggtaacaatgaagagaatcttaattcactgattgagaatcaatggagcagaaaggaattaccttcaagtagcgcgtacaattctttgggatagatgaatcagttatatacaacagtttgttggttctatattcttcaggaatgcactcaacatcataccggtctataatttcaatagcctgccattaaaggatttaagagtttgctccagaaacttacatctcaaattcaagagttaacttctccaacttacatcacgagaagcacgaagagtaatgagaccaatgggaatgaaaacaaaacccattaacataaacactgttataacctgcaaaaaacatttgattcttcttcttagacaatcagaagaaaagcttagcttttttccaggtgacaaagattaatgttactaaccgatattggtgttaagactggcttacaagctgggagtttctgctgcttaaactgatacagagctgccaaaatcaaatgattcaatgttcagttcaaaaagttacatgaatctataaacaattgccaaaatcgaataccaaatcacagcattttttttgcccttacttaaacccgtgagagcttaaactaaaggcttttgattgaagatttcgaagaaagtgttatgattaacctttggatcgtcttgatcgtaagaaggatgattgatcaggagcacgattcatcgatccttccacttccatcattatcccctctctcgactacttaacttcactgatacatcgggaagaagaaatggtttactccgccgcggggataaaaactccggcgtctctcaccggtggatcgatctagaatcgcgtgctctctggtagattccacctgatctaagatttttttttgaatttgtaaattaatctctcttcagtaaaattaaaagtatatgaacatgaaaaagttgaaaggaaaaaaaaagtttgaactataaaaaaaggagaaaataaccaaaaatgtcagaaactgaggactaaaattgaaagctttacctaactacttatagggtatatatgtaataaactaaagtttaaggtcagtcacaaataaacaaaaacatagataatgttgtaattaaatataataatgaatagtcaataaactagataaactattgattcttctaataatgaataataattttattatacaaagtatgatttaaaagttttaaaaatacatatttacatatactaatttatatatgtcgatatcagaaaaaacaagaagcaacgcagcccacttcagattaaccttatgatccagacttcttcttatggcgtaactccatcactgaactataccctctcagttctgttcttcaaatcagtgtatgctaaacccttcttcaacacctaactcttggcacaaagtggtttggttctcgcagcgcattccaaagcatgcctttattatactctggtctctgggtaatactccgagacaggctctcgagaagagatcgtcttcgaaattggggactttaatgtgccgcctcactcctccctcttttgtggttcttcatctgagtctgtataccacttgtataataaaggagatagaaatgtagggaagagagtaatagagagagactttaaaagtgtggggactttttaaagtttgaagcctctaaattccgttaagaacacacaaaaaaaaaacatgcgggtaactagagtttacataaaaaaagacagtacgaggtttacggttttgttgcatctcacgcaacgtgttgagccaaagcaagaatcttgagatgtttcttcttgcgaagctcatgaggaacaggaccaaacactctagtaccaatcggctggcgatcagttttagtattcttatctttactatcaacaagaacaaccgcgttatcatcaaacctaacttcacttccatcaacacgacctctctgcatcgcagcacgaacaaccacaccatacacaaccgctcctttcttcactttaccgtttggcatcgcttctttcactgaagcaactatagtatctccaagtctagctccttttttcccctttagagcttgaatacacatcactttcttcgcacctgaattgtccacgactttgagaacagtccccatctgaataaatgtccttctctgctgctgctgcttcaaccaacatcaacaaaaaagaataagcttaagacactaaaaccattagaagaatactttcattggttggtttctgacctgagagaggatactttcattcatcattccattagaagaattcatcgaaccaccattgttaagacctccaagcaatgaacgtcctcctgctcatgatttgtgtatgaatcaaatcagatactataaccataaacaacaaagacaacagattttaaaattttggctctaactttgctaaatcaattacaaagttcaacaattttgaagctgataatatgttgaaaaatgggaatctttaacttcacaaagatgtgatttttaaacaaacccatcaataaccaaaacccatcacagtctaaaacataggatttatggattcaatacacaagatgagatcgaaggaagaggaataaggtagtctcttacctcgggttaatctggaagcaaaagcagcggccatttctgcaattgaaaattttccatcttaatgcaaataattacataaaagaggagaaaagggcttatattgagagagatagattgaataaaaattcaaacttacagattcgttgttaatggagaaatcaaatacagatttgttgcagcagtaacgactgacgcgagagagagtgagggatcgaggcggaggaggatgaaacaagggaaggtttaagcgtggcaacaaatgtaaattacaatgtttagttaggggtacaatagtaatttaatttctacttttggcccaaacaaatgaatgttgggcttcaagtcgttgtatgttattttaagaaacaaaacaggaaaagagaacggacaataaaccaatagtgattgttgaaatttgtgttattgtgtaattcatagataactttttttaaaaacatctttttgaaacaaattttttcgtaaaaaatagattagtaacgaaaaaatggtgtatatcaaataaaagcattcgtgatcaacattttaattcttaaaaatataatgtatgtatctgtaaaaacgtttagaagatacttataagagttaacttatattaccttttattttctatttcgtataattaatctgaattttttgaagatagaaggtagaataaaataaaaacaactatttggaagatttgttttgttgaaaacccattatttaatgtgtgtttactaaccttcatatacgtacgtcaattaaagtattaactggaaataaacacaagtatagataataatagttgtaaaaaaacaaattggatcgttggtgattaacaattttttttaagggaaatatgtataattaaaactatatgagctatttataacagaaaataatgcataaatcatctaaaataaatgaaaatatataacacatatgactatatgttattaaaaaaaaaaaatcagaaccggtcattggtggtgactggtgacttatatctcccttgttatagaatggtactagtctactagtattgactaatgacattttggttctcaaactataaaccaaaagaatctagaaactaaagaagagaagaagattctactgaagttgttggagttgttaagttactctcggggtttgcttgtaaaaagtagtctatgtcttagtgttaagtaagactactatgagttgttaagtagttttcatggaatataataattagtctaatttccttgtaagttgtttgtgttatgttgtgtggctgtgtacggaaacaatgaagaagttgatgttgtattaactccctctaagattgacaatattgtctcaattctaaacactaaacaaaaccaagaacagatgaatgctcaaagaaacaacaactagagagtagagagtagtagagccataattagtgaaattacaagttttagactcttgattctttagaacaccaaaacgttgtgcgtttaaccatattcagattatggatgaagaaaacagaagtcgttaaatgtttcaaccaatgccaatagtataatggtactacgaatgcaaattttagtcgttaaaaactaatctatgttttagagttatataagactagtaggagttgttaagtagttgccagtgaataggttagtctaccttctttataagttttttttgtgttatgttgtaaatttacaacattttctcaattctagagatgttcatgaatttatcgaacctatctaatcttagacgtgaaatatccatccaaacaaatatagatagatatgaatctaaaaagagacaatttaatatttatttatttattgagacttcatatttatttgactaaaatcagaactgagattttaaaactgaactaaactgatacatgctatatcatattgttagtttggtaactgttttctagattttttttgaaaatgtctaaaaactcaacaatccaaactgcaacatggattaaacactcctatagcggaaaattcctaaagttggagacatttcaagttttaagccacttacttctctaagacacaaataattaatcgaaaccagattctggtcgggaaataatataagtaaggtttagggtagctcatgcaatatgtctagccaaatcaaagaccgtgagatgtttcatcttgggaaggtcctacggaattaggaccaaacacttgtgctaaccgctcccagattcgcctattttctcagccttttatctgactaccaataatagcaaccgcattatcaccgcacttaacttcgcttccatcaacacaacctttctatatctcagcttgaacaaccacactactttctccaaaggcaaattgatgatgtttaactctcatgaaaatttacttctcgaccaagtaactttgagattaagcgggttataattggtaatccaatgaataagaattttctttttaacctttctcttccaatcacagagtgatatatgttctgcaattctgcattctacattatttataaccaagatatgaaaaatttatgtaactcaacacagtcacattaaagttttttaagcataataaatctataattctgtagattctttgttttgtctcacaactctacaaaattactaatcagaaccattaggaaatccgaaaactacaatcttaaataacttgtataatgacaggggaataagcaatacctacaatattcacataaatagagaagagcaagcaaaggagaagaaaaagacagaaaaaagaaaagaaaaactcttacatgatatctgtaatttgttgatatatattatatatgattgcgagatcctgcaaaggcatatgcttcaatgaaaaaactagctagcagatgcagtagtagtaggcagcaaaacttgtttcttgattcatcaaaacttcgattttatttcattctctgcttctccccattatatgcttttaattgtaatttcctgaattcgccacagggttgccagttctctgacaaacaagattcataacaatgagaaagttctgtgctttctaaaatatcaaaagaaagttgtgaagacaatgataaaaaatgctaacttatcttcaaatgcaaagcattaagggatagtgttacttataagatattcataagacagttcctactgctgatgataaactataagctttacctatgcaaagggattaaatcttaatggtttcaggtcaagcaaaatcggtgcttgggcaaatgatattctaaactcacttcataaacacatgatgcagaacatgagcactatcttacctcagattccgactgaaaccattcaagctagaacgagttcatttcaagacagtaagtccttcttttaaccagcatcttagcagccgtctcataaggctcctcaaaagccgaagacacccaagagatatcagacacttcctttttcgattcactcggtcttatcgcaaccaaagtcgcaccttttaacacagttccatcaggcaattccaaggttggagcataccatagtctcatattcagagcaggcacaagtgtcctcttcgaagccgatgaagctgctaatggtttcaccctaagctcttctagctgatctctgttcatacagagcacaccttgcccatctgaatcagtgagcactaaactatcaagcgtcttatgctccgcgattatcggttgtaacaagtaatgtcgtgctgatgcagcaatcaaagagctaatcgtccatacaacacgcaatttcaaacctccgtttgtgtaaaacgattccggtatactcccattatcatcggagccagaaccgggagcttcaacgactgtagtagtatcacaagcttgagaaactctcattggatttggtggaatcactgaagaagcaccgagaatcacacaattatcaagagtagaaccaaattcagctctccatttcaacaaaactccatcatcaatccctaattcaccactaggaagctcaattcttaagtaacgaatctcatcgaagtttttcaaaacctgagtaggtgaatgatgcgtaacaccgccttgttcgatctctccaccatcatcatctccactaatagacaacgaagaagaagaagatccagaaccaccacatgatgatgatgatctcttcgtaccaaggaattgacctaaagcttgtaacggcttaacaatgccaccaacaacaagacgaaatatagccgagaacgaaccagcggaagaaccggagcgagatttgatagatgacaaagatgacgaatcgtcgtcggagattacgcaatcgacacgaacaacgacgttatcgacttgaggaacgagagaatggaatcttctggaaacgacgcagcatcttccgagagctttgacgtcgccgattttgttgaaaacgaggaggaggattgagtcaggaagatgatcgaaatggtcgatttctagggtttgtggtggttccggatggattcgtgacggtggatctgaacgagggataattacggccatggatctttgaagattttgtgggatagaatttttctaggtttttttcaggatgattcagaatcagaatcagagcttttggagaagataacgcatgaaagatgtttctagagagaagagaggaagaaatcaaatggtcggaggagatagatccacgaggttttgtctctactttaaagcgcgtgtattaaaaaatatgagcgcgtgtatcgcgtggactgtttttttttctttctgtaatgaacaattgatgtgacaattattttagttttatttttgtatacattgccaaaaatgtatttatcgttattttgataaaaatagacaatgaaatttataggtagctgtaccacatgagagtgaattggatttgcctaatgctagactcattcataggaggaaaacaatatttacaaatagtaagtaggtgatattttgttatacataaacggattataagtttctaaagagtaatttatatttttctccttctaaatgagctttattattagagacacatttcaatttcattgtttacaaaaggaatttacaaagttgacacaagattgtatgtatcactttgtacattttcttagcctaagattaacacatgtattacattctcggtgcttaaacttgtgtattatacgcaaaagaaaacaaataattctttataaaatctatatgaagttaatcttttaaatacatgaattttgttttctaagattttattttatatgcttagaaaaaagcttatctttttgttatttttaaaaaaaaaaagcatacttatattacttaagtaaaaagattgtacttgaattttttattttttttatttttggatcgacaaggcccgatccataatcacttcctattgtgtgggataatgcgatttagtggagtcaaattccgatggaaaaaacagagtcagatgaacgtaaccacttgactaaaggcacatccccgattgtacttgaaatttatatatgtaattttaaaattattagtaactaaatgaatattatatgtccataatatcttctttatgcaaccggttactatcaaacttagtttagtccaccattgcatattctaccgaacttcattatccttaatcataaaatactagaagatatgcataatgcactagtgactagacaagtcatgtgttgattttgcgataaacatgcacgttgtgtcatgtgtgttttcccatttcgcacgcctcggcgttttccttaattatatttgacttagttgcaaaatgatagtaggatacaatggagacacatgtgactattaaatgcagattcatcaacgaaacatctaagtttcttccctctaaatagttttattgcattttgacaacaagaaatgagtaatattctttcactagatttagaaagaaatcgagatcatgaggccattagtgtggtatataatttacatgtttcagatagttatttaaatatgtatttgttgttttaaatcaggttatgataatgtaatttaaatattagagagccaaccaatcatatggggtttcacgcctcaacatgtttgggttgagcaattatagaagacacgcatatgtttattcatgatttcatgttccatatcaatatctatctacacatgccaacacgtgtacgtataaattagtacatccatacttccatacatattgttatgtaacatttatttgttaattgagatatcatgtataacacctatgaaaacaggcatcatattattttatgttggttttatttaatgccaaaccagaaataaaccagagttatttctaccaagctcggtagaatccggttcggccttatactttaatatatttcttataccaaaccggtgctgtgtcctatggaaatcacaagatacaaagaatctaattataccagaacctaatcaagtttcaaaccggttcaagcatagaggtttcttccacagcgatcacactcggttatatgagaaaccggagttttaccggaattgattttcagcagatttggaagatcgagctcgagtacatcgtgaagagcctcagatccatctcggagttcatcagagctggcaaaagaaagaaaaccaataattgattcaaccaagaaacctatgataagctactaaataaaccaaaccggttcagttgtttctaatttaccttatagagagtggtggagttaaccggacaatagtgttgtgagtaggtttagccaagactcctctctccttcaagctcaagcaaatatcgtaagctgaaaccggggacaagctttcgctattgaactcaatcgcattaaacaagcctcttcctcgtacttcctttatgtacttcggaaactgtttcttgatttcattcaattgaatcctcagttcctctccaagacttgctgatctatagattcaaaccaaaacgtgaacttaatattttaatctaaagaacctgaatcgatatagaaagcaaaactgtacctttcaacgagtttttcttccacgataacgtctaaagaagccatagctacagcactagctaaagggttaccaccaaatgtgctgatttcacaaacagaaaaaagaagaagcttaatagcagtcaaaccactatatgctaattcaggtcaacaaaagagcagagtaatgaatacgaaccttccgtgttgaccaggttttatatgaagcatcacgtctttatcagcaagcactgcacttactggaattactcctccacctaatgctttcccaagtatctttcagaaaacagtgtcaagatgctttgctcacggaggaaaccgttaagaaaatgaaataaagagcttagaaaatgtaaaagaacataccaccatgtcaggacgaatttcttcccaatcacaagctagcatcttcccggatctagccagaccgctttgtacttcatccgctatcatcaaaacattgtattttgtgcagagttctctaacagctttcaagtaaccgtcgggaggaataataacctaaaccaaagtcattttcaacatttagcaacaaaaccagcatgaatcttcctatattctagcttgaatggagaagcttactccagcttcgccttgaataggctcgaatagaaatcccgctattctatctcccttttctgcaattacaatagcatgatcaactcagtggctcaagctcaaatcttaatctcaggaacaatactctcatttaaaaattgaagcaggaaacatttcagacctttaaagattttctcaagtgaatccgcatcaccaaaatcaactttaagattccctggcaacaatggcccgaatccacgagtagcatcattgtcacaactcatggaaacaattgctaatgtacgtccatgaaagcagccacaacaagagacaatgatagcctgtcaaagaaactagtatcaaatctttgatacctgttactgcgaataatactcttaacaggaaaaaaaagttgtacctcgtctttgggaatatttttcttttcatgaccccattttcttgctagtttcaaagcagtttcgacaccttcagcacccgtgttcataggaagcaccatatcataaccgaacatgtttgtgagacgctcagcaaataccgggaatttatcgttgtaaaacgctcgtgaacttaaagtgagcttctccacttgttcctgcaatgccttcatgatcttaggatgacaatgtccctgcaacaataaacaaagttaagcattaaaacacaaacaatgagtctaacaagtagaaactctccgcatattgtatcttagagtgacgggaagcggatttggaattgtattacctgattaactgcagagtaagctgcaagaaaatcaatgtatctctttccttcagggtcccatatagttgagccattcgcgcgagaaaacacaaccggaacaggatggtaactgaattttaacacatacaagagaaatttacattaagaagaagctaaagttcataattttcaaattctaaaagaaagaaccaagcatgggaatcaaattggatatgaaccgttacaataaaagattatcagctttagtcatcatcatgaatcttaatcaataactaaaaataaaagatcaccactccagttaatatattctcaagtttcagaatcatgagctctatacagctatggcatgtacatatatacatacaagtccgatcgaaccaaacaaatcccaaatatcaaaacttttgatggaacgtgcaaaacccagaacccaaaaagaggaaagaaagagactttacttgtgggcactgaattcagattccaattccatcaatcgttgagaagaagacggaggagatttggaattcgattgtggcagaccgccatagctccgccgcactccggcggtagagaatcttttggacacatagtaaagcaaccgtctcgtggtggctgccattagagtctttcagagaatgaagcaaacgtttttgttcttgtttccctctgtttatctaatatatttgtcctctgttcgttcgttttcctagaaaatgatcgttttctgactttctcgggatgggcaaattttatccgaatactaaaaatatggtataaaatttatttacggtttgatttcggtttttctttttggttgaacaatgttgtaactttattctacttttagactcaattttcaatatgggaattttttattttattttttcattaaccaaatatgggaaatttatttctcaaattctagcttacaatctaggttattcgaataattccaagtatattaaaaaaatcggatataagtgaacctttttgctttataacatgagtttgaaaattacaaattgtcaaatgttgtttttctctcctaagttaatccaagacttccccataatctcttttttttttttttcttcctatttaatgctatactttaattacttatgtgatatgcaatagagagattagaagaattgaacttggtaaacacttgatcgaaattcacatttatattagaaaaatggaaaagcactttaaagttgcgtaacgtaaactactacatgaccatatatgatacaaaaccttccaaatggatcaacatcaatctttctactaagaaacttatcttcagtggtcttttgatcaaaacgatgctcaaggtactatacaattgcaacaactaaactattattcatcacactcgtgaaacccattttttacgaaataggaatataggatctgctaaagatcaacacacccgcttaaaatcccgggatgtgttagaatgttaggcttcaaccgcaaaagctaaaccagaaacagtatatagaaatgttgtgggtttccaaaaacctagtattttgggtttgtcaactaaatgccactctcaagggaatagagcaaacgctgaagccaaaacacagcagaatcagaaaaccgtttgaagaagtaagtattgtggttctaatgcaacaatcctacggtgccaacctagccagcgccgagtgtcaggcttatcagagaaatcatcaaaccgcaaaaaactatattgtggctggtttttgacagcctagtatgttgtggaacctcagctttataggacaaatcccaagcccgaagtgttcgagcgcaaacgctagcataatcagaaaatctttttgacaaatgctaattttcatggagagacaacctaatatgtgggaatggccagaaaacacataacattcacaaaagcttgtcgcagcctggcaggttctaaatatgctacaagcactataagatcatgatttaagtttaatatagatgatcagagttccggggagcttatctgggaagagaataaatcagaaatggtaacagaggctaagataaagaagatcaatcagtggagtttgacctaaagatagtaaaatcgtagcagagaatgggatgatcatcaagaatgagaaattcctctactgatactctgataaaccgatggagtttcaaataatcagatcgtaagatcaaagcactaacaagttcaaacttctaagaagcagaaacaaatacgatcattaacaagaggagatctaaaggctactgttcttgaagatcactatgctataataacctatggctgttcactgcagaaatttatacagaaacaccaagaactatgatatggtgagtatcacttggcatcacataagaagctgagaagtgggatttgcagagtcggtaaactaacacataactgataggactgctgctttggactaagaacaaagcagatctgattccacatatggagaataagcaaagtttgattgatataagaacgattttgttttattgcacggagataagtagttatagtacgaacagctcgcaaggaaaggggaaaagaatggtcctgaaagactataaaatgtctagcacgagaaaccaaaagtaactgagtcgagatgagataccgaaatgtttgatgagagatgcaaccatatctaaacatgagcttgatggaaggaggaaagcctgagaaacccgatcaaagaaatccactgagaggtagattgatggaacacacttccatggaaaaggattaaggggcagagcaaattattcaagtggacatgataaaagcttggaacaagttctctgcggtacgcttctgttcagatgtcccggaaatgagagcaacgcgaccgccatgggaatttttggaatcagaaatttctatcatggctcctgatatctgagagagagagagagagagagggcacataccatgtgaaaatgttatataggaaagagggaagaagagacgaatgaagctatggcaatcagagagtaatgaggaaggaaaaataaaaataaaaattaaacaaacccttcttatgttgtccaagttgcctcctcctctgcccataactttacccactgcatttgctgggattcgaacctccatagtagtagactgaggcaatctgtgaattcacaagataatcaacagggaaaagagttgaaaatataatactgaacaaacgaaactaacttgcaaacttaccctccatatagattggatgagtaagaggagttggatccataacttgtattgcccacctgtagttagaaaaacttaagttataaacacagaaactgagatcatccattttgagcagaagaaggaaatgttaccggaaaacttccataaccatagattccaccactcgaaggaagcatgctcatgctgctcccggtttctggtctcctattgaaatctacagaagcaacttgcggaacagaagacatgaaagattgaggaagtgcaagaccagtattactactacttgaagagaagaaattgttattctcagatcttgcaggaggttgattcctggaaccagtctctctatcccttaaaacatcatctcgaagcctcagaactatctgaataagagcatctctcacattgcttacttcaccagatatctaataaaagtaagcaaaaagaatcatttacactattggagaaattgaagaattgaataaaacaaagctgaacgaatctaagaatcattacctcaacgagctcatcattgggatcagcacacttaggcgtattatttcctttcgagatatgaatatcggcctttgtccttttcctgatttcacttatgattgagccacttttccctataatgcatcctattaccttagaagatacaaggagttgcattttaactttgtcctcgtcttcatcattaattttctcttgaagtagaagaacagcttcaaccgccatagacttcaaatcatcaggagactctgtagcagtgacagtgataacacagtcatcatcatgatttgtcctcgagtcattaacttcgatatgagacccgcttgcttgtcttattcccttaatggttaatcctcctttcccgataacacgaccaattttggaagaagagcaaataacttttatagccaacttttctgatctggaagacccaccaaaaccatgaacaacaggaagagcagaagcagaaaaaaccggcacaggatttgcagcattttctccataaccctgaggtagtgtaccgataaacgatgaaacattagccccatgttggaaaatagaatcctgacttgggtataaaccggcttgtggatagatagacagatcagagggaattataatactagcgggaacttcttggacagttgtatccagaggaatctgttctcgaggactgactttgtacatgattgcagaaacagcgaaaagtgccttcttcacggattcagtctcaccagatatctaaataaataagaataagaaacatcgattaaaataagcaaagaaacatatgctaacaaattctactggaattctgatactaaccataacaatgttgtcaaaatccatggcacaagtgtgagaaggatcagaaacatctttagagacaaccttaacgttagctctagttctacctctaatgttcttaataatcgaaccagatttaccaatgacaatagaacactgactagacggaactaaaagacgacattctctaaagtcatctctatcaatcttagtgttctcagcagcagtagctaaagaagccacaatagcatcatggactttaagaagagcagcttgagcagaacacaaaggaacagagtaatccaattcactatactcaatgtcaacaatgtctttcttctccgaaaccgagcaaaagatcgttatgactctttcgctacaacctggaaaaggatcaacaactttgatcctagctctagtttcttgcctaatcaagttaataactttgccacttttgcctataacacttcccatgacaccacttgggcataagattctgtaaacaacaacgagatcgtctttgttatcgatctttttttcttcggattcgtaagaaagtcttctcctttgattccggttgttgtcattgttgttgtctctgaaacgattgtgagtcctcttcccacgctcaaccattgttgtctgttttgcaaattacacaaccctaaaacagagagacaaaagaagtacaattgatcaaaagcagaagcaatgtattctatcgatagagaaatctgagaggaaccctaaaaaaaaaagagagaaatttgagaattgggtggataagaaaaaactgaaagaaacgatttttatgattcaatttgaaaattcgttaattggattatcaattcaagcgatgaacatacatacaaggtgatagaaaattctaagagaacttcaatgaacagcgagaggcctctcgggagagaagaaagaagaaacttttgttctaaattgtgttagagagagaaagagaaagagaaagatttgtgattgtctgatgcagagtagagagagagagagagatgacggcgatgtgttaaaagagatttttactttgattgatctctttcggttatatatagttaacaataatataatatgaagaaagtccctaacttttgtttagatttggtgtttagcccattttctcagaaacaatattgttaaacctaaaatctacttttaagttttaaggcttaaacggttaaacttgtttaaatatttattgattaattacgtttagattttgattctgcaaaaaaaagtacttcgtttcacatgttatttcgtataaattaatactttatacttatctcgtatactttaaacttgtcttcgtgtaccggtttcatactataataagtaaaataactatgtaataaaactaatttaattttttttccaccaaaaaaaaattagtttaaattttaatcgcgtaaacaacatatcacataacagtgattgggttatgggtatttacaaattttttttatttcgttgagactaaaacgacgtccttttagtcacttttactcctaaaattcttaaaatccatttgttctccttaaatcttcgattgctctcaaaatcttaatttaaaaacgaagccgaaacaacgattctcgaaaagatc

SEQ ID NO: 842 - DNA, 14139 bp, Arabidopsis thaliana
aacgaattcgtacgaatgatcattaataataatcgactcgagattgacttcatttgcagcatgtgttgagagtgtagggattagaagtggtgctggactatctttagacgttcctacacgttggaattcaacttatgatatgcttgtcagaactttaaagtttcgtaaggcatttgctagtttgaaagagtgtgacagaaactatatatcatttccttctaagtatgagtgggatcttggagagagaatttgtgaccttttgaagtcgtttagtaccatcactgcctacttctcaagtgtcaaatatcctacaactaatgtgtattttctgcaagtggaaaattgagtgtcttttgaaggactacgcaaactatggtgattttggagtggaatagatagttagtaagatgtagttaaagtttgataagtattgggatcaatacagtatcattctagctatgagagctattctagatccaaggttgaagatgcagattcttaaatcagcttataataagatggattcgagtagttcagaagaaaaggtcaatgttgttgtgaagagtttgaaggatctttgcaaagaacacatggaaaaggcttaaacttcttccaccttctcaacaacacacactccacatgaacttctttcagtttaggcattgttctaaaatactttgtacgttagtcgtacggtagagtaccatatagcgtatagacagtgactaactgatattattagttctttaaaattttcactctacatggagtataataattgatgtaaatattttttaacattaacatgaattagtaataaatcgatgcaaattatatgcatctctactttaaagtcacttatttaagtgatgcaatttttttttacatcatctataactaatgcaaaatatataagaaatgatgtaagacaatcttttttttttgtattgggtggatatttttttttgtttaaaaaattatatatatagataaaaactttttgtcaagatatgcatatgtaatttcaaaattataataaattaaaacataagtataataatcatgatgactactatacatgaatataataatcatttgtcaagttaaaaaatttcacttttctaaaatatttttaattttttaagaaaactactaagcatgaaaataattaaaaacagagaccatatttatgcatgtagaagaataatactcttatcaacattgtccaccaggtcctccaaacgtaagagtctctctggaatcataatctacatacttgagaaacattacaccataacacttacgactatccacatactgttctacctcgttggcattaatatccacaactgaataatccgaaagaacatatttaagctgtttcatgaaacaagaccgactcaaatcttttgtcggaaactctccagttcccattggtgggcttgtcgtcggttgagacgatgcagtgtttcctgcaaatccaccgaagtatacttcagaagctccatctaccatctgactttgacgtggccaatagcctatcattatggatcctatcgtcaatacccaatttttggtcactggatcctgcatttgtacatacacatacatagcttcaaataatgttgactaaaaaaactaaaacttttttgaagtccaacgtacacaaaaagtcaacatgtaaaacgagataaacaagtaagactacatttgtttcttaaattagggttttaatttgtacctcagcaacagaaagatggacagtgttctgttttcctcctagagcattaactttatcatacaccaaaccggggtagattgatttatgaatttgaacataacctcctggacataacgcattgtaacatccttttggatgctgatctgactgtaataatatagaaaatatttgattatgctcataccaaaattaaccaaacatatgttaatcatgaaactcgagaatatatacaggaaatcatcatcactcaccatccaaaacgtagttagtcttggacgatcgtctgaatataaattcgtatgcacctgtagtgagggatcgagagagaagtttaggggttaaatctgaataagtgacaatcttagttttgttaaattgatcaatggagtttgaagtaaaatacttacagcccaaccaaactggatgctgctcattaagcttccttgaatgtaattaagccaaatccaagccttactaaattgattttgcaccactcggggcttgttaatattgaacaatgcttgtgctccacgccatttctttgtcgtgttttcaaatgtcctaacaattgcatactacaaaaaaaaaatcaattactcatatatctatttatactattaagataatcatcatcaccaaatatgtaaagtggtttttgcagcttgagggtacttacatgtagatgtgtctctgtaaataattttggctggtggtgaggaatcttatttttttgagacaacaatgcagaagggatcatgagtttatttttattttttttacgtcgattgttctttttcttctttttatccctgcgactttgtttcaggatacggcctgaaataaacgagaaaacaaattgtagtaaaagttaaaaaaaaatatatatatatatatcttaaagatttaaaaacaaatacagaaattctaagtttctaaccatttcagaatagaaaaaagtgtaaatagttatatttgtgttcgtaattactagttcaaatatttagttttatatattgttaacattgatctttttatcaaacatcgttacaaattataaaaataaaagtaattacaaagtatatgtttattgaagatgtacactagacgaagaaatcaatataagcgtaaaaacaaaatcagccctatgtcaaagttgattaagacaagagtacttacctgctctatgaatttgttggggatgaataagactattggttaagttggttttttgtttatgaatcggtacttgtccctttggacattcttctgatcccttcaaatcaatctctctgagtatgttaccattggacgtagagagtattgatagaagctctcgacttggtctagtctacaataacattaatttaggttttattccaacatatttctttataaaacatgattagtatgtttaattatggcaaatgaacaatacctgtatgcgatgattcttcattagaggatgttgtagtgcagattgtttgtctatagagacacattcgaattcgctttcttgatgctgcaatacaaatccagcaatagcaatatgagaatttcattaatgagtttagtataccaaattacttgttaaggaacataccggagttgatttagcgataacattgaggtatattagacttatggagattaacttcagccaaagagaagccattttttgtttcctttttctatagagcttctgtttacttctcttttgtttttatttttttgcttttgattaaaaaggctttgcattggttacaaaaataggaaatacccgtcttttacggctaaacaaactatgaaacaaatttaaaccatataggtaggtgcgggtctttaagggaaagggggaattaaatcgttagcagttttgttattgactaacaaaatccattttgaataactaaatcaatcgtaaacgacagtttcattcaaaattgaatttctatttaagggttttagtttttttgtttcttttgatatggctacattaaaatcactcacaaacattcatcatatatgtaggcaaacaatccttcttcctagctacctctcatgtctcatcaactttagctaaagacaaataaattttataaatattttaattttgactagcaaaaatattcgtaaacaacattttcattcaatttttttttcatcaaataattatttttttctgaaatccaattttctttacatagttcgtttactttcctactacagtatgaaacccgaactaaaaagctgtggagtcactagattgaagcagttggacgatgagtcaatatatttccatttttcttaaatgtacgtgtagatacatttaactatttcacaaaccgtagtatgaattttattcaattgtctttcagttgcgtacaatattgatcagccatagttaaatgtcgttagggacgttcatcaagtaagcaatttgattctctctgttctttctttagttatttggtagtggtaaaaacagaaatgcctataatgtagtgtaaaaaaaaatccgattaaacttaagatttaattgcctaaaaacgaagaaaaagctctaagaactatctccattcaaataaaactcaaaaacgaaaacaaaatggaatcagcacatagaaaaccctcgaagatatataacctatcttaggaactttattggaagtttgaatttttttaaaacaaatcagttatttttgtagggaaacaaaaacatcttttaagttgtataaaaatctgaaaacaaagaagtcccaagaaagtatgttcaaaaaaaaaaaaaaagtgagaaccgaggaaaagtgaatcaaagtaagaaatagaacttaaggctgtacataagaacgggcggaacagcgagaatagagatgattggaatatcgagagttctttttttttttcaaactgataagaaaatttcggtcatcgtttgtttgtcaataaatatacaaaaaggaaaatattcaaaaggtgtgtttaccaaagagattctaagcaagataattgtatatctgagggttgcttttttccctctccaaatattctcgatcgatcaagctctcaatcctcttcttcagatcagcaggctttatcgggaatttgagctgcaaatcacaaacatatatccattcatagcaatggtatattaaatttagtagactactgagaactctaatcatcatcacgagtatattaccaataggactggacctagtaacgaatttcatgctttcttttttcataaaccgacatgttatttcggattttaaaatcatcaagcaggagtgaaatttacctgttggaagagctcagtgattagaagagtatggctcaagacttttcttgtcttcataatacgaacaatggctgcatcgatctgtaagagaagggtgtgatggggaaaaccattttgtcaaaatcttttcttgtttaagaagccaaagttgtaagaacgatttcagaaattagtatcgtaaaggaaaatggagagcagaaaccaacctggtattgtcggtcctggaatactctttccgttgtacttgtgttctcctctactgtctctttcatctggatcgcatttacctgcacccaggaacaaaagaaagaattgcttcactataagctacatacaaaacagtatcacaagattctaggatactttaagtgaagagaccaagaaaaaaaccaacgtaccttaatgcgatacagcggagctgcaaactcatcattaaattcaaattcatcaccgtcttctacatctcttcccttaggattctgcaaaaatatttacacaataaggcttatccttatggaaaaaggcaaagccataatctcggcagtttctgcattagctgaaaagagagttaacagagtccagattttggccaaaccttctgcaggacacggactttcccacaagcaagcgactgcaaagtcctcctcagctccttgtcctctatgctggtggaatctttaatgtcttcaaagctaagtttcattgcatcgttaaataacattaacacaacagcctgagacaaaaagaaaagagcaattgattaacactgtaacctcgggaagacaggaaagagcttaaaagggggggggggggaaaaaaaatttgactgacctgaaacagggaaacagccagctcctttttacctttggagaaatctgcctttaaaacacagtggcctaatgaattttgccacattaacctcctaccactgtacttgcttaaatagaactctttgaagatatcctacgaaacatacagatagcttagaaaaagcttgtaagaaaacgtccaacgaggaaacaaaaaaaaatacataagaagaacttttagtaaaacctgatagacatttagttcatgaggaagcttaacatccataggcggatatgttggccagtacctgtattatagacgggaagttaacaagctttatatatgtcatgatatccgcattccagcagttatatcctggataaaattgatacattgtacataccctgttgttaaaacgtggacactcatctcaattcccgatggcagttttgttctggcctgggaagattgtttgaatgactcgttgatttcctttgacaattcaatatcctggagaaaatttcaataaaacggagagttcaagctcattaggattattgtaaatgtacacaagttcattaaaataagtatggagcaggatcatccgccaatcctgtcttagattggattaacaatgaatatgtataccggggtatatcgtaaaacgtaacaaaatataagatcattaagtttgttccttagtaaaacttaaacgaccaacatcttttttgaatatagagaaggagaagaaaggataccttgaacatcccttcgagcttgtttgtaaactggctaccacactcagtcttaagctgtaggtaaaaccaaggttgggatcagtgggtgagaactacagatatagaaaacaaattgtgggaaagggaaacacccagaatataaatcagtttttaaccttagagatcatggatttctcagcatcgattgaagcactctttcccaacaggagtctcttcgcaagatcctttttgtaaaatgcttcgaacacatctttaccctttgataaataataaaaatccatcagcaaaaccgatatccagaagatcaaatagctggtttacagaccatgcactggcctcgaagcagtgatttacagtgacaaacacagtactaaatgtaagaaattagagataacctggataaatctgaacaaaaccaagactttttcaagaacactctccaattcttcttcagaagtacccttattcccagcacggagtttctcgtccaaaaacttggcaataagctcagctggccggttctgtaaaaaagattatcagcataagatgtatattatttgggatgcttgctaaatcagagtatttggtatccaaagtgatatatattagcaaacaacactactgtgatcaggtccagtgcccacaagaagcttgatctcaaaattatgtttgaaaatagtattcactgcccaaagatgtctccaaatcatagcaatacagtgcttaatcagtaacgaaatctatagattattataaaatataaatttctcgatttcacaattgtaatttaaggttgacatttccacaataatcagtatgttgcttttacatgaaagtaaaattattagcaagagactcaggcaataatcaagaaaatcactatttgatacctgtcgaagattaatcagatgctcaaacgaatctttgattgtgttaccaaatgattcgttcttgtaaaagctctcttcccatattatgtcaagagaagccttgaagtccaacagtgattgtaccatatctttgtctttctcttcatccataacaatcttctgcccagttttccgaacatatgaacttagcgcctgcctcagagactcaagtgcattgaccctagaaaacaaggtttgcatcctctgaaggtcctccgtacgacgtccatccattaatgttgtaaaaccctgaagatgttcagaaataaagtaagactacgacaaactaaaattggataatatgcaagccaacacaagaataataggagattggaaccttttcaagaacaacaagtatatgacgttcgagaagttgcctttcaacagttgtgatcaatggtttcctggttactgcatctatgtagagtatgcatctctcattctcttcatgcaaccttccctgcaccaatcaccagtagaaaccttagaaagactattaacctgtagtgcagctaatcataaggaaactatatgaagtcatgcaaggcacctcaacatgcttcaggtactccggaacgtcagactgctgcatgtatttcattccttcagcggcataaaattcagaggtcccttcaaggaaaggtttctcaaagctttccatataaattcccagtgcagtaaacatcttcaaaagatggcttagtagagtcctattaacagcttctgctaacctgcaggaccaatatcatgcaagaaagttcagcagattcagatgaaaacattatccaatatataaatgacatacactagtcctgatttgccttgaaattttacctataacaagttatcactgctagacaggaatagttcatagaccatccaaacttaccatattcactcaaaagccagaaaaataagttgaggtaaagtggctttatgaaattatattctcaatgtgataaatcaaccctcgtttaattttggaagaccagaaggttaaaaatttacctttctttttcaatcatacttaagagacctttaaccgtcctctgctcaacttcaggggccagagaaagatgcttccggaaaagctgcaaacccatctcccataatgaacgtacatttggattctgtatcacatacttcctatccagagtcaaggctatactacgaatcatgagcatctggtcacaaaagtcttgccagcatttctcaacacgtgacaagaaaacagtcagatcagtgttctgcccaactaaagattgcaaagctgcagagatgtgttcttcacactccttctcaatctggtcataaagctttccatccaacttatgcaagcaaaggttatcaacagcctgaaaaaacaatcacaatctcatcagcacgacatttacacatacgaataagaaaggaagtaagtaaatttgcacgtaacctaacctggtaaaggctctcgaggtcaaacgaaattttttttttgaggaatatagctctgatagctgactgcaacttctcccatgtattctcctcaaagtttgttggtagagttggtttggcttcacatatataatacaaatggtacaatcagaaccctaattatgaaaacacttttatcttcaatttgctagccagtcacagtaaagatgattctcaagatgttttctaatggcacaaattaggtttggtgagagctaagccaactagattgtgcacaacaaagattccggatcttaagtacctagatcaggctagacaaagagattccaacttagaagaaatacaaaaacccaaatcactcattcacatcaaaattcaacagtcacactcaattttccactgtaatttaacatcaaaactcacacaaaacttccatcaatcgcaagccaatgaaaaccctaaaaatcacgaaccttaacaattgtatcatttcaaatcaatccagagcatcaattgcacagtagagtaaaagacccaaatcaaatcctaagattacgatcaaaatcgtaaagatgaaagaaatcgaaatcgagcgaaacctttattgagcttgattacaaacttcttagtaggttgcggaagtgtagctttcttccgagagagattagcggcggcgggagttggatcttcctccatatgaaagccaacaaccttgtcggcggtattagggtgttgaggggaatggtggaggtcgtttttggcctttttcatcggaggagaagagtaagaagagtcgtcggaggcagaagcggcggagaaagtagagcgtttggtaggaagagacatgaaaatgggtgaaaattgtgtgagagaatcacgaagaggaagaagaagacatcaatcctaaataataacaaccctttctctctaccaaaagcgcactgtgcactctctctctttttttttttgctcaaacctacgcgaaaactcgcgatttagacccgacccgagaaatgaagattttttgtttatttatatactctgaataaaatcagaattattttatttatacattcataaatcataattactatatgataaaaaaaatattattgataaaaatagacatataccgcaatgattagatgtgcgttgttttaatggttactaatcacaaaagtgaaaaacaaaaaaataaaaaataataatcaattgttgcctgttttgtatggttattttttataactacttttaaattttaactactttttatttttagtttttgacaactgataaatcatatctattgtatatttttagagtcgaatttttattaagtcattttacgatttaaagaataaagaatcgatcacacgagtcgatgcttgatatttagatcatttttgatatatatttttatttttattttaaagaaaattgagttgattttttttccatatatttcttttattttttaaaaaaaactattttaaaagaatatattagaataaaatgcctataaaatagactcacctataacgtggagaatggagataaaaatagagatgattaaatacttttagcagtcggtaatttcaggcagaaaattgtgtgatgttaaaagacatgaacgaagaatcatcacttgacaatatgaataaatataatatgatcgatgtcatggattagccaatgtggggcgtgttgacttgctgctccacagggtttttggacttccggtttagggtttggttctgattacaaaatatgggcttatcaaattatttacaggagttaatactttgggcctgattacaaaggtttaaccgaagcctatcaagcagataagagacgagatgagattgttagagcatctccatcggcaaaagtggtagagagtatctcaaaaagtaaataaattaatattttaatcaaattaatatattttaattagtttgaagtaaatgaactattaattgaatgacaactctcaataaatgctgagaatagtctctcttgccagtttctccacttttctcttcttctctcatactttttctctttttaattattatttaattgatgagtatctcaatcagatattccgatggagatggtcttacaagtgttaccgagacgtaccaattggcgaactcatataacttgtgctgttgtgcgaatgtgttttgattagtgagggttcttgggccaaaaaacatggctggtttttaagtcgcaattgcaaggatgaatattattacagccacagcctcaacgactgcatggtcttaaaactttttattacatgttgattagcctatggaattgtataattactaatacaaaatggtgttcattacattctcacctcgcttaaacttactaataatttttttttatttctttaatccctcattaacatgtcaacacatttattttttctttattcatgtttcaagactatagaatttctcaattaatcccaattgatactaataatagcaaattgtaagtctcttggatcgttggatcaatattttcacatgcaaacatgtgaaaatgaggagttattgaaaaattgtaagcttgacataaaacaaacaattgaacaattttagctttgaatggtttgtacatggaacactgattaataagattgcggattaaaaccgcttctgtttcaccatttatatattctaatcggtagtcatgctgagatataaaagtaaaaataaaattgttgtggactgttttttcttccaaaatttacatcgtaataaaaatagaaatcttatgcaaaaattataaagatttttttttagcttttactaaaaaataaaataagatttgtttttagtaacgctttaccttaaaaagctgctagagtttctaactttcagtttattatcatcagcacaaactcttatgaagatcttctatttcttcttcatcctcttcaacaccaatcactctcaccaaaaatgaataataaataaaccataaatctctcttttatccaatgggaaaattcatcacaaccacactatctccaccgctctatgcccgatcaaagcttctctgtttttcacttctctacttattcagtacaatctttctgttcctctacgtatctctctcaagaaaccaatgcatctttcgatattcgccatttgatccgattcaagcaaaacttttctcttatccttcttcttatggtgaacataaatatgctcttcccactcatcgatcttcttgttcttcccctattttcttttcaggtaattaactatttcttcatttaagaaaaataaaataaaactatttcttcatttttaatatttttactaaattttgatttttagataaaataaactttttgatcagtggccatggattcgcaatgtgagtttcaatattgctggccactagaattgctttaaatagcaaaaatatcaaactgtgattcctacattttctcaaatttctatgactaaacggaatttcacattatgtttttttgttatattctttattatatatatttttcctgaaataatcttgaatatgtttatcttgttttttaatgaatcagattattggacagtgttgaaagagatacagagtatcttgagcggttcatcaccaaaggaaaatttgagatatatcaatggaaaaagtgaaagtttcggtggaaatttcagtactcagaagagattttcttatttcaatcattcgaacattgacgtcgaagttccatgcggcttcttcagagattttccggtcagcaattccggtgagatcatcatcattcaagtaaaaaataaaaatatgttaactggtttatgagctatacaacatttaattaagtcaaaactctatacaccgagtaaaccggagaaaatcaggatcataacggtataaatatagtttgatttttgttttgttttgtgtaaattagcaaaatctttaggcatttattcaaaattaaaaatcatgtacgtaacgcttgtttagtttcttgtctattagttattaaattttatttttcttcataatatcataaaatctgttttgattatttttttctctaatgttttctattttggtagatagagttgagatggagaaatgtggactagtagttgcatcagccatttttaacgaccatgacaagataagacaaccagtgggacttggagttaagaccttagaaaccgtttgcttctacatgttcatcgacgataaaaccttaaattctctcttccaccacaatgtcatcctgaaaaacaatccaagtgattatagagttggtgcatggagaatcatcaaaatttcgaaatccgaaaatctataccttaatccggctatgaacggggttataccaaagtatctaattcatagattgtttccaaactcaaagttcagtatatgggtcgatgcgaaaattcagctcatgattgatccgctacttctaattcattcaatgttagtagtgcctgaagtcgatatggcgatatcgaaacatccgttttttgttaatacaatggaggaagctatggctaccgcgcggtggaagaaatggggcgatgtcgacgggctaaggattcaaatggagacttattgtgagcatggtttgaagccttggagctctagtaagttgccatatcccacaggtaataaaaaaatattccctaataacgaacaaaagatttcatttttctatggttaattaatgatacattagttgtctttacccatatataggtagttaggtaagcttcaatatacacataaaaaatctagtagtttaatctcaaagtactaattgttagttgtgcacttatctataatctatatatgcatagttgatagtagactcaataatcatgttctgattatatcgtgcaagcttatgcatagttcgagtctgagttcataaatgttataataatatattgatctatataatctttagaaaaacatataccttcctttgtctagaatgttggtgtacattactttgcattaaagactaaagagtcatgtcttatgcatgaagtttggctttaattggttaggttatgtgttctttttgcccgtggcttttaaattcgattcacgggtaatcatgaaaaaccttactttcaatgattcaatttgtagaga

SEQ ID NO: 843 - DNA, 87434 bp, Arabidopsis thaliana
gatcacttaattgatcctttagtagctgatcgggaaatataagttatcattcggatctaccattcaaaaattcataattttgtatatatctaaatattgtagaatttacactaaaatttctatacagtatttgtatgtaatattggcaatataatagacactcagaaaataataacaatactaatgtaattctagagttttttattgtcaatttcatagtaatatagatgacttttgtgattataatatacaaacaacaaaaatttgcagaataaaatagcaaggaaaactagttttcttgcttaatttctagctgtaattttgttttatttgtttgattgttggacatattcctaaacagaataaaataaaatcatagttccaatcaaagaatcacgacgtggtcccgtataacgcatcaatgagagtatgagatagtgaaaggaatgttataagatcaagttagggtcccaaacacaagtggtttggtggttttggtccgtccaagagaagattattacgtcatttacgataaatagatgatactatctctgcaagtttattttcattggattataatgttcctaagaaatctgatttctcatgttaattgttatttgcactagatgtaccagataccgcgttgatactgcgaagacacggaatcagaagcaacctattctcgtgtttcatgttcaacgagttagaagcgtttaacccgcgagaccaattggcgtttgcgtttgtgagggatcacataaacccgaaggtgaaaatgaacatgtttgaagtcgaagtgttcgagcaagtagttgttgaatacagacacaatctcaagaagattgagagctctacgtatgaggaacaagaagaagaacagaaacaagaatcgttgaggacaatacaaaagagaagaaaatggctagatcatgaatcttggtctctcaatcgtagtagctgtaagaattatctcacggatatgtggggctaaaactcataattgatttttttcttttattatctttatagtgaagtccatatatatgtatcaatcggtcaatataatttcattgataggttaaccaagttgtgtgtatcaaactatcaatgtatgtacataatcatgtgtgatatctaatcagcataactggaaaaaaatttaactataaaatttgatttttgtagatatgtggaaaattttattcaatatctaacgttgtgacttgtgagtgcgacacactaacacgcgtagaccatcaccagtgttatttgaaccgaaccaaccggttttatatttacatcaaactcattctattataatatttcgaaccaaaaacacgagaattatatttaatcttctcattttcttactatttttggtttataagttgtagcaaacatgcatcaccactatctcagattttccaaaggaatttgtttgttttttaattatacattttgtctttctatattattatttttataaaatctctaatggaaaagatgcagaaatacaaatgttgaaaatagaacttagctaaacaaaaggaattataaggaaaaaacaaaagataatttagctaagcaaagtatcatgatggtgagcgttgacaaatgaatcattcgtcttcttcaaaagcagtgacggggaaagtacgtgatagtcccgtaggattagcaaaagtgatttgagtcggatcttgatgattaacaaagatctcagagatcgtaacccaaatcaaaatctctttgctcttgattcccgtgagctgactcatccgacgattctcaaggatcgcagtaacctccgaatcgtaagatacgtttcgtccaatggctttaaaccgatgttgaaccttgttcttgatcttgatccagacataaccggttgatttgttgtgaccgatctctgtcatgttgtctagaggaagaagacctttgggtagattcatggttgataaaatctctttggctttctgtttgcagtttgattcgccattgcagatctctgctccttctctttgatctgatttcgtttcttgagacgacatttcgatgagatttgtggtggtgactttttggggactttttgctggatttatatagaggtgtgagttttggaattgaatgacgaaattgggtctgtggaagaggaaggagaatagtattagagagggtaacatggaaatttcgtataaaatgaggtgggacgcatgcagttcatgttcgtggaataatttattttattcgttgattgaatataaaatacattcgagaatttcttattttgatttttttttattacaaacatgttgaagtgtttaaatttaaaataaatcaaactgaatatacgcttaattttctgaaaaaaaaatttcgtctttttaataggtaaatttcttaaaatctttattgataatagagaaaaataaaattttcttgatttatcatgtgaaacaagttcaaagcagaagactcgtgtagaataatgttttgtgttcaaacagaacggtatcaatgtatcatagtcaagctgtgaaataagattgtgtttttgtgtcaattaatgtcagttttgtatactctgcttttgataatctagacttttctatgaaaccgggtaaaaatacattatctgcagatatacatgctctataaatgaagtcgagttttcaaactcaatttgatgaaaaatacaaatgatcaccatcccaaatgacatctaaatcatcaatctcagcgttgtccgcattggtgatctttgtgaagttgcagcctccaaacttctcacttgcaagtcttagaagctcttctatggatgatggtaagagtatcaacttcccgttcttgctctcagacatcatgtggatggtaactctcttttcttctcgtttgcatggcttgatgatttggttgcttgagctgcaatatggatcttttttcgatgaatcgttagcgtaacttcttccagcggtttcactacttgatctttccactttggctctctctatcttttgttccttaagtatcttcttaaccatttcagtatcttccttgtgaatcgcatccattagagcagtgtcggaagtcggattcgtaacatctaaaccatagccatcttttcttgaatctctccactcttcccatcccatgcttttgaaatctctgttttcgtgaccactagtattcgaatcatctattgctattgactgttgccctctaagtttctgaaagttttatagccaaaaatgagtttagagtttgttttaactatagaaacatttctataataactcacataccatgaagagattgttcatgatgactcgtccatcgtcagcatgagcatgcatcgcactcatcagcgatgttctgcttatccgcagtatttgagatagctcggttgttcttactgtgaatggttgtggtctatagtataaaactccaacctctccaaatgtttctccaattactgctttcccttgaaactgatcatgtccatcaacgtagacagtgaagtcctgtacaatacacaatgttacaagattcctaactgttattcacatatttacatataaccgatatatttcactcaccactgctcctgacaccagaatgtaaagatcagtaggagcttcgttttgtagaattatatcttcttttggtgggaaatactcagcgtctatatctgaaaccttgaacatgaaaaggtacatggagttggtcacctcttacatattaaacgttaagaaaaaaggttagagaatacaattttaccaattgaaagaggaagttacgagaaactccttgaaagaggtaaatgttgtgaacaatggggaagaataaatagtttgcaatgcttgaccggattgcttttggcagattgttcaaggtctcttgttgtttcaagccctctgttttgaactttaagcaaatgtgtgataacatttgatcttgtatgtcatgtgggagttgatttcttgaagcaaactctgaagcagctctcactgaatccctctgtttaacacaaagcaataaagcattacagattagtaatactcaatattattttagtcaacttaaaatactcaaaagtacgtaaaccccacgctattacccgaacctttatccgaaatgaacatgcctagactaaaagaaagtgatcaaacttacaaaggttctggttcggctagtccaatgaacgacgaggttggtcatatttccaatgaggtaagctgtcaaaccgaggttgaacatcatgaagaaaatgtcaaaaagcatttctcttgggttctcagcatgaaaatctccatatcccgtggtcgttaatgtcgtaatggaccagtaaagagcagtcacatatctattccatagacttgcttctttgaaatttggatacacagctccaatccatgtctttcttggattaggatatctatctgcaatcaggtagttgaaacatccagcacaatgtatagcgaacaaagtgacctgagatcaacaagcacgtgtaagtcactagctttaatatggtgtccatttaaaagacaaataaaccctaagaatagatcacctaaatggacagccctaagcttaaaatgctttattataagtgagattagttttgctctgttttggaactaaccgaaatgagttttgtgcaacgtatccagaaatagttgaaacggatatctttctcaagcctgaagcaaaggtaagagttagttagacttgagtaagcactttcttagttaaaccctaagaagagtatggtctcttagttagcatagaagcaaaccttgcaaatagcgagctaactcgccggagacgccataacctgagcatgctaagaattctgaatcctagttcgcttccgttgtagttaaacaagaggcttagtggctgaaatggtgctgtggaacaaacatcgaaagcgaaccacgtcgaaaggtacctgaaaatgttacaatttcaaaacatactttgagattctcattcacttataaaaggtttcaagttaagaaaaaaggtttctcaccttattgctattttcttaggactgtcaactagaagataggagtggctatcgagataagcgacgaagaaggtgagaataatatcaatggcgaagaagccattaacaatgttgtcgatgatgaaaatcgcgtcttttttataggtgatgaaagcaaattgaaatgggcaaatccaagctgagtaaataactagtaatactagccacatctcccacgctctgtttcaacaaacagaggattgaaaacagagtctttaaatatacttataacgtgagtaaaaacagagtagttaaaactacttataacctgaatagttgaaaacatagttgaaaacagagtacttaaaacagagtttagtagatgagaaaattacctgtaacgtggattaaaaggagagattatgtgtttgcggagcttagtagattggttgatcctggctccaagagatggtagaagatcggcagagaggaaactactctgttttatggtgtctatattgtattcctcgacgcagaatctttcgaagaaatttcgagtccaagagatcgacatctttttgatgatctctaaagacaaagaaactgttatacctttttaggctttcttcttggcaaggtagttataaatagtgatgaagcttgtgacaaagcaacacggggaaacttctcttttcttcttctgttgggacctttatggcaacttgttgtgacccatttgttatctttttttctttttggttgagaatttggcagggaaaggttaacggctttaagaagactcagtgcaccattaatgctgcaaaaccaatatggtttcgattcgagaagcaacaatggtgaagaaaaggcgtaaaatgcggaacggagtaagtgtgagatgatcaaaaatcttgagagatgagacagaatttaagtggcaaacattgagcttttgcggtagatatcatcatattttgtttcttttttgacacgaaaatataagattcgaaagaggaggaagaagaagaggaaacgcaatctgtttctttggaggtttctacttgatgagattcatgactatcagactatggtgtgatgtccactttcctagcatttgaaggtgggagtgatatatagacatagagacacatataaaggaaggaaggtacgtttggtgtttggtaagtgttaatgggaggacaaaaatgggcatgaaaattatggtgtgttcatttcaggaatccagaaatggaccaagcaaaataaagaaaataaaatggcatttgacagaatatgtaaggggccagagtatatttttttttctttcttcgaaaaaagttttattttctcatcaactattcttaaagtatatgtctctattttattttctagtccccaaaaccaatcataagtttattgtactcattgcaaaaaaaaaaaaaaaaaagttattgttctcattttggattgagttttactaaatagccataaacttggaagattatttccaaaacactcatatagaaaatatagtagtccatttaatctttttgcatgggaagtgaaactctaagattattttaccgaaacagcttatataatgtattattattatagaagctacgtgaactctccacgtggataaaccgaatctaggtagcgaatgaggctctctaaacagtgaagtcccaaactctcttctcactcggacacactcgctggctcgcaagcaatatgtctttgttgtgttttgactttggtttatacttagtacttaggagaagacacaccaataggagatcttcacgtggtgggttttttcatgtgtgtacacttgatttcttgtccgtcccatacttctcattcccgtcggtatggtggcccctcccttctccttcatgttctgattccatttactaatttcttataaaccctttctagatatatgtatgttttcatttctctagtgtgctagactctttatatcttaatctcactaataaaggaaaaatacgtaatttataaattttaacaaaataataaacttgatttctaaattcttaattaagaatttaaaaatgacatcttactcataggaggaaatatatgaaatgataaatcccataaactgtgaaagaacaaatctagagtttaaaacacaacatgataaaatatatataacatggctataaatatttttaacaaaaaggtgataaattatagatgaattgtacattgactacattctgtgcaaatgaacatgtgctaaccttttctaatgcggttataattgacatgggaaaacaaaagaaaagaaaaaagaatcaggaattttttctacaataggaacgagaaatgagagaaaacaaattgaaacaactaagaataaagttatgaaaaatcatggtttataataaaacacatttgtatacgaatattgattttttggtaatcctaaatatttgactaaacttttgttttcgttcgctagtatagaatgccaagtataaattcttcaaacctttccgccaaatttgtattattaaatcattccaaagctttttgtttctgcgtcgatctgagcccgttcgaatgtatctttcatgattccttgttgatattttgtttattgtcttcctgaatcctaatatcattatagaaacaaaacaaaacaaaataaagtaaatgagagattcctaatataaacataacatgagctaactttaatattattttctcgtgattaattagttttgccaataaaagttttatattaggttttatgatctaacttactttttaaaagatgattataactattgaaaaatgaattatttcggctttcaaattttagtattttgtgattttttttttgttttttaatttcggttattcatatatttcaaatcaaaaggaattactgggttactaaaccttgccttaaaagaccagaaatcgtaaactgctttaagtttgctatttgctgtcttcctagtgcaagtggggttgttcatgttaactgtttaaatttaagtttaagctgtcacatgcatgctaagagtagtgtagggtctaaaaatttgttagttatttttgttgttgtgggccatcataagtcttggaatcggttggtctaaacctgttttataccttcttcaaactacattggagctgattttcattttatattcatgtaagatcatcgagttctagtaacttgattttgaggtctcaaaagagaatataaactgtatatggttggcgagtggaaccatgagccatcgtcaaacattattttttgatggttagccgcgaattaatcttcaaaaccgtatttgtagtcatattgtattatagttggtaggttttggattggtagttttagtaacgaccagattgaaccatgctggtctattccactacaattttttttcttttctggttaaatatgttatctagaaaatctagatttttcttgggatttagtaccctacattatacgttgcacattattaacgggtccaatactagataacagatagagacattttccagtaaatcttccattaagttaaaagtcaactattctattcttaacccttctcatgatcatattagactgtaaaggcagttgagacttttattgaaaatttagagtttttctattatcaaaatgcgtctaattattatattttttattttttttgttatgaaaactttaaaaatcttaatggatgtattataattgtgtcttataaataaaaacagtttaacattaactgtaattatagtcgttatggatggaatatcgtcccgggttgatcctctttctcatgctactaagaggagaaagatctgatttaacacaaataaaaacaagataattttccacaatatcaacggtacaagaacaacatgataaacgagtcatagacactgcataagtgattttgtttgtgtaatgtcggcatgatttatatgagatttgtttttgtcgtctacattaaaagttaggcttgatatatgggtccttccatttcttattgggtaaaacttgcaggcttcttactgttttcgcaatgtaccatttgatacctaaattacctaagagttgtacaaaatcaagaaataatatttatatagcaaaaagaatattaagattttcccaataaatttagcaattatctcttcaatcaagcatgtcatttacagtttggcctataaacttaggttttgaaacatgtgatgaattataacgtttgtaggatgtgtgtgtgtctaacgcaattaggttcatgtagttaatgacgagtagggtcaaaatcgtaaggaggatcctcgtgattgtcctacaacgtgggaaactttttgttgtaaagcaaaaattaaatcgatcactaatattttgttttttgttgggtaggtatatatagcctgtgattctgtgaattaagaacggtttaagcctttccaatctctcttttccttggaaccacacgaacataaagttctgttagtttgctctttaattttgttccccataattaggtgctttcatttccttccgacaaaagaactaaaatagcatttatttagaaatatatggtaccatcactttttaaatattcgaaaaatactcctctctgttcctaataatcaaatttcaaaaatatactgtacatttttaggggtttagtatagcttttatcagttattgatgaagaattgtagagtttatacatagaaaattgttagttacaaaataatgtattaatcattgattattaatatgtttcttattatgtttgaaaactaaacaaaattagattagttaggtacaaaagaagtatattgatttgacgctatcgatttttgtccataattttgtttaccctaagcccacccattagtaatattttattaaagctaaactatcattcccaagtgttaaaattcagaaatcagaaatgctgccaagacaaacaaaaaaacggatggtagcttgattgactaatttggtagagtttcgaaatattgtaatcccttcattttgtcgaagagtcaaagtaaattttcacccgtgagacctataaataatattccttacgaaagaatcattagatgttttttagtttgattgtttcactagaagtgtgagaataagaacttctgatgtatataacaacttcatatacaaatgatgaacgaaaccaagtacccaaacatcaaaagtgttgttgtttctgttaaaggatatctaatatcaaaagtgttaactaatgaattgcatagtttgagtatgatcaataaatatgagaatataaacaatttaactgaaacatatacgctgatgaaatttaaaataaacagtcagtaagaaagagtaaattatcactgtatgatttgactattttgagctattgcatcatcctatttaatttctaaaatatattacaaattaagatttactattcacaataaatggattaactatagtgaacacaatgaatatatatagtaaattttattagcggacgattcaatctagaatatgatgaagtctccgaaactattgcaataaaaataaattaaattaattatgcacaccaaagatttggtatataaatcactaaccatctattcaaccatttgatgaacgatgcttaaaacttaaaagaaacattgacatttattccataacggaaattaacaacaaaattccacgtaaagtacttaaattaattcatatagaatagtttttgcgcacaacaatgtcatttacattctcaccagtttaattttttctaggcagtgaaaacttggtgaatactatacaaaatgtactcctaataaagaatacataatgaatagtagaaaataataataaacaagtatcacaggaacaaatatacacggatgaatgaaacggatgaatgatacatagaaagtgaagatctcaagttttacttgttttgacgtactaacaagtcatgactttgacatagtcgtattgattaggtcgaatattttagcatacaataattttttatatttaaattcgtcgatcgatcatagtggagaaatgttgttgtttcgtagttggttctctttttatcaaagtctttacgccatagttgtggaaaatctaactatgcttagaaagttgttatgatcataaaaatatctagatatataaaaggtgaaaagaagttacgtggactatataatactaatgttatgatatcatttttaattgaaatgtgttcgtagatggtagtaagatgcttttttgaaaagcgaaaaacatattcaccataagataccatgattgttaattaaagaagttactcttagttaacaaaaacaaaaaaagaacttactctttgctcctttatttttttgttagctgtgtgtcatggtgaataactgcttctagttttttttggtagggattaacttcttctagctcgtggtaattgttttatatatcaaatatatattttactaatatatatatatatatatatataaataatactaaatatgatgaattaattctatggtaaaaatgtcagtagaagtagctacactataaactttggtatgttatgtatatttttatataacgaaagctacattttgggtattgtttttatcagggaatgattgatattgaagcaacttttatttagaaattcattaaaacattttaatggttctcttgtaagattcacacctatctttaaattttctagtcaaaaaaagaaagaaaaaaaaagcgagagagcttctgtttttcaaaattagtgcaaaacagaacaaatgcgaaattgtacattttttcttattaaaaattattatagccaaaaaaagaaaaatattatggcctcctatatttgtccccaatcatcctatttattttgacactgacttttctcacccctattattaggcaagttctacaaaaatgatggccatgaaaaatcattatgagttattttccctcgtggctcgcgatggttatgtttttttgacaccgagtctcacgtgacttccacgtgaactatatgagtggaggttttggatatggatcaacttgaccatatactagatttgagaccaagacaaaagagagttcttaaaagtctcccaagatcaaaacagtaaaccctaatgattttctataacccttttgttgtatggaattttagagaatacagaattttagtgtctctttctatagttttaggcttttagcaaaaagtctcaccttttctttgtaatttctctaagataaattgtttttcgaaaaatgctcaaaaagtactgcaaatcagaatgtgtactgcatatcttctatctacgcgaacaattggaataaagcactgttattctctcgtgaaacgttgatacattatatacaacacatatgagtttgaagtttctgtattacagttttctttttgaacagaaatcatttaatgaaccgtgttacttttttttgggtaacatgaaccgtgttactataagactatgaattataggaatcttctaatttgtcatttatgtacgagttaaattgtatttgaagtttcatcaaaaattagtacttgattatgtcgaatattatctatatttctagtgataatttagtgttgttacatcaaatattctaatttagaaaagaaaacaacatgtgtgtacgatataaattgatagttttattttatttaaagtaatgagatgcccttaaaacaaaccttttactcattataataatattatcaagaacaatcttgatcaaacaatgtatttatcatttacagccaaaagtaaaagaatttgtacttgatatagactccatacaaactgtagtaagagagatgatagaatataaatgttccccatttatttggtggaggaccaaatgtggaccaaaacataacttagccaatcgcatcttaaggcaatcgagaagaaactacatgcatgggcatgcaactatactgtttcatttattttgaaattcatttggtccaaatttatcttcaattcctttaaaactagatgtacatgacaaggttgaagtagggaattcacgtaatcatacttttgactttgacaactatatttagtcattcagtgttttattgctatatcgaattatgttcaatgtggcaagaccacgagattatgtttcatttagttaacaatttatgaagttttgaaaacctttgtgtaaaaatactgtaacattacttaaaaacctttctgtaccagtacaatcatttcgacctatattctaaaatgtaaaagtaattcttacattattcttctattaaatgggaaatcaataacttatacggaataaatcactcttaaacttaaatggtcaatttcaacatgtatagtgatcaatttggtaaataatatttgatgatatgttagtgtatagatcaacattccttttaagtggttgataagagagactataaaattttaatctccgagtcatcattccaatataagtgttctcaagatttgttgctctctcatgtcctaatcgcttagggttccaatccaaaccaatgagtttagtcacatcacttacaaatgtgtatatcaatatatctttacggaaaaaagatatattgataaaggatgtacaatcaaatacaacaaattagtatgcaatgaaaatacaattttagaccagaaccacaaaattacaactactcaatatatcgagtattacaatatattgagctataattcaacttttcacctatagttagctagttttgaccataatttgtagtatagtagtatgtgttagtacgtcgatgtgtcaacattcatgttcaaacttgcatattacatgttattgacatgttcttcctgtagtatacaaattacacattttcataacttcatatatgaatctcctgcaattttacctgcaaactattggtcaaagccttttaaatgggctagatcaagcccactaactgccaaaatattcacttcatttattcttgtagacagtatacacattatcaaatgtacacacattttcatgatttgatcttagatattatttcatgcaattttagcctctattgctaggctttcctttaaaaacttaccgggctaatcaaaacctcttaaaaagcctccatatcaaaagcccatcaatgttacctcgaacttagtggaatcaaatacggtgtcgtttgatagaaaatgacgaaactagccctttgaccgttcaggaaaaagtcttccgacatataaaaacggagaagcgagaagacgtgtcggctgagaggtaagaggaagagagactcaaaacggcaattagcgaaagtgggcgggaggattcttttccggcgactcttttatgtcttctcttcctcttcgctccggtgagaagatggaatcgccttccatctccgacgccgttccacttcacgcaccagaagacgcgaccgcggatttttcccaaccgcaatcgccgttacatgaagttgattcgtttccagttactgaatcctccgatgatgttgttgttaacgtctcggagataccgaatttatctccgtctgatgatgattttgaccacgagcgaaatagcggcgaggatcgcgatcaggatcacggcgagaatccggttgagaccgatggtgttgttgttccaatcgatgagttgaatcagaagatcattagacaggcaagtgatcatcaatttctattgatgaattggctgaattgatcgagcaattttggaattagttaactttgattcaatggcttcttgtgtatcaatgtcgattggttttaggttatggcacttcattaattatcttaacgagtagtttcacgaatatgcttaacatttgggatttattggtatgttcttcatcttaaggtttttgctgaatctagtgttgttctactttttgcaggttgaatactactttagtgacgagaatttgcctactgacaaatttcttctgaatgcaatgaagagaaacaaaaaaggctttggtgagtatactttttttacttggaaataggcattagtttatgctattttctgtgaccaactttgaggaatcgctattggagttatgaacgtctttctgatacttgaaacatgtatctttgaaagtatgaaactttgtgaccgttgtctattgaatagagaaattgcaactgatatacgaaagtgggttctttcctgtaccaaacgtattcttgcagaaccatggaaagtagtatttaaggtggctaaactctaattgctgaaaatatattacattttgaggaaataaagtagttctgtattgattactccatgactatctatagccacttgattatggaactgttaagaacaatttcaatagctttcttttcattgtgcagttcctatttctaccattgctacgttccacaaaatgaagaagcttactcgagatcatgctttgatagtatcagccttaaaggagtcatcgtttcttgtaagcttctttacagtagtatgaatggaagttgttggagtaaaatcagaggttaagtatctttttggtcaacctgcaggttgttagcgctgatgagaagaaggtgaagcggctgagtcctcttcctgagatcagagatccaaaggtatcaatcgtctcaaacatgactcttgtttttcagtctgacttttgtgttgtttcttttgcttcttttgtgatatatccgtttctgatttgtgtcccatagattttcactgttttggtagaaaatttgccagaggatcattcaaatgagaatattcgagagatatttggtaaagctggaaggtaggctatggtgttatctatcttgttatcttgttactccatttctcctgttatatccctttacatactaaaaaaccatttttctgcaattgcagtattaaaagtgtatccatatgtgatccaaatgctgttgaagaatcagagaagggtgggaagaaggaaaatttcatcagaaccagagtaagaaacgttgtggaaaactttcttatttggaatcacaagcacatatatgtgtttatgtgtaagtaattagcttctttttcttttggctagttacatgcctttgtggagtatgaaacggtggaggcagctgaaaaagcggttagtataaaaaaaagtcttaggcgcagtagattttctctttttaaggaatgtgtgtggttagcaacttttactattgggtgtgcaggcagctacattgaataatgagcaagactggagaaatgggttgcgagttaagcttcttgaacaagcagcagtaagtaatctttctttcaacttacaaaatgcatatggaatcagattagaacttctattaatcaatggattattattcatcatagggaaagtttgcacagagaagaccagctcggagggaagtcgataaagaaaaggacactacaggcagagttcatgatcaaactggaggagagaaaaacaaaaagacgcgtgaacatcaaaatcaccgtctccatcattctgataatcctgctgatgatgtaagttttatcttaatactattattaattgattgatctcatctttgcaaagcaagatttgggatcaacactacgatgtgccattaaaccaggacccaagcagctgtttataattgcggattgtcctttaactattttcaggacggtggcaatcatcagaaggataaaaatggaaacaaaggcagagttgtaggacaaggaagacgacagaatcatcaaggcggcaacggcattggtacttttcttagagaaagtccatttctttccacttattgtaactaaggagaggaaaattgaaattttaagaccattttttttttgtaatttttcccacaggacatggaacagcttcatcatcttctcatcctaattatcatcctgttgaggtctcaaagcgtccacctggcccgagaatgcctgatgggacgagagggttcacaatggggcgtggtaaagcgattcctcctcccacatctactcaaaccagtcatgaagtttgatcggttccgcatcttcggttgtatcattgtgtggttttatttcacattaaaaaatgtgaaacttgtatgtaattagaattgagatgttgttttggatttgggtttccttttggcatattcaagtcctccaaatcttcactttggtaattagttttgtgttgtaagttttggtgaatgaaaaaatgatccttttgataaacttataaaataacacttatcatttgcattttgttttattttaattttatttcctttaattagctaaattttgttcattccattgaagcgaaagaaggatattatttccgaaatatccacttcacacatatttatctattgtcttctttttccaacatactcaagacacgacctcttgttgaactgattttactctttcgtctttgctaacggcaggtctaagtatgaacccgacaagaaggggtagtgaatgtgatcgaaattggaatgttttgtgccataggttttagagttgatttatttgcccatctaatgataaatccatcgattcattaccacttttgatggcttgatgaattcgattgtaagcaatagtcaaattggcctaattcaactagagcatgaagaaaaatcatagatagagaactagaagaacaatacataaataaaataatacataaaaagagataaaccacatgtcattgcattaaaaaaatttggtaaaagattgttaaattatctaacttgaccacttgaaagctcaacaacttaataagcacaagaaatcaaaataggctgaagggcatcgtatgaaatcaccaattgaaagcaactctttagtcggtggcaaaatctattgaaaagattcataatgaagatgctccacatattctttgtggaactatctatttattaagatttttgggttacctgaaaacatctatttagctagggagatactggagatcagtcgctgcatgtcctcctttgatcttgttgttccattataaccggcaaaacaactcattgcaacattcacaatcaaagattgaaagtgacgacgacgtcatgtgttcctcccagtcctaggtattgaggcagggcgagtcctagatttcttgagtggtctttcatttttaatgcttacacgcattcgcttcctgcttctcagtaagttcttgaagcggtgaataccccatattgtcttcttcggctacacaaacatgtagaaaaagtaattcagttgtcattatatttacacaaaaagaattgagagatgaatagtcattatgttcaattaatgcttaatgcttacccgcattcgcttcttgcttctcttagtccctacattgatatctccagactcttcactgtgttcaatctcattaacaagtccttcttgaagaggtgtataataccccatattgccttcttcggcttcagaaacatgtggaagagtactgtttggattaccaagtccgttctctgctgatgaagagtcctcctctaagagtcgtataccccattcttttaattcaaacgtagatctccaacctccactacttatatgaatatttatatccacatgatcgtagtagttcccttgagctagagaagcattaccttcgtttagagggatacaacagtccaatatagttaacatttgactacccttctgacttttcgtgaaaagtagataaacgtagaaatcatccgagccaacatgaaagctgttcccaaatctgtctttgaactcacacttcacctttatattttttccatgcttaacattagttaccaatgcgccaaccctaaatctgaagaatggttgggagagagggaggtgaagtagaggaatggtcagagaggagcttccagtagtacggtaagtgaaatatgatggcatttcttctttccctggaaacaacatgtacttgaaaataattgattcttggtgaagtacagtttctggatccaagttgaagcagtccctgaaatcaagtttgactttggaaactgtgtcgatattgtttgcttccatctccatcccaattggacagccacacaaatcaactatagtcaacgccccacaatctttaaagtcaacttttccaagacgtttcagtttagaaatgtgtagggatacacattttagcctgctgcaacgatccatacttagcaaaccgaggttagagaatttatcgatccaccaaggaacttcttcaatccctgtttcctctagattgagacttgagatgttggttgagatttcaggaaagctcctcaaccgtgagcatcccttgaaactaaggctatcgagagattggaggttgattccggtgggcagagtctccagatttctacagtttgtgatgtccaaaacctccagttgaatgagattctgaaatgagcaaggaagctccaccaaatttgggatgttctggagttgcaagctcgtcaaagtgggagacaacatcgccagtaagggtttaagcggctaaaccaaataaacaatattaagatgttagttaacaaaatcaccaacatttatattttttactttcacataactagtagtactatgaagtttcaacaaaaaatataaattttatttattgactaaactctaaccctccttgcaaacccaaacctatatataacttcatacatttttcataaaagataacgtagagtttagaactacataccttcatcactccttcccattgtttcccatcaatctccttttttgatattctaagatcaataagattctcgagatgtaaattagaagggagttcttcaatgtttgttccagtcaaatagagatctgagatgttggttgagaagtccggaaaagtccttaacttcgagcatttagtgaaatcgatgcggttcaaagatttgaggttaaaaccagttggaagagtttccagactgttgcagaatgccatgttcaatttcaacagcttattgagattttgtataaaggaaggaagctccaccaaactcttgcaattctcaaaattaagtgtctcgagattagtagccatggaaagatctggaatttctttcagattgactgatccatctagatccatttcctttagacatgtaagtggctgtattcaacaacaattaaacacagagatcaatagaaatagattattgttatatcaaaaaattagaataagcattgcaataatgacatatattattctcaaaacttaccacagctccttcccacaacttatgtagcttactattcgtcattttgagcgtgacaaggtttttagggcaaaaattagaaggcatacacctcattggaaattcggaccagcacaatagtttaagtgtaggaggcaaatagtcgaaactttcaggtaaatgcaatctgttttcttctccaaagatatccgtaccaatttttaagaaacggagattacgcatccgtttgaaggcactctcatgtacacacaactcatcaatcttacttgtctccaatgatatacctaaaaccttttgagtatcctgaaaaaaatataatatcaatgagaaagagaaaacaatacaattatcttaacgcatattctgagttatgacttatggaaagaccacaaattaaacttttttatatatataaaaaacaaaaaacttacaatgccttcactgagtacatcacaaatatcatttggatccaccagaaattctcgttttcggggcttgccaatggactgtgtgcgaacaatttttctgcccatttcttgtagcaaaggatgcatctccacatgaccccatctgacatgaatgatggacttatcaaccaggttttgcagcccaacattagcaccatatatactatttgcgagcaatgacttgatggttgtgacttccatatgattgaaaatacatgcgatatgacgaaatatcgcttgatcttcactctctaacccatcatagctgattcttagtattctctcaattttatcgtttaaaccattttgaagccttggcagcatatctatccagtactccttatccttcccactcaaatatgaacccaaaaccttaagaaccagaggaagactaccagcatatcttgcaacttgaactacaagcatctcaaaaccttcaggtggagattttttcttgaaagcagattgacataacattgcaagagcgtgctcttccgttgggagactaacttcatacatacgatcaattccatgagccgttaaaaaatgtttattatttgtaaccacaatgattctgctcccatttccaaaccattgagttttacccaccaatgaatctaagatcacttgatcatccacatcatcaataatgataagaactttctggtgttgtagcctctctcctagtacacctagatgatctatctttatgttcggcatccttagaatttcagagaggaagctctcttgtaaatgtaacttcatattgtggtcgtcaggattggcactactatgaatttctctactcttataggcaaaagatctgtctatgaatttcctaacttggaaatgccgaaaaaggttgttaaacaaagctcgtgcaatggtagtcttaccaatccccgaggaaccccatataccaaccatcttcacttccttagattccagatccaacagtgcactcatatttgcaatatgatcctcgaggccgacaaagtcctcaaaatccttcgatgtagttaaaagcagtttacgcaaaacatcattggctatttcttcaatcatttttgcttcgtcatccctaataaggtgaaagataatttaagaaatatgaaacaacaattttattttaagatgtatctaataatgaatttagtataaaaatcataccatttggaagaatcaaatccaagcatattagctacatgagtcaacgctttcttccattggtttttcacttcctctgtttgtctcttgcatgtcttttcaaagatcttcccgaattcaccgatttgatacctcacttgggaaggatccacaccgtagaaaaccggtatgataattttatcattgcagttcacaatctccagcaactcgttaagacaccagctcgatgaagcgtagtttttggagaaaacgaccactgcgatcctcgattccttgatggcttgttcaagatcgggccagagagagtggcttctctcgatctcattgtctctgaaagcagtgatcagtttccgatcgaactccttgagaaagtggctacggaatgttacacggacgtctccccctctgaagctcaagaaaacatcatataaccaatttcgagaagaagatgaagaagccatagagagaaagagtgagaggaggagaaaactaagaacaaagactttggagattgagattgtaagaaggaaattagaggagaattagtgaggcgtcgcgtcgcaatcttgtagagtgtctaacgtagactttttggtaccatttcgagtctttctgctacgagagcaaagataggcattggtggatccatatagctttgtaatttagtgttttccaaaggaaaatcatagtttaaattgtataatatagttattttgtgaagttagaacaactaagaagcaactcaaaaagaagaagtcaactcattttctcatcgttattgtgaaattgaaaccctaagcaagagttgcaattatggttggtaattttatgcatattcaaagggacttaaattaatattattatggtcgtggtctgttctcgactcatatttaatttgaacgaaagaagacgaaaacaccattatgaaaagaaagaagacaagagtgtgacacaaggacatctcttaaaacattttccacctatatgtcattttcttgttggatttaatatttttacaatttatcaattaaattttggtctaacgacatctactcaatgaagaaaaaaaaaagtctagagtataaaattacaagtggagactgattcaataaaatcctggatatgtgatatttaattccgcaaaagtcctcaaaatatcattggataaagtacttaaaatcgattttacaaaagattaagaaaacaccactagctaagcatggctacttctatacacaatagaacgaaaaatggcttcacgggcctgaaacagaggcatataccaacctgacttgacttcctcgaatttttgtggaatggattatgtaagaaactttgtatatagttcttcaaaaataataatgtacatttatagatctaataacacctatatacatgtactttgctttgtttcctcttcttccattgttcctgttgctttcatgggattcaaaaacatgttcactaatcagtgaaagccctatataaaatatacggatataccaatctgatttcatacaattttatcttgagttgaacctaaaacaatcagataatattcaggaagttaatgaccatgaatacattatctgacttgacaacttgaaatacccaacaacttaatttataagcacataagaccaaaatagagactgaagggcatcgtatataatcaccaattgaaatcaactcttttgtcggtggcaacatctgttggaaacatggtttatgagttttgggttacctgaaaacgtctatctagctagggagatactagagatcagtcgctgcatgtcctcctttgatcttgttgtaccattataaccggcaaaactattcattgcaacattcaagatcaaagattgaaagtgacatcatgtgttcctcccagtcctaggtatagaggtaggggcaagtcataggtttcttgagtctttacgtgatctgaaaaacaaaacaaatctacataagcaattaaaatgttctgttgatcctgataaccaatattatgttttgttcattcttaatgcttacccgcattcgcttcgcgcttctcttagtctctacattgttatctccagagtcttcattgtgttcaatctcattaacaagtccttgaacaggtgtatacgcatgtgttggattaacaagtcggttctccactgatgaacagtcctctaagaggcgtataccccatccttttaattcgaacgtagattctgaatctccacttatatgaatattcatatccacgtgatcgtagtcccctcgagctagaagagcattatcttcgttgaaagggatacgacagtcaaatatcaacatatcacccttccgtatttccatgagttcatgtccctcaccaaagaaatcaaagctgttcccaaatctgcctgtgaaccgactatttacctggatggatactatattgaaagcggttgccaccgcacaaaccctaaatctgaagaatggttgagagagttgtgttggaagtagagggatattggggagaatggtggaggttccagtagtacggtacgtgaaatatgatggcacttgttcacctggaaatgccatggagttgaaaataactgactcttggtgaaggacagtttctggatccaagctgaagcagcccctgaaatcgagaaaggggtccaaactatcatcctcctcctcggaaagtgtgtcacttggatagccacttaagttaactacagtcaacgccgcacaatctgaaaagtcaacgtcccacagagttttcattttaggaatgtttagggataaacattttagcttgctgcaactcctcatagttagcttagtgaggttaaagaagttctcgatctgccaaggaacctcttcaatccctgtttcttctagattgagaactgagatgttagttgagatttcaggaaagctcctcaactgtgagcatcctttgaaacaaaggtaattgagagatttgaggttgattcctgtgggaagagtctccagatttctgcagtatgtgatgctcaactccttcagttgattgagattctgaaatgaggaaggaagctccaccaaacttggaatattctcgagcttcaagctcttcaaagtgggagacaacatctccaagaagggcgtaagcggctgaatgaaaacagagttttgtaaaattaatgttaacaacataatatttaatctaagtgtcaaacataatttgtgaaatgtaaacaacattgattttattttcgtgttatggccggatctagtactatatagaagaatatacatcatttcatgtacgaatcgacaataatttatatatataaaagtgttagttaaagaggttggagaaaacgttaagtttagaaggtacataccttcactccatcccattgtttcccatcactctcttcttttgataagctaagctcaacaagattctcgaggttagggaattcttcaatgtttgttccaaaaagcatgagaacggagatgttggttgagaattcgggaaaagtcctcaactccgagcaatatcggaagttgaggtggtcgagagatttgaggttgaagccggttgggagaatttccagactatggcagaattccatgtccaatttcaatagtttattgagatttcttatagaggaaggaagctccaccaaactcttacaaaaaccaagtttaagtatctcaagattagtaggcatggaaagatctggaatttctttcaggtttgatgatccaaccatatccatttcctttaggcatgtaagcgactgtactcaataaaaattaaacacactgcttagtacaaattacacatcacgtgacatattgtcatacaaaaattaaaatacttaccgcaactccttcccacagcttatgtagcttgctattcggcattttgagcgtcacaaggttttcaggacgaaaattagaaggcatacatctcataggaaaattgggccaacacaatagtttgagtctagggggtaaatagtccaaactttcgggtaagtacaatctacctgcttttccaaagttcttcgaatcaatttctaagaaacggagattactcatccctttgaaagcactctcatgtacatacaactcatcaatttcacctgtatttaaagatatacctaaaaccttttgagtaccctgaaaaaaaatatgatattaatgagaaagagacaaaaccatacaattcatcatttatcggatgacattctcttaacctcacatactgtgttatgaaattaaggaccacatattaaaagagaacttacaatgccttcactgagtacatcagaaatatcatttggatccaccagaaattctcgtttcccaggcttgtcaatggactgtgtgcgaacaatttttctgcccatttcttgtagcatacggtgcatctccacacaaccccgtctgacatgaatgatggacttatccactaggttttttagcccaatattaatacccaagtctgtgagcaacgacgtgatggttgtgacttccatatgattgaaaagacatgcgatatgacgaaatatcgctttatcctcttcgctacctaaaccatcatagctgattcttagtattttctcaattttatcgtgtagaccattctcaagccttggcagcatttccatccagtactccttatcccggcccctcaaatatgaacccaaaacattaagacccaaaggaagactatccacatgtcttgcaacttgaactacaagcatctcaaaaccttctggtggagattttttcctaaaagcagattgacataacattgcaagagcgtgttgctgagttgggagactaacttcataaatatgatcaatctcatgagcccttaagaaatgcttattatttgtaaccgcaatgattctgctcccacttccaaaccattgagtttgacccaccaatgaatctaagatcacttggtcatccaaatcatcaacgataataagaactttttggtgttgtagcctctctcctagtacacctaggtggtcgatctttatgtctggcatcctcagaatttcagagaggagtttctcttgtaaatgtaacttcatgttgtggtcgtccggattggctctactaaaaatttctctactcttatatacaaaagctctgtctatgaatttgctaactgggaaatgccgagaaagttggttaaacagagctcttgcaatggtagtcttaccaatccccgaggaaccccatataccaaccattctcacttcctcagcttccaatttcaacaatacactcatatttgcaatatgatcttcgatgccaacaaaattttcaaagtccttgggtgtagttaaaagcagtttagccaaaacatcattggctatttcttcaatcatttttgcttcgtcatccctaataaggttaaggacaattttaaagaatatgacataattttatctcaagatgtatctaataatgagttagtataaaaaccataccatgtcgcagaatcaaatccaagcatattagctacatcagtcaacgctttcttccattggtttttcacttgctctgtttgtctcttgcaagtcttttcaaagatctttccaaagtcaccgatttgatgcctcacttgggaaggatccactccgtagaaaactggtatgacaattttatcattgcaattcacaatctccagcaactcgttaagacaccagctcgatgaagcgtagtttttggagaaaatgaccactgcgattctggaatccttgatggcttgttcaagatcgggccagagagagtggcttctctcgatctcattgtctctgaatgcagtgatcagtttccgatcaagctctttgagaaagtggctacggaatgttacgcggacgtctccccctctgaagctcaagaaaacatcatataaccagtttcgagaagaagatgaagaagccatagagagaatgagaggaggaaactatgaacaaagactttggagattaagattgtaatcgtacgtcttggtgatttaattatataaaaatattaaacacggccacaaaagtcttcactaatcagtttcactattgtttcagacacaacttgacggatatttccaatttgatgtcttaatcatcttttgtacaaggtcataagcaaatgtttcatagcctctaatgtcttatccccttacattactacacatacgtctcactttatgattactttaagaatttagaattcttagagtggagacaagtttctcttgctcatggccttaacatttctgagaagctctggtctgaatcagagacatgtatggcctaactacgtaagtttatttagtaactcaattgttttgactagggttgatagagaaacgtgtgcagtaacctaccaaaatagattttgttatttggcaacaaaaaaaaaaatagattttgttgtattactctgtataccaaaactgatttcaatccgtctttgtggaatttaacctgattatatgtacaattttagaaacgtataggatccatcatggacaaagcaaacatgttttggaaaaaaaaaaaaaaagtaatagagaccaaatggaaaaacatggatcttttagacgagagagttccaaggtagtgattattagggttttgaagttggcttatatatggcacaactctattcttaccattgggttaaaacaacatatacactataatcttgatgtcgattacatatgtataaaatttggcataaacagctcaagaaattataggataaatatgaaagtattttattctcggattgtgcttttcgttataaattccaaattttataatcagatgcgtttttttaagcattttatcatcagttttacttcactagtaaatgcaaaaaacataacgtatgaataaagattttacaaaatgatattttggtttccaagagtttactactacactatttttgagttctaatatgatgatgatgatgcaatcaatattgatttcttcatatgatcaaatgatatgaactttgccatcgctgatcatcactttgttatcatcttgcagtttctgcataaaatccacaatagagtaaagttatgaagatattgtataaaaagttaaagaatgagaaagcttgtctcttaatttgtgaattacctctaagagagccataatctcatctgcagagtaacgagatgctccaaccccattgttgttgacaacagtctctatatctgcaatagagatgtcatcgagcctgtgtgtcctcatgtgctgcccaaacactcgctcaaaggtttcaatccttgctgcagagaccgtgccgctgaattgctctacagaaggttcatctacttccattggatctgctgtttcactgaatggaccagcaaaagagaaagaaaaaagtataagggttgagaaagctgtgatataggtttccatggaggagatcaaattagtttacctgtcgacatttgcagtgtcattctctgctccatcttcattattcctgcgttggttgcctctacgtccacttggtgttctttcttgttcagcttgttccctttgacgttcttcttgctcacgatcatccatctcagttaattcttgatgatatattgcaaagttcataagcttcaaggcagcctctgcatcagctttagtaacctttcaaaataaagttatcactttagaaagaatctgaatagaacatattcacgaccaggtggggaaacagaagatttgagttagattgttacctcgctactcaacttcattttggcatgtgccgtagcaagacgaattattgtctctagagttctggctgttatcggaagcgtacctccagtctgcagagatttcgatggttgtgtcaaatacaagttcccaagacgaaaaagatacagtgtccaatgttattttatgaaataaattaccttagtatcggaacctgcatttctgagatctgcatatgcttctgcaatacgttccgatgcctgcaaatttaataacaaaagagatttagtggaagagattatcagatacataaaaatttatatatttgagttcactgtctcacttcatcagtgagctttggtgtaatacggtgcttggcgtaatgaatgtacttcttcaagaacttaatcgtaagggttttatcatgtgtttggcctcttttcttcttcccatgtagtgtttggttatacttaacaaacatttcactctcagcattgtcttctctcgcgtaaggcaagctcccatctggccctgcctcacctatggttcactcaaaagtcagatgcgtttcaagacatgggttgtgaaatgtttagtaaaacatagaagcatgatttgtttcctacctctatcgttcttgtaacgatgcatgcgcaagacatgttctgaaatcatgctgtcgataccagcatccatttgatccaacacaataaacagtagatcaaaacgagaaagcagcgaatctggaagtccaatgttctttgttggagtcagtgatctgtcatactgcaggagcaagagtaggtattaggacaaaaaaatactagtcagtagagtaagtagattaggaaaacttcggtgagaacttacagttccgtatatgggatttgcagctgcaaccacactgcatctagcattcagtgatgcatggataccggcttttgcaattgttacagtctgttgctccatcacttcgtgtatagcaactcggtcctgatcattcatcttatcaaactcgtcaatgcacacgatacctttatcagcgaggaccattgcaccagcttctagtcttcgttcccctgatgaaaatgagaatttgattttaatgagaaatagcacttttgaccttccttcaaattttgattttagcatttgataaaaaaatgtggaaacgcttttgtgtgctttttacctgtttcttggtcagaagtcacagcagcagttaacccaacaccggaagaaccacggcctgtggttgatatagccaaaggtgcaatattcattatcgctctcagaagttgagatttggcaacagatggatcaccaaccatcatcatgttgatgtctctgaaagcacaagatttgttttcaagtgaagaaagaaaaatgagttagacaaaaagtatccaatgagtcgaatctgaaatctgttttcaagcaagacttaccccctcaagtgggttccgttcttcaggttcttttcaacaccaccaagcatcagtaaaactactgctttctttatccaagcgtgcccataaatagaaggtgctaaggaacgagcaaggagatcaaatgcatcatctcttcgtgcaatatttttaatgttatctaggtcttgcttagtgtatataggtgcatttgcttctttattgagcagagcgatattattggctatgaggatagtcctacacagaaagaactcggtcaagactatcagagtgaaaacatcttgaactaacagatgtgtaagaaaacgcacctaaagactccatttacactacccttgctttttccaggaagagctttgtaaataccgaaaacagatactcgatctcctggcttgcatgagtcaacaaggtcatcctcagcaatgacatcaacgcttcgtggaagctgaccaggagcagcattttcaggcacttcttgaattgacaaggtctggtgatctttgtatttgcacagcccatactcagtcaccaataagtttcccttatcatcctgaacaaaaaaaaactcaatcttcagtaagaggcaaatcttccagcagtacaggtaaatgaacaaaacgaaaacaaaaaacatgtaattacccttgtgggatagacagagccagtgggtaaaccagcgtgagatgttatgtctcgataatctcgattggtaaattcaccggttgatggacaaaagtgaacgcttttaacaacctttggcctcacaagagagcctgaaagcaaagcatgtgtcagaggttcaaaatcttctacgtaaaacacaaaggaaacagaagaaaagcagaggaatagagtgaaaatgatgagcttacatttggtgacaatgccctcaacacagaccatagatccaataaaatcagagagaagctctctaggagtaacaacgcgagaaacaaaataaccttcaaaaccaacaaggacaagctctccttccttcaagtatttagggtcaatagcacgagtagcttcagtggctgcgtcacaaaatgactgcatatactcatttggattcttcagtatcctatccaaaaaaaccaaagcaatcaactttaaggtcacaaaacatatgacaattgtagtgaatccttaaaaatccccaaattaacctcactgaatctaacaaaaccctaaaatctgccgtaaattcataaccttatactaaagaaccgattaaaaattcgaggaagacaaattgagaagatgacgaacctagaggcaacttccctgaagtggtggtgaatgtcagagatattaataatgagacggtgacgcttttgatgtaccaaagccttgatttcctccatatacatctacacaatccgtaaaaaaaatccaatttttcaaattagataagaacagaagctcgagaaatgtctggtgagaaaagtgatagaaatcgacttacactatcgaggaactggataaaatctcgcttgtggcgaagcctcgtctcctctggcacatccatttcttaacaaaatctgggttcttcgtaagaacttttcttcttctacttaaaaaaaaaaaactgattagagattttcgatttccgatttcgagaggcataaagggcggatcttctccttatggcgggatttcgtgagataacctgtaccctttttggcgggaagggtcattttgggccgatattagttgggcctttcgtctacgtgctttttgattaaccaaatttgggccggtacaattttggacttacgtctacgcgcttgtttggcgcgtttgatttcctcaaggcggtataatacacccagattctaaaccaaaaaccagacataccaaatcaattcattgtaaattcggtttaacttttgctactgccttcaagccagtaaaccgaaaaatgtatatatgaaaaccaaaataaacctgtgtgatttgagaacattttcggatgtatcacaacatatgtataactgaaaaaaaattcagtataaatctaatttcttcgaatgtaaaaacacgacaagaattgttgagaaataaaagatgagaatcccctaattggattattctgacaataacaccgttactacaagattctctcagtttctgtttttataaattacgcaaatatggaacgaactaagatacacaacattccgcagacaagagagagaacaaacaaaatctgaaatctcagcaaccgtaagaaacggggaatgaaagaaccgcaaaaggccagaggaagagctccaacttgtgaaccaagaagctgcaagtggtggtgatggatgatgatagtaaccgatagggcagagaatctaaaaggtatgaagaaatcagggtttgaaggcagagaaggcgactaccgagttgtgtccaccgaacccgaacgagtttgatatggctgcagcaaaacagaaagacattaatcagtgaaactgttgccagtttaatccaatgagaaggcggtcatgtttgtcacttaccaacatcaacctcgtgttgcttcttctcgtttgggaccgtgtcaaagtccacagcttgttctgggttctacaatgagaaaacaaagagtgtgagagtctaatacaatgaccaagttcaaatcttgcaacagttcaaactgaaagcggaatcaaagaagccttttcttgacttcctgttatacgtacaaattggttgatggaaggatgcagccatccagtgttgatagccttcacggtggcgatggcttctagacctccagctgcaccgaggcagtgacctatcatagactgtaacagaaactgtcattcacaggaaatgcaaagcaaacaaatacattgaaatagaggagaagaagaacactcaatcatagagcattggggacgaaccttggtggcgttgattttgatccctgaagtgctcttgaatacctttttaatggcattaatctcagcaagatcaccagcaagagtggaagttgcatgtgcattgatgtaatttacctgaaaaacgtggaatgaatataagtagggaagtaacacgaatctaatgaagaaatttgtttcagatagccttaaaacttaggaagcatgaaaagtttgtgttttttacctcctcaggtgatacaccagcatcttccaggcatctttcaatgcatgaagaaaccccaagaccatcagctcttggatcagtcatatggtgagcatcacaattaacagcacctccaagatattctgctacaattggagcaccacgtttcattgcatgttccaagctttccatcacctattagggcatacaacaattagtgggtctctccaaaacaaaatgtcacatgtatgagccaatctcatggtgagataaaccaactttgaaaatgtagtacaattcaagtgcaaggaaacttccagagctaatagactagggaacacaagtttcatcagattctataaactaagaccaaaacaggctcttatatacaattcaaaacagagcaagccaaatgtatgtagattcatagtatcaatgagagattaagaatttgtgaaacataccagaacaccagctccttcacccataacaaacccatctcttgctttatcccacggcctggaagcagtttgagggtcatcatttctctgggacaatgccctacaagcaacaaaacctcccaacccaataggaataatagcagcctcagtcccaccagcaatcatcatatcagcttcaccacgacgaatgtgattcgcagcagcgtaaaagcagtaattcgaagtagcacaagcagttgaaatcgaatagttaggacccataagaccaagatcaatcgccaacaaagcagaacccatatttgttatagcataaggtataaaaaatggactaatcctcctatgacccttctcaatcaaattctgaacaccttctgaaaacacagttaaacctcccattccagtcccaactagtactccagctttcctcttatcaatctgcaacaaacccaataaccaaaaatcaaaactttgactcctaaactcttcaaaatcaaaactttatgatcaatttcaattcaaatgttaccgtgttaagcttatcaccaccaagattggcactttcaagagcttttttaccagcaacaatgcaatatttcaaacaatcatcaagcctacgctcattcttgccatcaatataaccttcagagctaaacccacggatctgaccaccgaatcgagtagggaacttggaagcatcgaaacgatcaatcaaactgattccactctcaccagacaacaatttctcgtagtaagcatcaacatcgttaccaaacacagagacgagacccataccagtaatgacaactcgtttcttcggatctgtttcgcgtttaggagcggagacagtggatgctgatgcggagatgaaggaacgttgttgtcttcgcaaaggtctcgcattggtaattagctgatgtgattgacgatttgatggtaagcgaagtgggtttggaggagaagcacggagagatgaagattgaagagcttgcatggtggatccagaaattgagagaggtattgagagagagaggaaggcgataagtacgatgttgtgaaaatggtgtgtgatgtgtgttttgcgaaaagagcttatgttcgtcagatttcaggagcaagactatattataaaaaaaacagcgaattattcgaggaaatttttggactgtaatttttctctaagtcccttaattttacaagtgttttagttctagccttgtagtttatgttattctactatttggtctacttaaaataggtacggatgctttgagccattctccaattcgtaactcaacaaaaattacgaatcgaagaatggatctattcgctatcataattcgattgtcttcagttttagcttgaactcgattatttttttattggatttttcgaaaacatagaatcgtttactgttacaatatcttttagatcggatttttacgtattggttggctcaaattcacctttggtttttagatttcaaaaatagatttcttatactcaaattaacatttacacacacattttggtttcagttttcattcgtttagcttcggatttctgtaaattggtttttttagttattaatagaatattattcagttttattgttttcatttttgagtgatctggctttagttagattgaatatatttttttttggtagaaagttggattgaatatatagtccacaaggaaataaaatcttaaataacaacgtttacatttgaattggatgataatacttaacaattatacaatgtggatacaataatacaacattttgtcccaattgtttacttagaaattaatttagtaattttactgtttgtagttcacaaacatttcaaacaagtttaatgatacttcaatgtaacttttttatttcgacgggaccatttgctgccccactaggaaaaacaagagtcgaactctcgtgttcatgataagagatgacaagccacttgccttatggttcttggctcactttatctattttttcgggcaaaattggatattataaattcagacggagaagacaagatcaaggaaagtaaaagctcaattgttctaaaagcccctaaatgcttacaagttacaactattcacttttttggcctcgtagttctattccctcaagatttaagcctcccgtaaaataagacatttcactttcaaaatgtacaattgtgctgggtgtattaggtttgtagaaaaaacaattgacttcaggtagattgtaattgtagtgctaagattggcaaagtaacgcgatagcatctttgtgactcgtgaatatgtaatgcattgtatagtgtttgttttacgaaaatatgatgctctgtaaaatagaatggcaacatgctatcaaatagaatggtagcatgctatcaaataaaattccattgaaactcatcaaatttttgtttggaaacccctaactatgttatattgcaaatcaatgaaatatatgggataatttcatgttgtcaattatttactctctaaatttttatttatcactttctttacatcccgaaaactgccaatttgtcaactcgaatttgtaggtaagaaaatcttgcgaaatttcatattttatgtagttttaaaccgtgtttgattgtcaatgaagtaaaaaattaacagatctgttattttttaaagttgaaatcatgtagacaaattacctataaatgtaacaagtaaccggaaaataaatactggaaatgcagttaaatagagttgggcaaggtgggtgaaccggtattcacgtgggggcattgatcttacaatagccaagtcaacaatcaaagttgtaagtagaaagctggtataagttgttcaccacccgagtttttttcttctaacctttcatataaagtcttattgtcttatgttacttgtttaaatgagtatgtacaattgtcactattcacacccaaaaaataggtttataatttgatcgtttcaaacgtaacttttgtgtttgtatttttactttcatgtgaattttacttttacatttttgacttacaattgtcactattcacaaaaagtaccagttcgttaaatttgcttcggtgcttcaccgtaatagcagccaaatccacatttaaatataaatccgttttggttcaattttgcttagcgtcagccgtcaactacgtgactcctgcatcattctcttataacaaacataaaattttaagaaatgaaaatcttgttttctcctacgtatatgtaatgtatcatagttttcagaaatatataaaagtagcattttaacatgtttgagcaaatgtaatacttttgtgtcttaaaagtatactatcaaaattagacgagaataaatgaaaattgatgttgagaattatcattgggtttttattgggccaaacccaacacaatttctataaacccaaacaatttgagaatctgaaagaatatattccacacaaaaaaaaaaaaaaattgttattgaatgaatctagtgcacgactggctaatctcatgtctattaaggtaaaagtagggtctctcctatacaaaaattgaggcaaactacgaaatcaggagactagaagtagacattctccgataactttgagaccaaaagcgacgaattgttttatagcttccaaaactcactggcttgcactatttacgtaggtacaaatacatttgactttttacaaatacaactctacattgaatttttgactaattcaacatccgttcgtatcagtcaattctacattacattgactcaaattatactaacataatttgcccgccaaaaaagactttgaccctttatataaactattgagagaaatttgagaatcgacttggttggaatcattacaagatgactagaacttattactaccaactctagtttagagtttcatacacaaacaaaaaaattgcatgaaatttgatcagcccaaaaataactcaaagccccaaaaaataagttaatgaatgaacgtcacgtgaataacacgtgttggttttctcaaaaaaaaaaaaattttttctcaattctcgtaaaacctaattttcaatttcttcttccttttgttaatgatgataaaatttgcagttttgagttatctatactaacagagttaaaaaaacacaaacacagagatgaataagaaactttcatattgaattgaaggaatgaaaaaacaaattttacaaataaactagatatacaaaaaaaaacagagttacaaaaaaatcaaaactaacttttgttagaatttacaaccacaacagaggaagaagaaagcaagcttggataccaaaaccatagcctcgatgatagacatgattctgtatctcaaagtttccaaaaacgtcatcttcagattcaatctcttccactttagccctcctccaagtcccaaaaatttcaatctcgtcctttctttagtcgtcttccatatcgaaagcttcccttttctcatcatcttctcaaaattttgagctgcttcaaaaaccaaaatgtaacaaagaattagggttctgtttttgtttcaggtgttgttgttataataaagtcttcgaagagtttattttttatacaagctaaagttgagggtattttggtagttttcacagtcatagattcgaagcgcgtttccatgatatcaacgtaggtgttctgacgtgggagcactctgtttctccaaagaatttcgtggatatattttttaactcctttatatagataatagatttgtttttatatatacataccagttgtttttactgaatttattcttttttagtttcaaatgattatcctaattcttacttcttaggaatgtataaaattacgaatttttttaacgtcagattgatcggaaaaagattgtttatttctgctaaatttatatacacacagcccaagttttttttaatggaagacatacattacaatattggaataattgaagcccatgaaggaaagtttgaggcccaaacagttaaacaaagctgaaccaaattggaatttaaaaataagaagaactacacgattggtcgctagggtttgtttatttattcttaattgttttgattaaaattctagttactgccacttactagtaaataatattttttcttaaacttcatttcatgaaggtgattaactgttaacaaggtcatgattgtacattcatcttcactttaacagatgtgattcttgaacctcaaattatttttcatttaccaaattaaaatggagaatgtaaatttccatggaactttaaattcagtccgttgaaaaattaacatgttatttttttcattaataacatttaccaaatagacaacatatttaacttttcaataaaactgtgtactggagtttcttaattgggacatttgtggtattactattaataaaaaagaagattaatatggtaagaaaccaaagacttttgatatagaacaacatcaacatgagtagacaaataacttaatgctttaataatttgtcagttatacatctgatgacgaaagcattttcacattcacatgatgctttaatttgtcacttacttgacacaatacattatacatctataactagagacgaaaacattaccaagaaggaagacgaagagcaaagaaaagtttagacaaaaacctctttcgatatattttctgctacacaaaaagcaatttttcagaaatggcttctacaaaggctgatcagtttctcgagcttgttgccgaactcgatcgtgttaatacatcaacgaatgttgataaagatcaagtcaaggtaagtgtttgtgttaatgctctaataactttatatgtttctcgtctttttcaattcttctgtacacaaaaaaaaacaataattagtttgtttgttttactataaaattcaggatttggaaaagaggttgatcccttacgttgaaaaaaacgaagatgtcattaccaaatatcgaaaagtttttctacgtctaaagatggaaaaaatacaggatatgatcaagagaatcgatattgacaatatgctcaacccagcttcctcgtcacagaagatctcacgttctatggataggaagaattggtaatatatgtatttatgatgatcataaccattatggatcatatattatcaaattctcgtttatttcttccttcaaagcttttatgcaatatataatttggggtttattgttgtaataatggaggaagttgtttatctttctttccaaaatacgattctcataattagttaataaatcttaattaaattaataatttgttttctttcatcaattctcattacatctgtctgttgaacaaactccactgtttaactttttgatttgcttattgaacaaaatattatgtatatacgtcctgaaatgtctttttaaatgaatttttctgtaagtttattttaaaagaatgttgatgaatttcattttcaacacggaaaatttgaatatgtatctatttatatcaagtttatataccttgtatgtataaaacatcagaatcatccttccaatcatgtgaatacacatcagggacatccttccaaactttataaaatatttccttgtataaaagacggaaaagagtaaaatgcgtaatgaacatatgaaatcaagtgaaccaaatagtctaaaactttcaaaagcagttacatttcagaagtattcagattgtagaaccaaattgtgaggaacaacgatcaagaatgtttagggatcttgaactccaattatgattttgtactcttcttcacttaaacaattggggatctagaaagccaatttattttccctttctctaaatggaaaatttgggattataatacaaatctccatggaactttaaatccagtccgttgcaaaacaaattacagttgttttcataacaaaatatattataaagtagtaaaatagatttataacttttcaataaaactgtgtactggagtttcttaatcgggacatttgtggtattactattaacaaaaaagaaaataaagatggtgaaaaattaaagcaaagacttttgacgtagaacaacaccaattcatgagtagacatttaacttaatgcgtttgtcacttacttggcacaatacattatacatctgtcgaaagggttttcactttattatcttctacctctaaaagaattatcgtcgtaaactctagcaaatactcttcttcatttcaacaatatttatgaaaataaattaatttctcatttctctttggcaaatagagccaaaattttggcattagatggagaaaatcaaattcagtcagttgaaatatttgtgacaaattactataatgttctagagcttcctaatcgggacattggtggtattactattaataaaaacaaaagataaaatcaaagacctatgtaaagagcaacatcaacacaaaatgacataacttatataagcttacgtaccaacataacttaaataagcttataagagcgtatatgcgtttgagtaacaacatatatacaatttcataaatgtcttaaaatgtgtaaactctttttctatttaataaaagcttaccacgtacgttcagttacaacaacgtattcaaatataattactaaatgtatcaaaaagttcatccattcacgctaaatgtatctgttaagttattataagtccgtccatccacacgtattttctgttgaagtgatttttctcttcaatatatgcattaaaaatcacatataatatatacatatatctactactttcaaaaagaaaatacttaaaacccccatcaatggtagtagataaaatgaaatatttttgttttattataataaattgtgtacaagttgaaaaattaagtatcgtgtgtgtgtgttattaacccacctgacacaccacatctataaatagagggagaactttgcagaaaaattaacaaaagaaagacctagacataaaagtttccactcttgtgtcttcttcattccaagaagaaatcaagaaatggatcatggagaaatgagcactaaggaaactaccactttgaagcttatacccgggtacgaaaatgtgatggagctcgagcaaagaagacaagagctgaaggtaagtctttatttgaattgattctatatttttatatacttttttttgtctacaagtattaagattatcgttaaaaattaggctgtcgagaagaggatggaaaatgttattggagaaaaagagattgacgatctaaacttgacagaattaattgagttcgagaagaagcttgaagatatccaaagtctacagttgaaggtaagtagtgctcattttatcactctttaaatttattgtttatgtttataaaaatctattttttaattgatttgtgtagaagttggaaaagattccttggaaagacatgatacagccagccaaagatcttgtagttctgaacgaatatgtcaagtttaagattggagaaatgcaggctaggatttccatgcctcaaaacgacgaatttgatattaaaatggaagtaggaaaaaaggaagatttgaaggtaaaatgttggttaatttttgttttttctttttatatgtctacacaacattaattataacttcttaaaaatatagggtttgaaaatgaggatgaaagtgttcattggagaaaaggagtctgaagacatacacttggaggaattgattgagttcagtaaaaagcttgaagctcttcacccaaaggttagtagtgtttaacattttttttcttattatatatgtttattttggtctgcaaattgttttctaagtttccctttttaatttcgtgaagagcgtgatgcatttggacgacatgacagaagaaattaaagatatattcattatgaaagaaattgtgaagaaaatgatcgcgaagagggatcctaactcgtctaaaacgatgatcatccagaattatttttaattagaaattagtaacatataaattcattatcatggatcatatatgatcactttgtcgcttgtttctcccattacatatttacagaataatttgggattattttaatatcaatggaaggaacttatgttgttattttatattttaatcggattttctcataattaaaagatatttttttctaatggctattgcataaatttcatactttggttttcaaagtttatgtgtacatcgactactatgttaaattttgttttatatcaacttattgtaaataagttataaaaacatatgagatgatcgcctaaaggttacaaattataaaacatggtgtgtctttaaatgcgtcaaacataggattatgcatttttacaaaaaaaaaatgtttgaaattttttgagtcgtcgttaaattgatccaatggatataaaaagaataacatacaaaagagtttggtaagaaaaaatttagttgcggttttcgtcaaaaagacatagaaaatgtaatatagcaaagacttttgccgaagaacaacaacaacatggtaatacattattactgtctttatgaatttcacatactgaacaaacatctatatatggaagaaagggttaacaagaacgaagaaaaagagcaaatagaaattagacatccaataatgaacttagtccatttatattcgtttattgtgataacgaaaatattttgtttttataaagttaaattcttaatacttcataatcatttagagccattagcgaaggttaagatttttgttgttgttgctgttgtgatcgaatcttggataacctctgtaactaatcaatgggggtccaataaactgtatcaaaaccggaataaaccgaacaaaatagatattttattgtagtaattaaatgaagttactgtacaggcttaaaccctaacggtctaaccaacgcaatatttaattttgttatactgactaaacctcgaagttagtgcctttatacgttcgtttactattccttaaagtgattcttctcattccctttctactcgttcatttcaatccatggttagggttccaccttttaaaccctccaaagaaggtgatccaaagttggaaactttcaaggataatcttgattccatagtcaggtttgggattggcgaagaactcagagtgagctccacacctcttgatgctatggagcatcaatcaccagcgaaagatttagaatctgctgttgctaatcaaagtgatctaaaggggaaaacttctaagtatcctcttcttgacctttcttttaaagattctgttgctggttttgattccctcgacttgttttggagaactccgaactttgtgggatatatcgaggaacctcttgatatttatttgagagattcgttcaattacgtcggctctttccgtcatgtttctgtggctgctgaaccatccgtgaaagagtcagaatcggttgtttctgagccatttgtatctgattcgtctatttcttgtcacacggaggtgaatatgagagatgatcatcaaaaacataagggtgagaaggccaaaaagaaaactcttaatgatgaaatcgtgagcctatcgtcttgtagaagagctgaagagaagaagtgtgatgatgaagaggacaaagagggcgttgataagagtgtagatgatagtttgagtacagaagaagctacgatgtcaaaggtcattactaatatcatcttcaccctttgctctgatttcacaagttttgttaaacaatatatatgaaaatctgtttaaattttgcaggagcttgcttcagttccatttgtgaatattggttcttcggtattgttaaaagtctttataattctatcttatgtactagttttgcttcttctgtgttgatttcttagcaaatttatcttccttgaatcagcaggtgttagacaaaaaacagcagaagaatatggcaacaaagagaagaagtgacgagacgaaaacgtgtagcacaagtaacaagaagaataaaaacgtattggtgtctcctagaagattagaagcagaaacatggctgtctcttccatacccatatcatcattatccaataaaatatcagattatgcagagttcgattcagatgcagcattccgggattggaacagagcctttagttacatttgtaggtcaaaaccgtttaaaccaacccattggaggtattgttggtcttagtgagtttccccaagttattcaggagctttattctcttcctaatgcaccgccacttcccaacctcaatctccaaatacacccacagcctcatctcggtggtagagttcgaaaggagcagccttgatagcttatttgttcttgtttttgatacatgattttgaagttttaaaggcaactactctcgcaaaggtttttcgaaattttctgatagattgtatatccatgtttagttggattaaatatcaaagatctcttacagttagtttcgttcttaatccaaactactgcagcctgacagacaaatgaggatgcaaacaattttaaagtttatctaacgctagctgttttgtttcttctctctggtgcaccaacgacggcgttttctcaatcataaagaggcttgttttacttaaggccaataatgttgatggatcgaaagaagagggcttttaataaacgagcccgtttaagctgtaaacgatgtcaaaaacatcccacatcgttcagttgaaaatagaagctctgtttatatattggtagagtcgactaagagattgtcccttcggggacatctgataaaattggaacgatacagagaagattagcatggcccctgcgcaaggatgacacgcataaatcgagaaatggtccaaatttttttggatagaatttcccagcttttttgcgtgtttcagctctcatgatccttggccaatgggtgtagtaaattttctgcacattcattggatggaaaataatggttttagctttagggaataagaaaagtgtataggaaggggatttttgtacaatcacatttgaattaggtctttgaaatgacagggaatgaggacatatgatgaagctctgtcccatccaagaagttggccagtgttcttgtctcagattgtggtttggccctcacataaacagcttcataaccttttgggtggagggttaacttgattttgcagcaaagaagaggcttttcctttatgtattaggttgcttgtgaattggcccttgaggagaagaacgttaatctaaaaatctatatcagttatttttactcaactatatgaaacgatatattcgagatttatgtagtaaacacataatccaaccataaactcatgggacatttatatgccaagctttaatggacatgattgcatatattctaaattatttaaacaaaacttattttattattaaaagatgactgaaaagatgaatgacataacttccttcacctcgaataaccaaaattgtttgataatttttttaaggaaaaaaagagcgacaatagataagggattatatctttttatttgaatagttccgaataatttaggccaaaacttatttgtttttctgtagggaagataactccaccctcttcttcgagagacactatagagacaacgaagcctccagctctacacgtttcttctttaaatcatcttggagattttcgagttttttctgaaaaacaaccaagtcctccaactttagatctgaaatctccttcctattgtactttttgatgttctgttcttgccccttcctcaaaacctggaatttacaaaataataataatgtttggtagacataaaacacaacaaaaataatatataaaggcactaaataataatgtcatacaataaataaaactctaaattggataatgtgataaatttgggttcaagatccaatcctagtcctaggggttggttaaaatttgttggttcaattgtattttaaatcgggattctttcaaggttgtaaacattctctatataataaaatgtagttttaacataaagtaacttataaagaatgttaaatttgagacacataccttctcatacgctttgatttgttccaattctgccatgagactatcaagtttggcttgattcttgagaatcctagtttgccttgttgaagatcttactctcctagcactaacatctgtggaggggttgatcaagacaccagcatcgatactacatagcctcgcaagtgtatcagtcttcctgaaatgcctaaccatttttttgttagagagatttttgttgtttttgttgttatggttagtacttttactccgttttatagatggatcgggttaaatttgttcaatacataatgaaatgtctatctatgttggtaatttctttccactaaaatatttgaatttctttttacatgtatttattttcaactattaccattaatttctttattagaaaagtcatattcaacatgttttatcaaaactttctgtcaaaagatgatattagaactaaattcggacaatattttagataattcctcgtttgcgacgtaatacatgatgtcaaaactatgttacatttagtagtacttatcttgaattaaataaaattaagaaaaaaatatgaatggggtgttactatggcatatatctattacctctggatttcattctatatacaaaaatattattttaaaatgataatttacacgcgccaaatatgcgtaccagccacgaggcaaaaattactatataactttttttgaaaataaaaactaattttttgttttttcaaaataagatacaaattatacgtaattccttagtaaagcctgaaaaacatcaaactttattttggctaaaggacatcataaaacctactatgtaattgtcattaacgtttgtttaactaaccaaaataaattactgaatcttgaactataaattcgaatatagagaaaatatgaaattttgtaagtgttattagacatccaaattttaaaaccgcgtaaactacactacaatttaaaatcggagtatgtaacctacatagagcctaaccacctcctaagccgtatttaataacattgttatattatgtaaagatatgatatatatcgttaagtaatattatgtagtgaaaatccgtcacaaatcataataacttgtagtgatcaaacttcttgtatataatctactttgttctcgcgagcaccttaatcaatcatcccatttaaaaaatttctttttgctattaacatcttaaatgttaaatctatcattgagcaatgtaacagttctgtgtgaagaaacaaggaatcacttacttctacattgtctctttacaaaggaaatttggcacatgataatgcttcggtttgggcaatctccttatatctttgcagacttgtctattaccataggtaatcatataaaagttattatatatgaacaatgttcctatggtaatagaaattcacattttattaaaaaaactgatacgaataattcaaagaaataaaataacttttatatgattgtccataagatatagtcaaaacgcaaaagactttgctctaagaaatattaaaaagaaaaacaacaagacgaggattatttcttttcaataattaaaacattagtataaatacaatcacatgcttaatgtaataatgtgacagtttggccgagtggtctaaggcgccagatttaggctctggtccgaaagggcgtgggttcaaatcccacagctgtcaatttgtttttttctttgactcctttgttcatctttattttaaaatcaatataaacccttttcggacattctaaatattttgacccaacctaatgatattcattatttgtctaacgggtcaactttcaagtcttcaagtaaacatgatatggaattatatgggtcaactccaagtaagaacagtgcatgcatcttgaagacaaaattgatttttttttttgtttttaattaatggaaattttgaaatactaatgggtcaagatgaggttgtccaaatcaactgatatcatatatgaccagattcctcaatagtcattagtcaatacaaaatccataatcttttttaaaaatataatctttttattttaaatcgcctatttttttccattcatttgtccaatgtgaaaagccataaatcatatattaagaagttgtgaattgtgatcataggagtaatatttctatctgaacaaaaattgaattttgttttgctttttgttgaaagataaataaaatgtttggcagattgtttgtacagaacacaacttgttgataaaacaaattccatcaagacagctaatgagcttttgatagtcagagctttgaagacgtgttaatgaattaaactgattagacctaaaaccaaatatttagaaagaaaaaaatatgataattgttatgttatttaatcaatagtcaaatactatgttgagtaccaatcatttcagtttcaacgattgctactcttttgaccaataacaaaaaggtttttatttttcatttctcaaactccatttttgtttgtttttagcataaaaacagctagaatgtgagtttcatatgtattatatactataagaaatcatataaattaacgactagaacatattgttttcattctagtggtatatctgagtttgactagaacgtttggaggcagattaaagtgatttcgccttgtcaaaactactttgtatatgttatcaatcaatcgctcaaaactaaatcggaaaaaaactacataaataagatatggaaaatgatactaacacaaactagtaagtaagtagtcactacatattctggtcccatgaatatggcttacatagtacatacattgtgagattaaatgaatatgatatataatacaagcatataagcatgtgcatgactatgaagtgggaatacatttagtgcctttatatgcaacttgacagaattaccaattatgtgaatagtgaaacttatattgcgtcttggccttttcacatccgtgacatgatccctcaaatctatatcttcttgcggcatatgcttatatataaacatatgacttcgtctatagatttatatccagataattaattctctcataatatcttctccacaatttcaactcttctaaagtctaaaccatgaagttactctcaaagacctttttgatattaactctcaccttcttcttctttggcattgcactagcgaaacagagctttgaaccagagatcgaagctttgaaatccttcaagaatggtatttccaacgaccctttaggagtattatcagattggaccatcatcggttcgttacgacactgtaattggaccggaatcacctgcgatagtaccggacatgtagtctcggtttccttgctggagaagcaacttgaaggtgttctgtctccagccatagcgaatctcacctatctccaggttcttgatctcacttcaaatagttttaccggcaaaataccggctgaaataggaaagttaaccgagcttaaccagcttattctgtacctaaactatttctctggttcgattccttctggaatctgggagcttaagaatattttctatcttgatcttagaaataatttgttgtccggtgatgttcctgaggaaatctgcaaaaccagttctttggtattgattgggtttgattacaacaacttaaccgggaaaataccagaatgcttaggagatttggttcatctccaaatgtttgtagcagctggtaaccatttaactggttcgattccggtatcaattggtactctggctaatttaacggatttagacctgagtggtaaccagttaaccggaaaaataccgagagattttggaaatctcttgaacttacagtctctcgttttaactgaaaacttgttggaaggagatataccagctgagatcggaaactgctcgagcttggtccaacttgagctttacgataaccagttaaccgggaaaataccagctgaattagggaatttggttcagctgcaagcactccggatatacaagaacaaacttacttcttcaattccatcttcattgttccggttaactcagttaacccatttggggttatcagaaaaccatttggttggaccgatatcagaagaaatcggttttcttgagtcacttgaagtcctcacacttcattccaacaacttcacaggagagtttccacagtccatcacaaacttgaggaacttgacagtcctaacggtggggttcaataatatttccggtgagctcccggcggatctagggcttcttacaaaccttcggaacctttcagcgcacgacaatcttcttaccggaccaataccttccagcataagtaactgcaccggtcttaaactcctggacctgtctcacaaccaaatgactggcgagatcccgcggggtttcggaaggatgaatcttacgttcatttctattgggaggaatcatttcaccggtgaaattccagatgatatcttcaactgttcaaacttggaaactcttagtgtggcagataacaacttaacaggaactctcaagccattaattgggaagcttcaaaaactcaggattttgcaagtttcatataactctctcactggaccgattcctcgagaaatcgggaatctgaaagatttgaatatcttgtaccttcactctaatggtttcacagggagaatcccgagagagatgtcgaatctcactctcctccaggggctaaggatgtattcaaatgatcttgaaggtccaattcctgaagaaatgtttgatatgaagctactctcagttcttgatctttccaacaacaaattctcaggtcaaattcctgccttgttctccaagcttgaatcgcttacctacttgagtcttcaaggaaacaaattcaacgggtctatccctgcaagccttaagtcgctttcgcttctcaacacattcgatatctccgacaatcttctcactggaaccatccctggagagctgttagcttctttgaaaaacatgcagctttacctcaacttctcaaacaacttgttgactggaaccatcccaaaggagcttggaaagcttgaaatggttcaagaaatcgacctttcaaacaatctcttttctgggtctattccaagatctttacaggcctgcaaaaatgtgttcacactggatttttcgcagaacaatctctcgggtcatataccagatgaagtcttccaaggcatggatatgatcataagcttgaacctttcaaggaacagtttctctggagaaatccctcagagcttcgggaacatgacgcatttggtctccttggatctctctagtaacaatctcactggtgaaattccagagagtctcgccaatctttcgactctgaaacatctcaaactagcttcaaacaacctcaaaggccatgttcctgaatccggggtgttcaaaaacatcaacgcctctgatctaatgggaaacacagatctctgtggtagcaagaagcctctcaagccatgtacgatcaagcagaagtcgagccacttctcgaagagaaccagagtcatcctgattattcttggatcagccgcggctcttcttcttgtcctgcttcttgttctgattctaacctgttgcaagaaaaaagaaaaaaagattgaaaattcatcagagtcctcattaccggatttggattcagctctgaaactgaagagatttgaaccaaaagagttggagcaagcaacagattcattcaacagtgccaacatcattggctcaagcagcttaagcacagtgtacaaaggtcagctagaagatgggacagtgattgcagtaaaagtattgaatctaaaggaattctctgcagaatcagacaagtggttctacacagaagctaaaacattgagccaactaaaacatcgaaacctggtgaagatcttagggtttgcgtgggaaagcggcaaaacgaaagctttagtgcttccatttatggagaatggaaacttggaggacaccattcacggctctgcagcaccgattgggtcgcttttagaaaaaatcgatctttgtgttcatatcgcaagcggaatcgattatcttcattctggatatggttttcccatcgttcattgtgatctgaagccagctaatatactccttgacagtgaccgcgttgctcacgtaagcgattttggaactgctcggattctaggtttccgcgaagatggaagcaccacagcttcaacatcagccttcgagggtacaattggatacttagctccaggtaaattactcacaacacttaattttcaaaaccctaattatgccatcgacttacttgaaatacactcttatttttcatgaacagagtttgcttatatgaggaaagtgacaacaaaagccgatgtattcagcttcgggatcataatgatggagctgatgacgaaacagagaccaacttcgttgaatgatgaagattcacaagacatgactttgcgccaattggtggagaaatcgattggaaatggaagaaaagggatggttagggttcttgatatggaactcggggactctattgtttctctgaaacaggaagaggctattgaagactttctgaagctttgtttgttctgtacaagctctagacctgaagatcgacctgatatgaacgagattcttacacatctgatgaaacttagaggcaaagcgaattcatttcgagaagatcgtaacgaggatcgagaagtttagcagcaaagcttttttgatgacattttttcgactttgccaaactctgttacgaaggttgaatactttggacgtaaaacgttctgattttgcttttcgttatgtatttctgttttatataaggttgaaatttggttttgatgaactttttcatatacaaatgcattaggctacacatggatactatagtttcttattgcaggcagatcaggaataaggttcgtcaagtttttgtcatcatgatggagatgacgtttgtcccttccatttaatcatgaaacaataccactgctagtatcggacaataggcaatctcacgacggttatcgagaacacagaagatgactcaaagatcaatgccacacaagacaattgtgtagacttgccaagtaatagctgtgaaaactagagtcattacattttcatctccccgggtaatgttttccattctcggctagcgaaccgcagaaattgcaagactagactgatagaaaaccatgtcagtgactgttgagaatgaattcttctttaaaactttgcaatttcatataattctttaacatcactatacatttttggacgaactacatattgtttgcttaatccttacaaaacaaaatctaaagaatatagcacaaaaaattgaaaactttaaatcggagacaattacttcgcttttgtatggcaatagagaaaagtagttgagcgatgttggtctatgcggttcttggttctgcctttggtgaacgtcctttgaagctgaatgtgcacaagaaaatgatcaacaaaactaacttgtctttttacttattttcctttgctttgatgcgaccacaatgaagaaacacaaagaacaaacacttgtttttgcctgtaaatgacagaaatcaacaaagttttcgttagattttttatgagtggatggccaatgagaatgatttggggactcacggtttctaacgatgaatctgaagaagaacgaatgagaagcaatagagtggaagagcgatggcaatcccagctatgaagttagagaagagtcgcttgttgtcttttgtgggtacgaaaaccgtcttgagtgtgttggttagttcaaagagacggtgagatacctggcgaacaagaacaaatagagatgtttcagaaagcttgctaatagaaaatacggggagagaagaagttacggtttcttacaaggacgtatatagcagttgtcagcatgaaattgagcatagggtatcccggaataatagagagaagccattttggttgcccgtcaggcatgtttgatctgaaaattggtgtctttgatttaacaaatacgcttccaggaaaagattaagtcacagaaaacaaaccttagccatatatgaaactgggaaatgtaagtctctaaagtgatcttgccaagccacctgcgcagagaaatgtaaagagttttacatggaaatgaggcaagcatatcaaaccaggttttagtttaaatgtaagtacgagttgactcacgcaaagagagtcaatgagacacttcgaagctggtgggtgaaattccgaaggcatatgtaaacactggaacccagaaatcaaatggtgagtcatgtttcagtttcagcaagtgacataagagacaaatataaagaccaataaaaaaagagttttatgcacagacgtgatggggatccatgatgtgtacggatgatacatgttgtaactggtcctgtccagcttgtagatacattcataccacacatagccaacctaaaatgtgaccaaacgggaaaattatatcaatctgtacaatgggaatggtgcaattaccaagctaaaagatgactaaatgacttacaagcacagtaatagtaacaatagcggcctttatggatagtcttttcttcgtttcacagtcctctaacttctccatccatctctctacctagagaatgatcccaagttttgaagtttattacatcgacactacaaaaaacggaaaaaaatggaagtaagaacttacagttgggtgataataggcataaatcattccgatgatccatatgtagcgatcaaggcctgatctaaagtgccattcatgcagccgatgaagatcgggcttggcagggtcattgtaacctggagttattcacaagtaatatacaaatattagaaacttcttctaattccattatgaataatctcattccacattgggaattcaatcaatttcggataagctaaccacctagcaaaaatgttaagggaccccaaaatatttcaaaagctccaggaatttcccacaacaaaaagacaacgaggaagcatgaaaatatcttcagagccatcaccgatcctatctcattgtacttgctgaagatacccagagctccatataccattagggtgaaaagagtgtgcattgggcagatgtagtataacatatagtcgttgttgagaacaatacagcaaaacgctacaaagaagttcagcctccacatcatctgcaagagaaccaagattttagatgcggattatcaagtacaatgacgagagctttttgtggaatgaattgtatcacctgcgcaaaacgtgcaacagagaaatcctttctgacatagtagtaagagaagtttccaaaaccagtcatccaaacataagcagcaataaagatacggattgcgttgtatatctcggccgcagcaaagtagtgatacattaagaacaaaacctgttaaaaagtaagtcatgagactgtatatagccagcggcagtaagagctccatacagttaccggccagaaaaaggaaatgatcatattgggaataatcaagagaaacttgcctgcatccatcctttccattcttcagtttggtggcgattaaggtaaagaatggacttcccagatatgggtgacttgtcattgtgttttctgagagatgtcatggctgatactatgatgagaagaacgtagagaaaaaggaaaaggtcgcggttgtaattctgtcataggaaaccaagtcttatgagcttgcgttcacagaaaaagcaggtgaaagacataggtaccttggtagaatctccaagcaattctgtgcggtcacagatatagaaatatattaagattgccccaaattccgacctacacaagattatgaatgatagtataagataacaaacaaatgcatcatcacttcttggggttaattttcacttacattgctctcaaggttgctcgatgttccagcaaaaatgaatcttccatactcaaaaacctgttatgtcataaattatatacaccctagcatgagaactgctgaagaattgcaattaacaaactagaaaacttatgagctggtaacaccaacctgattatgtttgttctgatagatgaattatgaaactttacagatggtgatcgggcaagacctccctccaacagatcagctttgtcgtcgtccttctctgctacgtctcccaattcaactagattattatccgagtgactgcataacaagaatgcaacactttttcaagagtaagtcggaagagaggagcacaatagagagggtgtaaactctgctacattatagagagtatcacattacaaaaacttacggtttcaagggaacccaagattttctgtactcaagtaactccgagtatatccaaccaacaaatattgggattactccaagaagaaaagatacctacaaaatttaagtacaaagttaaatcttgtagatggagatcagtatcaagccaactctaaaatgactcatggctactagaaaactagaaagaaagacttagttttcatgtacttactacacttaaactttgatcattttgagcttttatgatccataacattgacaggaatactagttcaaaaaatggtaacataaaagtttcaggtaagggttggtaacatatccatcattgacaggaatactacttgcacaggctctgcaacttgttcaatctctgaatctctcgattccatatagatttcagtaaatcccctccaaaaatgcaaatgtgaaagattcaggcattatacttgctatgtcaaagatgctgatgagaccaaggaacctgtcatatgctttaggctaacttttgaagattaaaagtcactctcttaggtttcctcctactaaaagtggcgtctttcactaaactacagtcataattccttccagttaaagtctcaaccttttcgaataaatcaacctaaccgactcaacattgaatcgaaaattcagttcgagtgtcaagttttctggagaaattgtacctggcccggagtaattggtccaggatccaccatttttaacgatctctattcaaaacttccgaactgcagacacaccaaataagaagagcaaatttatgtaaatcgaaagagaaatttaaaagaaaccattcagaaaaatttcagaagcaaaatcttaaagatttgaaattaccagagagagattgagacgttaaccgacgaataaagaagatgatctggttatagtgatctctagtagcagacgatcatcataaatatgagagagagagagagatgtgaaagtgtttgcttgaagaagagagaaagacgttcggcgagttgtcgttttcgatcgccggcgactgatttttttccgagtctctggttagagacactgactcgacaatatttccgtctccactcaactagtaaagtttcaattttttttccgtttgccttattttattattaaaatctagaaaaatataataatagtacttccaatttttacttttatattctgtattaatcatcgtttgaatcgtatacttacataacaaatgatattttagtttaaacataaataatatttacataaacactttagtattatataatttgaaatagagagagtaactcgtttaagttttgactatggaaaatgattgtcgaacgtaattagtaatacaataggaataattaaactatcgtggttagtggatccaacatgtcctgaactcaagatggacttgtcaagcaactaacccgtcacatcccttacatgatactccaagggataatgtccttaacaagtattaaattgtattccctctgattttttattatttgatgttttggattttgtatttgttccaccaaatttaatgttttataaaaacattattattaattttgtttgtgaccaatagaaaaagagagaagtaatagtgatattattaaactaagaaagtaataattcaataatataaaagttattttatcttaatttgtgtgcaaaactcaaaacatcaatcaaacttcatgtaacagagagaatatctaatatatacgatcacactcgttaggttggttccttaattcttacgcataatcaataagtggtcggacgacgcatgagacgtacgaaattaaaatgaatttctatgtaaaaacctagtaattcgttgaaatgagtgagtgatttggtacaaatcttatatattgcatgttaagatatatgctatgaggtacaaaattcattttaattaaacatccattcatacattttatattttacgtgaggctgtgatcatatattcttcagttcgttctaattataccttctagtctaaatctcctttcaaacacccaaaacgttttatttgctttagtattcgactatatattagatatgaagttatgtcattctcctcattaattgttaatatataaagcaacgaatggaaaagagagagccatgaaggatctttgcttccatatacaatatgcatgcatgtaacaaaattactccataacaaaaattattgtaataagtcgaagggactccatatttatgcttaattactacagtatatcctatagctagttaacaaaacatgtataatatatacatgcaaaaaataaataacactatcatcacttattatgcatccaagttttgttctatatttcttagcagaaaaaaaattgtttctatattatattatatcatcaaggctcttgtttgaagaaaaccgaaggaaacatctccttcaagagctcgaactcactctcctgttgatgaaatccatgttgctgttgatgataactagggttcacgttcacactagcgtatggcacacggaagagatcatcatttgagaagcttcttggagtattgatgatgagatcggagaatattggagacgatgatgggttataatcagatgcggtggttccagagaacattgctgtccgacgattggtcgggatcggatggttgtgttgactctcgtaggttgtgatgacgaccgttgggtcttggtaagatctctccactctcttcttcacgttgcacttctgagtcgtgcatctatagtaactcctgttcatgtaattgaaatatagtatattgttttagcatgtgtgacttgtaatgtcggttacaaaatttaaattttcttctttgttatatagttataaacttataatctataggttataataaaacaagctaagtgatggacttttcaaacaatgttagagtccatatcatgatgaatggtaaatacaggaaacaatttttcacaaagaacttgaccaaaaaactgaaatatctgtatcgatgtgtaataaatgatataagaaaaacaaaactgaaataattagaagaataattaaattgaatgatatgtatatgtgaatgtgagcaaccatcataatagcattttcaaaaaaataaaacaaatcacatgatggtataagaaaagttcttgttttaaaatttctggtaacttgaaaattattgtttgaaatataaatgtaaatataaatccagaattagttaagttgaaacaaaagatcaaatcatcaataaacaaaactaaaatacaatattcaaggattcttagaccttggttggagagagataagtgaaagaaacaaaagttcagtttattttagtttttcaaattgataaataatgcttaagatttgaaaaagccaaaagctaaactcaaaactacattttgcgacattttgccatacttaatctattttcgtatgtaataatcgatcagttaacaaattatatattgaccgaataaattacctcggataaggactgtttttgactgctttttggccatactttctccaacgatagccgtcttcgagatgatcaacttcggtcttagtcatgaacgagactcgtggctcttttttcttctcctctttcttctttgttttaactctggtgaaccatatgttactgatcaattaaatcaatacttaactaagttggaccatctttaattaatggcaccgtaccgtacatttgactttgattcattgaactatattaaactaagataagcatcaaatgattgttaggacatatgacacaagaaatacaataatcttaaggtgtagtctgccaaaaaataaatgggacacgtctttttgtttaagtggtttctttagggataagatttatacatcaataattataggtacgaacaaatgaaataaataatctttgaaaacaaaaatcaggatagaatctcaaatattaaattgtattacagaaaaaatatgaacgaaataacttgagttgtcattctttcaattatgaaacttaaattctacctaaaaatattaatgtaaaattaaatattcacaagtacatatatacttttatcaaaatttaaatctcgacgttgttcttaaagatgtcattttatggcatgcaaactatatactttatgttagtctaaaaaaattgaaatcagtattgcttagttagttcatgaaaataattttcaagcaatgaaaataattatatttgatatgggcctcaaagtgaaaaacaagaaatgtgtttttttttctttctcgtaattaagatcagagaagttttttttttgttatttggtaaataaaagcaaaagaaattagtcaaactgatcatgattcatgtgaattctaaatatatttatcttgcttaactaagtaatttaattaggataacacttatgaaacttacactttctgagagcgttgatcatcttctcctccatcgcgaacttctcttttcttccggatcttgccggaatcttctcctggatgatgatcggcctcacttgaagaaggagatgctgaaaccctaacttcactcttaatggttgcacaaccatcaccgacaacttcatgactcttttgactactattataattataagcattatacaaaccgttctcttgatcgagggaaggattaaaaaagtcagaagaagatggagaaagctcgaaacccaactcgaaggctccttgaggactcaagttcttcgagggtagatcaaaacctacttgtgatgatgagatcatgtttgcattataagcagatggaccagaaacgtaagggagattaatcatattttggttgttgatattgtaatgattatacgatgaagtgtagtgatagttgttaagatctttgatttcatgagacatgacgaagaacaaagagaaaaaacttaaaccaaaaagaaagaaaaagaaaatgacaaagagaggagcgtgaagaagaagaaaagaaagaaagaaacaagaacttttttacgttaatgaattttttagtcggtctaaatttggtgttaagacttttgggtcttctcgtatttatgccttttgaaaatatatattattttatgtcttgctaaataaatatagtaaatggcgttttagcatattttattttgtcttagatatatacaaatctaaggttgaatgaaagagtattgaagtgtgaatgattcaaaaagagttttggggtttgaatgacttttattgtatttttaaaataatgataacttttataaagttgagttgacaagatgcgttttacctcccaaatcgagagttacaaaagtggcctcgagtgaggaaacatatacttgtcattttgtttcttaaacgtttaatgtgaacatgaacataaaaggaaaagccattttatcatcataaagaaacttcttttaagtctgactctgaccaagtaaaacctgaaaagatggttatttttttacctttttaaagatgtttgggtcttaaaagtaaatgtttagttatttaccattttttagattgtggaataaggtgggaacaagctttgttgtagaagaaggcgatgatgctgactaatagttaaccggtaaccggaaatagtcagtctccggtcatctttatgtgaagaaggaagagccaagtcaaaaagtcaaagagaattgtggggttattaggatgacacgtgtaattattggcaccggcatttgaccgtaaccgacacattacctggcacgtggtggactactggatttgtgttctcaaaccctaataaatatcagacgttagtctatcaatttaatattccaccaaagtcaaggtgcaaatgcgacaatgttatacattacattatattcccgtgtaatttcgaccttagttacaaccaatttacatgaaaatcttaatttttataaaaaacaatatacaaaatgaaatttcttatcaggtgcttaaatcctttattaaagtgattcatattgtaataagcttggctaatagcaaggacgttaaagaaagattatatgaatcattttgcattatgtataggtttagattttatctgttgaaaagagaaatatgatcgaaatactgacgatttaccaacgtcatcacgattcacgctgcagaatctcttttcagttttcacattagaactttccccaaacattaaaggaacgttagagtaatagaaataactaaatatatgaactacggtcaaatatcaatgctttaatatttaatacattttttttttgtcaacaaaacaaattattttattttgggataaaaatgtgaaacatgatcgaaaatatataggaaatgaaaaagaaaaaaacagagagagagagacatgattcctaaccgaaaatgacaatgagaagtgaacagaaattgactttacataggtacagtcaaatacctattttccttttatagatttatacctatataataatgtatacttataaactgttcatgtgtctggatttttttgttcaaattacgaatctcagcttcatgcgatctgaaaaaaagcattatgcatgcagctgataggaatacttgattaaaaagtttgctaacccttgtccctttatcaaaaaaacaaatgatataaagatttaaattgcaattctaatgtttccgaaaaatgcgaataatgatgaaaaacgttttcaagacaaaactacgattcaagattctcgatggcccaaagaaattaaagcaactcagccatgatgctcaaaggaccaaaacttcaataactactagctagttgttttgaatacaatgcaaatttaattgggcaatgcaccgaacaaaattagtcaattctaaaaaacacatttcaaaaataataaggtcacatttttgttggcttaacaaaaacgcaaacatctttaaaacacatttaggaacatttttggggctgttattaggaagataattaaagcttaattggaaaagatttggcttttgaaacttaaaaaaaaataaaaaaaaaatcagcccatagtatattgatacacttgttcacagcttaatttgctgtaaccgttgtgtataatctggcatcttcatatccaagaggtttagtatattttcatttctgtaaattacctcagtatgcagtcaacctgacaaccactctgtctatatgagataaaaaggaaattaaaaatgaatctttatagagacaaaaattatatgttcgcagttgaaatttacgaccaattttcgtggaatatgtacggatacaccaaacttcttcaagatttttgttgttgagtaggatttttctctcattatctttgtttgaaactttgaatagttgtcatgattgagaaagcataatatttattatttgaaaatattaaaacctattaaatgctaacataaatgattatgattctataagatatgagaaagtgagaatgagattgttgacctacgccatagttgaacaggtttcttgataggtatatatgtgcaacatagtaaaaataataaaaagcatcttacatatattttttaataaatttttaaaacggaggaaagataaattcattaaaaaaaaaatataagtaaatagagtaacaaatatcaaatcttaacatttacattaacatcttttgaaagattttgttcaaaccagagtatcaatcagaataagatacacatgaaagaatcatataacttctttattctcatcatcttgggagagaaggtgacaatttctgccataagaaaaggcccaagaaaaaacaaattttaaactggttcaactatatccaaaaccgcggattttccactgccatcttcaatcatgttgtaatgtgtattactaaacagaagttgcggtggttaaatcaacaagagtgatccttccactttgggttcggtcaagcttgtcaaactggttacagatttgtataaagtcctcttgggttattttctccatctgctttagtttgtatattgcaaactctgctaaactgcaaaaagaaaaagcatagtagaaaactataatacactgatagaaccaagaggatcaatggactaaagatcacatgatattagtcaaagacattcagggaatataatagtccacaagcgttagttagataattagggtatgtgaatctactaaaatcttaagctattagaattgaatctaactagagaatggttcaatatcaacgaaccacctaattcaaaaactggaaagggccaatgaggaaaatttcaaaacttttgtaaaacataatctttgaatatatatttatgaaaacgctattgttgatatataataattcttctctcttgctaataatgtagatattttttgtactgtatgagtcttcactcatcactagttcaagaaaagtagaaaatacacatatatttgagaatccaacagattattgaggagtaaattcatcaaagaacaaaacttttggtgcatgaatcaaatattgcgaattcgtacctcaagcgaccatcgttgtcaatatccgcagcaaagaactgagatatagatatgctctcgccaagcactttcttggcccgctctctatttctcttatcagctcttgcgtcagccaaaaacaaaaacgctcgagcaacggctaaagtagaaacaagcaaccaaaccgcagcaagaaacgtaccaagccatgtattaaaagcccgatcaccaaacccaactgtagtaaccatcataaccgagaaacaaaacgaatccaaccacccgattttcacaacaaaatgcacaattaaaaagccacaaaatgttacaacaaaaaagtacaaagcaacagcaacaggatgagtctgatacgcattgtcgctatctagagtcagccaatagataagcacacctaaagagagatacacaacaagcaaagcaagtgcttgtcttgcaatggatttcgaaactgattgctctgtttcctggtcaggagccatatcagtagctgtgtcgtcgttgtgttctggtaaagaaaacagagacggtggtacgttaggctccgtaaattgtaggtctgtgggatcggaggatgaccgaggtaatgagccgaagagtaatcggtttttgaattccgatggagtcattggcatagaaatcgtgacgtcgttgttctccggtaatggtaacaggtattggtgtaatgggtccttgttgttgataaatcgattgacacgatcttaggatggttttttttttataattagaatgtgtcatattttattgagatgattaatattgtcgaggataaaatattgagatgattgtaacatgatggtggtttatagttgacttgtagctagtatttgattaacgaaccctatgtttttgtttatattttgtgttgtaccaggggtgattcggatttttaccatcagagttctaatgggcatgattctagagttttctattcaaattacgagtcatatgcatgtagtcatgttgatctgacaaaaaaagaagaagaagcattatgcatgtagctgataggaatacctgatataataaattatattgtaattctgtttttttcgaaaaggcgcatagcataatgatgaaaaacgttttctagataaaactacaattgtagattctacgatgaccaaagaaagcaactcagtcatgattctcataggaccaaaacttcaataatcagtataccgaacaaattaatccattcacgaattagaccgttttaatttgttttggttgtagattctttccactaacaatatggttaattggttatggttcaaaatgtatttttttttaattgaaattactgtgaccaatatttttgaatgataaacaaaaaacggttttgtcggtgctagtttattttgtccgtagtcattacccaaaggtaggtatgtgacaacatatcccataaaaaaaagggtgtgttggcaaaatagtcactttttcaaacttaattggaaaagtaatcattttactattcataatttgcaaaatagtcacttttcactgtttgattcgtacacttagattgtacaccacttttagtgtacaaatgtaaagtgtactctgtgtatttttatatacatttgtacactaaaagtagtgtacggtataagtgtacgaatcaaacagcgaaaagcgactattttgcaaattatgaatagtaaagtgactacttttccaattaagtttaaaaaagtgactagtttgcaacttaactctacaaaaaaccctcttatgttctgaatttttaaattgatgaagatataggaaatcttcaaaaactaaaacacaattatttgagcataaatattgagtaagaaatatcaaatctttacataacatttacactctttcgaaatttgtgagcaatagatttggatcaaaccaaagtatcaatcaggaattaagaatatacacacatatgaacgaaaccctataactcctgatcctagtcatcaaaccaaaggaaccacgaaaatcaaacttcttcatcctctcatgctataagcaagaaaaaccaatttttttaaaccggttcaactgaaccgaaaacctcccatttatcattgtcatcttcaatcatgttgtgatgtgtgttactaaatagaagttgcagtgggtaaatcttttgtgctgctttccaaaagatctaaaagtgtaatccttccactattggttcggtcaagcttgtcaaactggaaaccgatcgggttaatgtccttttcggttattttgtccatcttctttagtttgtatatcacaaactctgctttactgcaaaaggaattaaaagcttatttgaagatttaatgatactgataaaactaagagaacattgtaccaaatattatggtactagtcaaagatgttcagggcatcatcttaaataatagaggagaaccgtgatttaggtaattagcgtatacaaatctctgatggaattgaatcccttgagagaaatgctttgatatcgagtaataaacggtgcaaattaatgtgaatccttgagttcaagaaagcacgttttaaacatgataatccaaaatttgtgaagctaatgatcccaagaacctgaaacaataatgaaacttgacgactaatatcaaataactaaagttttgatacattctaagaaatgggaatgcattaaacgttgcgaagaatcaaccggaaaatcataaatataagttttgtcctttcaagagaatgctttgatatcgacctatgaactagttcaaaaacttggaaaggataaaatggtgggaatgaggagagtttttaaaacttttgtaaaacaaaatctttgaatatgaatcctcaagttcaagaaaacacacataaacctgagaatccaacagattcaagaatcttagaaactaatgatttcaagaacgtgaacaagaatgaaacttgaggactaattatatcaaagaataaacttttggtgcatgaatcacacctttcaaatcaacaggaaaaaatatatataagtaaatggggaaaagcacaggatttgataacgaaatgaggaaatgagtacctcacgcagccattacagtcgatatccgcatctaagaactgagagatagacatgctttcgccgagaactttcttcgcccgctccctattcctcttatcaactcttgattcagccaaaaacaaaatcgctcgagcaaccgctaaagtagaaacaagcaaccacatcgcagcaagaagcctaccggccaaggtattaaaagcccggtcaccatacccaaccgtagtaaccgacataaccgagaaataaaacgaatccaaccacccgattttctcaacaaaatgcataatcaaaactccaaatccaaggcataacaccacaacacctaatgccaaccctactttcaacctaatcctcatcctccctttcttgacatcgattatatacgatctcactttgtcccgatcattcaagttcaagctttcattcctcgcagtttccaacatatagttttcttgaagatcaagaacataagtaaccatcccactaagcaatatatccataaaaccaaacccaacaagcacaaaaaatatcgaaaacagcttggtcaccacgctatccggcgttatatctccatacccaatcgtacacatcgtaacaatacaaaagtacaaagcatcaacaacaggatgagtctgcttcacattgtagctatctcgattcaaccaatagataagcacacctaaggatagatacacaacaagtaaagcaacagcttggtttacaatagttttcgaatcagattgctgatctgttttgggatcattgggatgagatatattgttgattgcagccatagcaggagctgttttagaccggtggaaattgatggtcggtttagatttccgaaccggtttattaggctccgtaagtgggagaaggaggtctgtggaatcggagaatgaggttgtggcggaggatgacgtagaagggttttgagagagagcatcgatgggaagagatgattcttttctagaacgaacgaatgaaccgaagattaatcggtttttaagttccaatggagttattggcatcggaattgtgacgtcattgttctccggtaatgttaacagagacggtggtggtgggttgattcttgggttcatcaagtattggcgtaatgggtcatcgttgttatcgccgttaccgtcgttagccatctgggttttcgccgggaaactggaaagttgagagatttttgaaactagggtcgttttccgataatggtggagataaaggaagaagctttttctgtctgaagcccgaccaaaggttgtaccttttttgggttatgatctgttttgttttttttatgcttattcagtgttatttattcttgagaatcgttcatagtactatgattttataagattaaagttttcgaaaaagacaaattcttttttttttttttttttgtttgtttgtttgttacaatgtatcttattttattaagatgattgataacatgaatagtttacttgtacatatctgattaacgaatcctatgttgatggtaaattaaaaattggacccataacattcgtatcaaacgaactttaatcaaatgttttttttgtccttaatctcaagagatgattgtaacatttaactcaatgttagttaatacacaggaaagtaaatttgtcacgttatatattgttaatgaattctgcagggtgagattattactattggaaatgaaagggtcatatatcctatcctcgattagttagatacactaaccaatttgtcaatttgtgcataaaataaattaattgaaagggtcactttgtttgtcaacggccggacgtgtcattttcgccgattcagatgacgcctggtttcgtaaatttggatttttagataaaccttttcaatttttttttattatttttgaattttgagaaacagaaaacaagcaaaaggactatgtccgctgaaaaattcatcagaaaattcaagtgaacgaaaaaaaaattgattgaatttgcactaatggcaatatatcagaataaaatgttggatatcattctattaaaaataaaaacccaaatatcaattttctcaaatggcatcatcgacacaaaaccaggtctattattgtaatcacttttaccactaaagtattgtgttattttagtatctctacttgtcatcttcacaacacgtgtaacgaaaaacacattatagttgcagtctagatcaatcatgtagacatgtggagctcgaataaagaaaacatgttcatacggcatcaaagatatgtttacttttgtcatctgatcacataagtattaagtatatatattttactcgtcataaatgtgttgtatcttaatcgttgcaatgtaaacagtaaaagtgaaaactgatgacaagaagtcgaacgtattaaaaattcgaatgtagtaaaatcaggagatattattcgagcttttcttaaggctaaggcatattaacaaataacaaacaaagtagcttatactacagaagaatagttagttgaagcaaaaccattaagaagtcgtcaaagtaaatcttgttggctacgtctgaaactctctgactgctgattctgaggacccgagtataagcggtaataactgcttcctgattcgtttagccctggaggagtccacatacttgaggtcccattctgagatagaaccacaagaaagaaataccggtttaaatttcgtataaacccgagaatagttgtaccaaaccaaaatttcaaatgctcacacccctaagtgagatgtaatgggatttttccttttacctgatgctgaagtgatgccaagtgattgctaaaccgtgtgtggaagtcatcttcatcgtcaaacctcaagttcgcagtgttatgatcacttaacatgccacaaccgtaagcagaatcgtaagccggaccattagcggaaccgtaagcagaactacgagtgtaaggaccagcagcgagagttggtggacatggataactgtctctgtgcaaaggaagcggtgcaactaaaggacgaagatggtaggcgtcgttgttaagaccaccatgttgctgaaatgctgatgctggcatgtcgtaggtattatcattctgtgttggcagagagtaaggatagttcatcatattaccataatgctctgaaggaacattaggctgagggtaaaggtggtggttcatggcttgtcgattcatctgtggtgcattgatagaagcgattagtctagtaaaaaaaagtcgtttaaagatggataaagatcggtgctttatgagaaatagagttacctcggtcatggaaactggtagcctacgaccaagtgaagaggcagcatacattgactgattgagaggagaagccgagtaccaagcattcacatgttcccttgtgaatgcttgttgatgctacatcatatggccaaaagaagcacagatttaagctgaagagtatctcatactatgacacaaatgaaactgttggtttgattcagagaaggattcttatagataggttgagaagttggaagaagcaataaagttagcagtttttctgttaccatagagtcgggaaaggtattcaaatttggcatctgaagacttcgttctgcaggagccatcacaggattgaacagctgactattataaaatgtgaaatctgtagcagatgaagacgtgtactgattttcttgagtaggttctgtatgatcacagtttggggacgaattgtaattacgagcggcatttgagttgacttcatatgccattttttcattagcaacattcattcttggttgttgttcttcctcttcatctctgtgaaaatgtttatgagatcattagatcattaaaaaggataaagctagaagagcagataaaaaaaggcttaccttaagttcaggtgtctgaaagacaaatcatctgcaggatcattcaagaactgtgatgggagagccaagctttgattgttcataatcatatgtacttcgccagaaccaaaacgaccaaacttcaaattctgtaagtcgctattacattggtctgaattaacaggcaccgacggatctttggctgcaataagaacaaagggagcatgaaacaacactatcaggaaaagaaaacatcgcaggtttcagaatacatgagtaaaataatctcacttcgattgttctcacaagaacttctttgcacttggttagtctcatcatttttgttattgtaattgtcacgcaacaaatgtgagcctccattgcgaaatatttggttggataccgaaggagattcttgaagttgatctcttctagcagcaggctcattaaatgagttagaaaatggattaggagcaactggcttctcaggtaagaggcaatcatccttgacaggagctttagttacactatcttttgatgaagctgatgtaccacatcccaaagcagttaccaacgtagaagatggcacagataacgaaggaactgcttcctctgagcttgttggcactctcttagtttcaacatttgatatagcactgtaaagacagagagagatagtgtgtagtgtttacaagcaagctagtgaaggtaaacatgtcattaactttcataccatttcatcgattgccaaaattaacgcatttacaagagattaaacctgttcaatgaagaaccagccaaatgattacgaattcgttgcacattactcgttcctgaaccaaacccattgacaataactttagacatttgttgatatatagaaccactattaacagaaggaaagataggtttaatgcatctcagtaccataagagttaagcttgtttcctccattttgatcactgccattcttagatttgtgatactggtttctaccactaagtctttgaatctctaatgcgtccttggcctgggaaaaataagcaaataagtgcaacaaaacttaaaaaggttcaagctttacattaggaatgacacaagaaacaatatagtacacacaaacctctttcttcttgtctcgtttactcttcacttcctggaaactatctggaatcgtaatcgaagcagcattatcagtcagtaatcaatcaaagagcaaagaaaactcagaggcaaataatcactagcacaaggtttcagttcccataaaactcaagaaaaacataccaatctgctttctttcatctttgtttcttcttccactttcaacgaaacaacttcaaagctttataaaacccagaaaaaaaggcagaaactttattgaagaaaccttgagaaagaagtcgagtgatggcttcgtcagcgttcatgttgcattcaacaagcattgcgtaaatctcttgttcggagcaattcacgatttccttcatagaccgtactattgctctcgtatactccgggattgcgttaacttcaatggctgaagaacccatttctgattcaacacgaaaaggattatcagtcagtaatcaaccaaagggcaaagaaaactcagaggcaataatcactagcacaaggtttcagttcccataaaactcaagaaaaacatagcaatctgctttctttcatctttgtttcttcttccagtttcaacgaaacaacttcaaagctttataaaacccagaaaaaaaaggcagaaactttattgaagaaaccttgagaaagaagtcgagtaatggcttcgtcagcgttcatgttgcattcaacaagcattgcgtaaatctcttgttcggagcaattcacgatttccttcatagcccgtacgattggtcttgaatactccgggattgagttaacgtcaatgtctgaagaacccatttctgattcaacacgaaaaggatgatctttctttctctctcgctcgcttctggcttttgagtacgattgctctctttttctctttccctctctcactttcaatttttgggcttaatatcacaaatttataaactagtacaatttagtagatttcataaatacgaggactaatatgtaaatacgcgtaaatactattgcattgcaccatataacagacaagcgtatattttgaagcttgaccgttaaacaaagatgaggcttttgcttccattttcctcgccgttatccgccacgtcatcaccgtcgacgccgcaatttatccctgaacttccacctccgtctcaatttgactactcgggtctaactaaaattcttaaaaaatcggtaatcggaaccctaaccggagctctatcgctcactctcgttttctcgtcgccgatttcctccgttgctgctactaatgatccttatctctctgtcaatcctccttcgtcatcgtttgaatcttctctgaatcacttcgattcggctcctgaagattgtcctaatgaggaagaagctgatactgagattcaagatgatgacattgagcctcagttagtaactaatgaagggattgttgaagaagcttgggagattgttaatggtgcctttctagatactcgtagccatagctggactcctgaaacttggcaggtgtgtgaattagcttgttgggtagataaaggaagaagctttatatatgtaatggttgaattttttttttgttactttgcagaaacagaaggatgatatattagctagtcctattaagagtagatcgaaggctcatgaagtgattaagaacatgttggctagtttgggtgatcaatacactcgattcctatcaccagatgaggtttttgttctttacattctatgaatttgattgatggagaaaggactcttaagttgtttcagttactcatatcattgtttgtgtcacttgtttgaagttttctaggatgtcgaagtatgacattactggtattggaattaaccttagagaagtttctgatggtggtggaaatgtaaagttgaaggttcttggtcttgtattggacagtgctgctgatattgctggtgtgaaacaggttataaaccggtctagtttctttcttgtagtttcgttcgctgttgatctcacttaaaaaagtgtgcaatgtctctctctttgatagggagatgaaattctggctgtcaatggaatggatgtcagtgggaaatcatcctttgaagtatcgtctttgttacaaggccctagtaaaacttttgtagttctcaaggttattattcttaataataagatacatactaaattcattagtacttgatttaagtttggaatcaagatttttatgtagtttaagcatattgcaggtgaagcatgggaagtgtggacctgttaagtctctgaaaatccagagacaagttaatgcacagaccccagtttcttaccggttggaaaaagttgacaatggaacagtctctgtcgggtatattcgtctaaaagagttcaatgcgctggctagaaaagatttggtgattggtaagccttttcatgttgttacatcaaagttatcaactttcggtcccatccttttatctacttgtgtttaaatagtacacatccttttcactatgtgcagcaatgaaacgactcctagacaagggtgcgtcttattttgtaatggatcttagagataaccttggtggacttgtgcaggttcattctacaattgtaacttaagaccatttcttctcacaaataatttacaggaacttgatttttcacttagcccttcgtttcttggttatgtttatttcaggctggaatagaaactgctaagctgttcctagatgaaggagatacggtaaatcaacattcatttagaacttttaaaacattgtcaatcgttgttcaggaatatgaaacagaatagcttgcttcaacttacatgaatgagttccataacgattggcttaaacttatgttacatgttgcaattgtgtaacaggtgatatatacagcggggagagaccccgaggctcaaaaaactgttgtttcagataagaaacctttgatcactgccccacttattgtatgtgatgaatcatgtaagccagttaatctttcacactattatgttattttgcatcttgcactgattagaatccttattattgttgcaggtaatggtaaataacagaacagcaagtgctagtgaaattgtgagtaatctcaaaagatttaacccacgggaaactcttctttttttggatgttaaacggatgatttgtgtcatatttctccaggtggcctctgcacttcatgataactgtaaagcagttcttgttggcgaaagaacttatggaaaggttattccaaaggcttactagtttcataaccaatctatcgattttgaattgtttttgatcatcttcatgtcatttgattaatgggtttcagggtttgattcaatcggtgtatgagctccgagatggttcaggagttgttgtgacaataggaaaatatgtcacacctaaccatatggatatcaacggtggtggaattgaacctgatttcagaaatttaccaggtttagttatgcccttgaatcttgatgtttttctttgtcttttgaatatctgatgtgattcattaaccttgtttttgatatatacaatatgcagcttgggatgaagttaaagaacgtttatctaagtgcagtattctccaacaaagttgacatgctatgaaactcatcaagctgtgtacttattattctttgctcaaaccacaacaaaaaaaagctaatgcatacacgatcgaatctggcaaaaaaattgggtatgtcaaagctaaaggaaacatttgagtgtatattaagtttgggctgaacttaaagactctaaataataatattggtcattcttgatcttttggacaaacttagcttcatggccattcttgatcttctggacaacctccaacggatttttatttcatttttttctagtagataagccataagatttttagtggatcccaaaagggcggtgactcacccaaccctctgaagacgaactccacgacggccacacagattcataggaaccgttgttaaccactgaatcaacactgcgaaacccaccaaaacgccaccaacttccgccataacaaccacaacaagagaaacggttgagccctgtggaaccccgaagcactccacgaagtcctcaaccgcgaaccacgccttagagcctccacatgcttaccaccagagcagcgactacatcagtgacgaaaccacaccaccaaagacggaaaggcgcccctaccaactcctgaaacataaacaagaagcttcaacccgacaatgaagatcatggaagcataaaagtaaaaatagactgacaacggatggcgggttaaaatctagtaaaattttatgctcaaatctaataatccggataaatctatttaaattattttagagttggggttaaaaaaataaccataaatatcttaacaatttgtgaaaattcaccctttgtaaagtagcattcatagtttcatacgaaaacccaacacctggaaaaaaagaaaaaaaatctaagtcttgtctaccgatggtgacgacggaggttaggaccgccgtctccgataaggaaccattgcaacggtctccagaattagacagctccactggtaaaccctaagtctcactctctatctccgcatcagtttcatagcagatcaatttcaccatcactcaataaaaaatgtagaatcttaagtcacatcattgggatgatttcgtttgcagatttccttgacaacgatagattaaaagaaacattctccagtggagctcttgattttgatgaatggactttgttaatctccgaaatagagacgacttcgttccctgtaagtcgcactcagtgtggtgcaaagttgcgtttctgatttcgtgatctaaaaaattagggttctttgtttaaatttcaaaacttttgttttgataggaactaaaatctaagctttctaattgtaggatgatattgagaagctatgtttagtttatgatgctttcttgttggagtttccattgtgtcatggctattggaggaaatatgcttaccataagataaagttatgcactttagaagatgctgttgaagttttcgaacgagcagtacaagcagctacttactctgtagctgtatggctcgactattgtgctttcgctgttgctgcttatgaagatcctcatgatgttagtaggtatttctgaattttgcgtaggctttgttcttaactttcattataatgtgtaactcaaacaacaatcttactcatcattgcaattgttctaagtagtagactttattttccccatagggctgaaatttgttaagtagtgcagcgtatgtatttgatgacagaaataatgataatttacttcaattcctctatttatatttcattgtggagcactagaggctaatttttggaactgtttttcttacctctggcagattatttgagagggggctttcatttattggaaaagattattcttgctgcactctttgggacaaatatatagaatatcttttgggtcagcagcaatggagttcactggctaatgtatatctccggaccttgaaatatccatccaaaaagttggatctctattacaaaaagtatgtccttttacatattttctgtaatgactactacaatgttccagtacttcgagttcatgtagcttaagtttgtctttctccattacattatacttgtcctgtactttcttcagcttcaggaagattgcagcttctttgaaagagaagattaaatgtagaatagatgttaacggagacctttcttcagaccccatggaagaagatttggtccatacacgtcacactgatgaggagatctctattgttgtaagagaattgatgggtccttcctctagctcagctgtgtcaaaagcactgcatacatatttgtcaattggagaacagttctatcaagactcacggcagttgatggagaaaataagctgctttgagacacaaatccgcaggccttattttcatgtaaaaccattggatactaatcagctcgacaattggcatgcatatttgagcttcggtgaaacatatggggactttgactgggtaagaggtattcctttgttactgattaagttttggctcttgttccattcttgtttatatatataacttgtttctttttttaattgcaggctatcaatctctatgagagatgcttaataccatgcgctaattacaccgagttctggttccgctatgtggattttgtagaaagcaagggtggaagggagctagcaaactttgcattggctcgagcgtcacaaacttttgtcaaggtaactggggttatgttcgctttagtgtatctaaaaaaatcagatacaaggtagagaaacaactaggatcatacatttgtatgacaccttgtgggttcgttgtagagtgcttctgttatccatctattcaatgcaagattcaaagaacatgttggagatgcatctgctgcttcagttgctctgtctcgatgtggtgaggaacttggttttggttttgttgaaaatgtaactaagaaggctaacatggaaaagcgcctggtaagaatgatacactactcggtaccatctggttttgatgtctcagtggtcaagatatctaattatgcagtgttccatgtagggtaattttgaagctgctgttaccacgtatagagaagctctgaataaaacgctcattggaaaagaaaatttggaaaccaccgcccggctgtatgttcaattttctcgcctcaagtacgtggtaagtaatgtgtcttgactcaaaaaggttttcatttcagttctgttaataacatgtcaagatttagagctatgggaactgttttttgggtcactaccttaccttcaatgtatcacaattttggaattctttcattatcttatggttttcttcctttttgtagattacaaatagtgctgatgatgcagctcagattctgttagaaggcaatgagaatgttcctcactgcaaattacttcttgaggtgtgttaattggctggcattttgaatctctttaaacttctaatcataatttctcacatggaaatcatatttctccactgaatttctgttaacgtctgttaccttttttttaaccttcaatcactgttaatctttgcgctaacaggaacttatgagactcttgatgatgcatggagggtctcgacaagtggatttgttagatcctatcatagataaggaattatctcatcaggcagattcctccgatggtctaagcgcagaggacaaagaagaaatatcaaatttatacatggaggtgaggtttttcttacagataggagattctgtggtcttttttgcttgtctatttcatttcccccccatagtaattgctcttggatttgagcagtttattgatctctctggaaccatccatgatgtgaggaaggctttgggtcgacacataaaattattcccacattctgctagagccaagttacgtgggtcccgtccttcaggaaatttatttagagagttgattcagagaagagagaagactcgagagcgcttgaatcaggacctattaacaaacaaaggcattagcagtatagtcgattcaccaccaaaagaaaagaaagagtcatctctagactcttatggtacccaatctaaagatgctgtacgggctgactatgtaaacactgagcctaatcagggctgtctgacttctggacatctagttgaaggaaacgataatgttattgagagggagactttgtgtgagtcacagagcgatctgtccatgggattaaaagccaatgaaggtggtaaacgctctcatgaagttagcctaccgatccaagcctcaccagaacatggttttgtcactaaacaagctcacttctcgtccaattcagtagatactgtgaagtcagatgctatagtgatccaacctagtggctcacagagtccccaaagttaccaaagtcaagagtctctcaggcaaactggtcggaacaggtaccacagaagagatttaaaccagatgcacagagattcaaaacctcgttctcaagagagacctcctcagatgccatattctccagtcggaactggtcgtgaaattcttggtcagcacatggcttttactcatcaagacaatcgagtagcgctacaaagctcaacctctcagaatccgcaaaaccaatttcagaactctgcacttcagatgcatcctgtggttcaaacatccaatgcttatcctcaatctcagatacatggtcagcacatgattgtatcccctccagagtcacagaatccgcagaaccaatgtcaaaactctacatctcaggttcaaacatcctttgcttatcctcaaactcagattcctcagaatccagtgcagagtaactaccaacaagaaggtcagatgcagagtcatgaagcttataaccagatgtggcaacagtattattatagctattattactatcagcaacagcaacagcttatgtctgaacagcctcaaccaaatcagaaccctcagccacaactagatcagaatcttgtgcaacttctctccaaacagtaccagtctcaagccaaaactcagtatctacaaccacaacaggtggaacaggtcaatacacagcaacagagtcaagaaccacaaaatcagcagcaaattcagttccagcaacaacaacaacaacaagagtggttccaacagcaacagcaatggcaacaacagcagtatcttctctatattcagcaacagcagttgcaaggagaagcaaaaggcgatgaacaaagactctctatgccgcagggttccacaacaaacagtgatattcaaaaggtttgcttaaaaattcaaacatgattgcttcaaaattgtttattttatatcaacttaagctgtttactaagaatagatgttcttgtagagtcaagaatctggagcagtcaatgaagcaaatctatcttctgacacttccatcagttctatatgagtctcatgaaagccgatggacacgtaattgattgtgttattaaaaagcctgagacaaaacaaaaaaatgttacataaacttcaatttcagtttggttttcaatccaatttagtattcaattaattttaattcacttcggtttatttatttatctggttcaatttggtttgtgtgcactaaatgagttttggttatcgattgtaattgaagaaatcaactgatatggtgtaaaaaaaaaatcaattcgattttggtttaacggtttcgtttggttttatttttccggttgcgattttataaaggacggaacagtagcaattaaaagtatttggtgtattttcgtgattattttaagtttctgttttctgttttgctccaaatctcgaaaaaaatctaaaattttaaaataatttcaaaaaagcgaggggcttcaacacgcgtcaaattatgtgggtgagtcgtccagctggtctattataacacgtgttggttcggtattggattagaagcgcccaccaaaggaacaaatcgtagccgtcgattagatgaaataaagagccgtcataaggcttgtatcattctctattgaccgttcgtggaagttgtgtgagagaaagaaaaagcccagagagaagagagagagacccacaacacaaacacaaagtagacgaagaagacgacgacgaaacagctctcttcttctctcctctctctcaggtccgtcttcttcccccaaatttgatcgcttccttcctcttcttctttgtcttcacctggaaatttcgtttttttcttattacattttttgttttttgttttcttctgtgttgtttgactttcgatttctgattctgtggttgtttatgctttgattttgttggatttgttagaaaaactttccatttcatctgggttttgaaaaagtttcctttttttttttttttggatttgtgctggttttgtgacttttgttctcagcttcgtttatttgtggtgagtttatgtttgaattttgattctatcgaaatttcgtttttgtgtgctaatttgttttatttctctctaatttcgcataacgatgacttgattttttgttagtgtatctttgatttggagttggaattttacttttggtagagaaatgtaagtttgaatagagagaactatttgtgaattataattaggttttttatgtgttaaggttctgggtttagctatttctgataggttgacttgtggtttgtttgtcttctcgattttgtctccatgatccgagattccatgtccatgctgtgtagattctgatctcctttttggattttggattttggattttgggtttgaagtattaaaatgattgatcgtgatgggctctgtttttttttttttgcagcatcttctgctggtttggtctttcactaaagtctcggtgtgcacctaaatgtgcttgatccaaggtcgttataattctgtgtacagagccaatgccatatatagaaatgaagagcaagataagcaaggttcttggtgtctgtaagaaacataaagcaagtacaagaaattcttgctctttgtccaaaatatcaggagacttggaaagcataaccgcagctattactacttgccacgacgatgagaaacagcaccctggtaatgatttttctttgttttaagtattgtgttctcaaattgttgatttagataatctgagtttgttgtgtcatcaatcattttttggtttcttctctctgatgattgtgtcagtttcttcagggttggatactttttctcgggagagtgaaactaatgagcccgctgaaatgcttgttgaagatacttctcagtctcaggggtttgcaccttgggtcgatggttctcaatctgtcgaaaatatggtaagattggatatctggagctgattctcaaggatactggagagcaactttttaattgtggttttaacatttatgtgcaggaaaatgcttgcaatcacatgtcaaactcagatacaatattttcacctgttctgaatgatgaactggatggaactggtcgaggtacatgttcctgttgtagttttggtataaggtatcctttgtttgacatataataagctaatagatttctttcctcagtatttacagcaggaaattctgtgatctgggaaacccccaggtggggagccgacgagagcagcaacaagatttgctttgacaaccaaacgtgcaacgtttctgatttctatatttctgacgttcttattgcgagcttgccgtttgatgagagtggaaacaacgatgcgttcactgaaataagccccttgcctcattacatctttcctgagcagtacatggtactaccttacttagaagatggatcagccaacaaagatgatattaagtcagatactgacaagattaatctcgataaccatgacttgtttctggcattcaaccggacaagatcgtacaatgtggaaccagatgatcgtgctgaatctgaagtagctgaagactttgatcctcagctttttataaaaaatcagccggaattatcggatgttgtatccaattattggcctcgggataccctaagaaagaagtctgtgacccttgtccttgatttggatggtatgataccctaatttaattattgtcggagtctgatttctccttttacattattctctcatcttgtgctcgttcattatatcagttgttccttaaaattgatgttgtatactgaatcatgtttagaaacagaaggtgaactgacttatttcttccttttgaggaaatatggttaagcatttttatgtctgtgtactgttaaattttatgtttctcttacctctaaggtagatgagctactgagcttaccaaattctcttttccttaaatgcagaaactttggtccattcgactctggaatcgtgtaatgttgcagatttttccttcagagtctttttcaacatgcaagaaaacacggtctatgtgagacaaaggccacacctttacaggttcttggagagggtgggagagttgtttcatgtcgttatcttcacagcaagccacagcatctatgcctcacaacttctagatatactggacccagatggaaagttcatatcacagcgtttttatcgcgattcatgcattcttttggatggaatttacaccaaggatttaactgttctgggtcttgatctggccaaagtggctataattgacaactgtccgcaggtactttatcttaagatctgctcatgggtctcaacattattcattaaagtctgatgtttcatgatgttttatatactctgttactgagaacactattaatttgatgaaaggccccaccatcagtttcagtttgaagaatatctgtcacattacaaattacaaactttcttggtgtataatgatacatgtacccgttttgattatccaacttgtttctttgttaattgtttcaggtgtacagattgcaaataaataatgggatccctatcaaaagttggtacgatgatccaactgatgatgggttgattactatacttcccttcttagagactttggctgttgctgatgatgttcggcctatcattggcaggagatttggtaacaaggaataagagtttccttctctttttttctatatacatcgagtgcagatcctgatttctctcctttggattttagttacaaattggcccttaattagttcctcatatctctttttaggtcgttaattaggtaaccaaagaataagctcgttgagtctagtgagaataagtttccttgcttgctccctttttttaatagaagacctagttgtgggcttaaatcttatgactttgctggttcttctctgccaagatagatc

SEQ ID NO: 844 - DNA, 51529 bp, Arabidopsis thaliana
ctagaaaatcttgcagtttgttacaaatgtacagttggttaagctgagataatggatgtgtacaaatgagttactattgcgtgaaatcattttggaagttaacaccagctgcattcatgtgtctctctttgcactcctcttgtactgtttagttgagcttgaaattcttacttggactggtaaatccagaacatatttacctgcgtcaacgccagtcatagaaatacagaaatataatcaaataatgcagaagttgttgagtctgaatcttgaatcttctaccagcttctattgtttatttttaaggttctgagcaaagttattccacgttttccgtctcttggctctgcaacattccaatgagatatcatactccgaggtgggaggagttctgaatatccaatgatcgagtcaagctcatggtatacaaatagtctataatattcattaaaattttcatgattttgcatgccttatatgcagatatcatccaatgaagtaacgaacctaactatatttattcgctttatggaaatgacaacagtaggtaagttttaaatccttatttacttgtcccttttttggtctaacaagcttctttttgttcttgtttcttatttccgtcctctctaaccttgtaatctttatgctgaaagctgtttcacaatcttgttgcttaacttggtccaaaacctgtttctgtccctctgtttctccccctggtttcatgtagagtaaacaggttattgtcttaatatattatacacgtttagtcacagatgattgtttaaagtatatgtcagtaattgctgtttatcagtttctgagcttggtttgttttctcctcggtttaacatttatgtgctgtgtgactggtttaaagtagtgtgttgatctttgatgttatcctcagtgaattttctaggaacaagagctcctaaaaactagtcgcagtctcgcgggctctttgttttcccatacaagtatactttgctcatatatgaatgatgtattacattgtagaaattctacaatctatagaaacttttacagtataatatataaaagttctttgatagtcttaggaaacaggaacctatctacaacctatgaaggctacccgacaacactgttttttaaagctcgacaaacagtccttcttcattgaaaacgaaacaaaactaggcctccgtctctaaagttaaaatatgatgagctatcttatttgcaatgcgattacattctcggggattacaaaaacagtaacataacaaaacaaagttaccatgacatgttcacatgaatgtcatgcagcataggttgaactgcagtcaagtatgttattgcccatcaaatctctaccacttctgcttttaacttttgaggctaataaaaaccaaaggcaatgcacggcacgaggcaacgagccactccaccaaacttaagtgctcacacgtgagacatggaccccccatgaacatgagaaccctccggatcaaatagagtctttctttgtttcagtaaagctgggattttttttggttgttgttgcgacattcgtcgtatccattgcttagggagagaagagataatgctgagagcttcgctgctctgttcttcgacctcaatcactttcacaccaattcaactattcaatcccaatagttcccatcgtttcccaagattcgaactatctcgtcctgtctcggctttgtctcgtaccaaatgtcacttgagtctcctgagagctcgtgggaaatccagcttcctcactcgcagcaccggtaactagttttttttattgggtttatccttgttttgtgattctgtggtctctgtctttttctcttccaaggtgtggaaacttaagaagttttgggttttgagaagctgttagcaactgtattattgaattgattctaatttttgtttctttggctctctttgttttttgatcttcagctactgatgaagctgttgaaactagtagtaacagtggattggatttggttgaggttggattcttgtctggtgttcatggccttcaaggcgagatttgcataaaaccaaacactgattttcctgatttacgtttctctaaggtattcaaaggatagaaatttgaagaaagtttgtgttttttttcttctcttttcttgaaaaacaaatatgtataatttgacatttttttttaccattggcttgattgtttcattagcctggtagaagatggttaaaacaacaattgttgggacaagataagattgatgaggttgaattagtcgaaggaagacctcatcctgcgcagaagagttggattcttaagtttcgagggttggacgatgttgatcaggtagtgtagtgatccatgggagattttaaaagacacatttgaaaatgatttgttacatttgatggggtttccgtttccttcaggtgagacaactcgttggtgcaactctgcttgctgaggacgatgatcgtcctgagcttgatgaaggagaattttactctcgagatcttgtaggcatgagagttcttctcaaggtatatttgggtttttgccttttgtataatatatcgaaaatgggaaagtctggggtctaaatcagttatcatatacaggagaccggtcaacttgttggaactgttgctaatattttcgacaatggaggaaatgatcttctacatgttttgcttgactcatccatggaagtctgcaatgggaatgcaaagaccaatcagcttgtttggataccttttgtagatgcaattgttcctgatgttgatttggaaagaaaggagatgtatataactccaccgaagggactcctcgaggtgaatatgcgagcagatgatcggtccaagaaagaaaggcggcagcttgtgaggcatattcttcttcgctcttcatattgaccagtctttatagactttccagattgatctttcttggtctcttaaactctacgctctggtcatttcaggaatggaaagaaagaaaaaaacagcagaagcgccttattgctgctaaaaagaagttatgtgaaatggagcaaaagcatgtgtttgatggattaaggtttggagaaaagtctcaaaggaatttacttgctgatcatatccttaacgtaaactccacactacttcagaaagctttgcaaagtattgacacctcatcgaagaggtaaattaacttcaagaaatttcccaaccattgcgagaagtgtgtcttctcatttttcatttaaattatgatgaattagatggaatgtaactgaggaaatcaatgcactgagagctagagtatcggaatgtaatctgagtgtgtcacgagaatgccttagttttgatgcaagcaaagagaacatgggtgataacttcagtttccttcaacaagggcaaaatctgttctctgagggtaaagtttctatttgtttggttctcaatgatcacgagaatgaagaaccagaaggtgagaatggtgtagtctcgtaccttcacgcactacttgatgaggagcagaggttcataaaggttagctgatgcatacttaaaagctatgagattttcttgtcatttagttatgattttacaggataactgttgggttatgtgcaggaagaagatcgcgcttgcgtgccacttgtcatagtttcccctgaacataccattgaagctctgcagaagctatttcaggataatgatcattttggatttgagtcagaaaaggttaaggcttgaattcatccaagaatagttttgcatttcggctatcagattctcacaaagtatatgtctttactaatatatagatctggattctcaaagaagaaacgcttccagtagtttgcagctcaccagaggaaccgaaaaagcacaaaattttgatgaaatctccatgggagatacttgagtccccggttggctctggaggagtcttgagcatccttgcttcacatggaactacagactctctttccaccctgggaatcaattatcttcaggtatcgatatctaaagatcatcgcttaatctctttgaacttgactcatatccagaaattgttcctttctggttctctccttcaaatttggtaaaaggcattaagctttacgatgttggcatttttctataggtacacagtattgaaacaaaaccacaaccgtcacaacattacatcaatcccatgcttgttggtttcgtgagcgcaagaggagcagagattgggatccaagtgaccgaagaatctgaactcaagaacttggaaatgacattctcaatgaagtttctgaagagattaaagggaaaaatcgagtttgaagctgtcatgaagatgaattcacatgttcagaatgttgaaaaggagtgggttgagtcagtaccatcagaaccaaactcgtttgagtttcgttctgatatttacagagtcttgagtgaatgttcttcatcagctaagatttgtttgatgaacattaccgtttagaacttgtacattttgctacttagttgtttgtcctcacatctaaaaagcttctagagacgcaatttatgcccgaacacattactcaagcaagagagaacatcattgtagcttttgacaaatcgatgataacaaaaacccaaaccaaagctattgctctttcatagcacaaaaaaatatattttttatcaaatttcaaaaatatatccctctttttgggaaacttaagatccaactgttgatttgcagccaaaaaagatcgaaccgttgattctattgaccaatctctgatctttaacaaaattacatttttgaccatcacacagagaaccctaatttatatatttataagaaacttcagtcttccgaaaaacatcctttcacattgcggcggaggaagctctaatcaccgtaagcttctctctttcactctctctgaatctcatctttctgttagtttatgtatatatatctactgaaatcgatgcttcgtctcacgcataccttttgttgattttgttgaggaagaggagtaaaaatggcggttccgttgcttacgaagaaggtggtgaagaagaggtctgccaaattcatcagaccccagagtgatcgcagaatcaccgtcaaggtactcactttttctccttttcaggtttagagattcaacttttttcatgggtataagtttgttattctctggagtttaggctttgatagtgaggaaaaatgattgcttcctctgtattatcattaggtctaagtctatcatcattaggtctaagtctatcatcattaggtctaagtctagattgtttcagtatgatgcattagggctatgagattgtgcatctagataatgccctgtggtatctggtagccagaattctaattctgtttctggttacttcgtttttacacgggcagaaagtgaatctcctacaggtcttgcgacacagtttgcttttgatttgataagcttactgttactttaaccctgttgacatttctcatctatctcattcgtcaaaaagcttgttttgattctctgatgattatgcttaatcttcattctctgattgttcttttgtttttcaattgttattgttcaggaaagctggaggaggcctaagggtattgactcccgggtgagaagaaagttcaagggtgtcaccttgatgcccaatgttggttacggatctgataagaagacccgccactacctcccaaatggattcaagaagttcattgttcacaacacctctgagctcgagctactcatgatgcacaacaggtaactattatgactccttggtgttatacaccacaaggatttgatagattttttaaagcaagattctcatggtgtgttttgctttggatttttcacaggacttactgtgcagagattgctcacaatatctcaacaaagaagagaaaggccatagtggagagagcttctcagctagacgttgttgtttccaacaagcttggtaggttgcgtagccaggaagacgagtgaaagccctaaaagatatcatctagggtttttcttttatctgtcgttaactattccgaattatcttcttttttttttttttttgcgttttggagagtggctgaatgatattacaacttgggttctcgtttttatgatattaattcagaatcagacacagtctcagaccataatttattcctcaatttatacctaaattttcagaccatcgaaatttaacttgagttcaaaacttttatcgatactgccaagtgtaactaagttaggatagctgagagagacacactccatttcgtgctttaatccccacgttgtccagaaagactcgatgagagaatctcaatcttgttccatctcctcacgtgagtcgttacaccaagatgatttggggatacacgaggaacaaaaaattagttgatgcgttgaatctgttcgacgaaatgcctgagagagagatgtaaggagatgaatgtagttgctgtgaagctaggttcaagggtcgattcctttgtggctaattctgtggttgtgatgttcagtggaaacatgaacgacgccgtttcagtgttcatagataattggaggaagaaccttgtctcgtggagttcatccatcgtgggtttctacaaaaaggaagaaagctttttggttacttgtcaagcggaccaaatcatatctagaaagattaaacactacacttgtaaggtatatatcttgggaagaaaaatagatgttgtgatatcgtagtgacaggcttgctgttgcatttgggttggttagtatagttgaaggaagtaaagtcactatggttttttgaagattgtcacacagtgattaagtctgatcttaagagttgtgggaactgggacgtgagattgttttaagagattcgacttggtttcatcattttaagaatgggattttttcttgtggttattggtagaggagtacttgagaaagttgcaaagtttgacttgtgatgtgaggataagagggtaagagactataaatgtgattgtgagttgtgtggtggtggtaaagtcacgatccattccaaaggaggagccttctgtcaagttggcagaaaagtctgagaaccacttgtggaattgctagtcaccactttgcctctgctaaattatatatgggcaaatcacttctcctctgatatttttttccagaaacgtctaagattgtttcctcctctgttaatggcttcttcgtcctcctcttctcgcaattggtcatatgatgttttcccaagcttcagtggagaagatgtccgcaaaacattcctcagccactttctcagggagctggaacggaaatcgatcattactttcaaagacaatgagatggagagaagccagtcaatagccccagagcttgtagaggcgattaaagattcaaggattgcagtgattgtgttctctaaaaactacgcctcttcaagctggtgtctaaatgagctgttagagattatgcgatgcaacaaatatttgggccagcaagtgataccagtcttctactatttggatccttctcatcttcggaaacagtcgggagagtttggagaggcatttaaaaagacttgccagaaccaaactgaggaagtgaaaaatcagtggaagcaagcgttgactgatgtttcaaacatcctcggatatcattctaagaactggtatgtgtttataagtcttgaataaatgtttctacgtgagatgtgatcactgatatttgtttcatgtttgtgcattgatttttcttctcgttagcaatagcgaagctacaatgattgaagaaatctccagtcatattttaggtaaactgagtttaactccatcaaatgattttgaggaatttgttggcatcaaagatcatatcgagaaggtgaggttgttgttgcatttggaatctgacgaagtgaggatggttgggatatggggtacctcgggaatcggtaagactaccattgcaagagctttatttagtaatctctctagtcagtttcaaagtagtgtttacatagacagggctttcatatctaagagtatggaaggttacggtcgagccaatccagatgactataacatgaagttgcgtttgcgagaaaatttcctgtttgaaattttgggcaaaaagaacatgaagatcggtgcaatggaagaaaggctgaagcatcaaaaagttcttatcattattgatgatttggatgatcaagatgtgctagatgccttagtgggtagaactcaatggtttggaagtgggagtagaataattgtggttacaaaaaacaaacatttcttaagggcccatgggattgatcatgtttacgaggcctgtctcccatctgaagaacttgctcttgagatgttttgtcgatatgctttcaggaagaattctccacctgatggttttatggagctttcttctgaagttgcattgcgcgctggtaatcttcctttgggtcttaaagttttgggttcgtatctacggggtagggacatagaggactggatggatatgatgccgaggcttcaaaatgatttagatgggaaaattgagaagacactaagagtcagctacgatggattaaacaacaaaaaggatgaagcaatatttcgtcacattgcatgtcttttcaatggtgagaaagtaaatgacatcaagttgcttctagcagagagtgacttggatgttaatattgggttaaaaaaccttgttgataagtctctcatatttgtaagagaggatactattgagatgcaccgtttgctacaagatatgggtaaggagattgtccgtgcacagtcaaatgagcctggagaacgggaattccttgtggattcgaagcatatctacgatgtacttgaagataacactgtaagtttcgtgctcttttcataaatctcactctataagaccaaaagcatgtcatttgataaacgaagagttgttaggtgtttgctaagctgaatgttttttctctttttattgatcttataattccagggtactaaaaaagtcttaggtatcgcactggatattaacgagactgatggactgtatatacatgagagtgccttcaaagggatgcgtaatctcctgtttctaaatttttacactaaacagaagaaagatgtaacatggcacttatcagaaggtttcgatcatttaccccctaagctcagattactgagttgggaaaaatacccgttgagatgtatgccttctaactttcgtccagaaaaccttgttaagcttcaaatgtgtgagagcaaactcgaaaagttgtgggatggagttcatgtaagtttttagtaaagttataactagtatcgagattagaatgcttcttttaaacataaaatgtttaccctttcaagtgatatgtaacttacctatacttcagtcacttacagggctcaggaatatggatttgcggggatcagaaaacctgaaagaaattccagatctttctttggccactaacctcaagaaacttgatgttagcaattgcacaagtttagtggagctttcttccacaattcagaatcttaatcaattagaggaattgcagatggaacgttgcgaaaatttggagaatcttcccattggaatcaacctcgaatctctttattgcctcaatctcaatggatgctcaaagttgaggagttttccagatatctcaacaactatctcagagctctatctaagcgaaacagccatagaagaatttcccactgagttgcatttagagaatctatattatcttggcttgtatgacatgaagagtgagaaattgtggaaaagagtgcaggtatgttcttattctaatgttttctccaacctttttctaaactcacgtattataagaagttaatgtcacgttgggtttgatttcttaaacgttgtgaaaaaagtttattgagaaaactatctgtgtaatgcttgtggttactatctataatctacgtgaataattttttgagtgattgagtgattgagtgattttgttaacatctctattttgtttttgtttttggttcagccgcttacaccgctcatgaccatgctgtctccctctttgacgaagctatttctctcagatatcccaagtttggtggagcttccttcttcatttcagaatctccataatcttgagcatttgaacattgcacgatgcacaaatctggagactcttcccactggagtcaacctagaattacttgaacaacttgatttttctggatgctcacggttgaggagttttcctgatatctcaaccaacatcttttcactagttctagacggaacagggattgaagaggttccttggtggattgaggatttctataggctctctttcctgagtatgattggatgcaacaatttacaaggtgtgtccctaaacatttctaaactggaaaaactcgagacggtagacttttcagactgtgaggcactgtctcatgctaattgggataccattccaagtgcagtggcgatggcaacagaaaatattcactctaagttaccagtctgtatcaaattcagcaactgcttcaacttggatcataaagctgtccttctgcaacaatcaattttcaagcaactaatcttgtcaggtggagaaatgttttcatatttcactcaccgaactactggaacgtctctgaccaatatccctcttcttcacatctctccttgtcaaccattcttcagatttagagcttgcgccttggttgatactgaatctatggacataggtagtgtatttttccaggtccaggtatcttgtcggttcacagacagactcgggaactatttggattccccttatcaacacgaggtcttcgcagtacttgagaagggtagtcatatggttatatctgactgctgtttcccttttaacgaagacaatgctcctctagctgaacttatctatgatcacgtggatatacagtttcactttactcaagaaaacgatgagctcaaactaataggatgtggtctaagactctctgaagccgataatgatctaggcaatgagattgatggcagtgaagagtgggaagactgcaacgatagcggtcttggcagtgaatctgataatttagaggcagaagaagacacgtgagaaggaagcttacttgaagaagaagatattttttatctgtgccaaacttgtttacagcttttggatcgggcatgctgattgttgtacatcttctcctgcgtgggatttgagggtagtgagctagagaagatgatgctctagagctctacttgtatgaagattatattgtacattgagatgagagaagagagaagagatcacatcttcaaacttatcagaatctgatcacagtgaagaaagagtgtgaagacaatgatgtggagaaaagggaagcagtgagagaatgtagattatctaatgacatgtggcttgttagagaaaacttttatctaatgacatgcatcttcaaacaaagttttctctttttgttttttgttttctacaacttcatctgcagatgctttgttgaagtaattcttgtaccatatatataacgattgggaattttcttgctgactctgctgtaacttaaacgcaaatgaggaacatgaaatgttgataagattttctgttgtattcaagtttgttacatagagagcctcttatttaaaaagaggatcctggtttgcctacattgtcccagtccttactaaacctgtatactcaatttaaaccggtccagaagattcaaaatcgcgaagccaattttgtcggaaagttcaaaacttttttgactctggaactttgccgttctatacacgaagctacattgagtgtggctttgtgattgttttacgctgatgtgaccgttgtaggaaatgtggagtcgtgccatttttcaacgattcaggtttcgagctttctctatatctcacgttatccatgggaaatgttacagaagtttctcagttactgtggagtttcagaatcgcgaggttttgatatgtaatcacttgttgagtcgacgaatcgatgaggctcgagaggttttcaatcaggttccatctcctcatgtgagtctttacacaaagatgattacgggatacacgaggagtaatagattggttgatgcgttgaatctgttcgacgaaatgcctgtgagagatgttgtatcatggaattcgatgatcagtggttgtgtggagtgtggtgatatgaatactgcagtgaagctgttcgatgaaatgcctgagagaagcgtggtttcatggacagcgatggtaaatgggtgttttaggtctggtaaggttgatcaagcggagagattgttttatcaaatgcctgtgaaagatactgcagcgtggaattcgatggttcatgggtatttacagtttggtaaagtagacgatgccttgaagttgtttaagcaaatgcctgggaagaatgtgatttcgtggacgacaatgatctgtgggttagaccagaatgagaggagtggagaggctctcgatttgttcaagaacatgttgcgttgttgcataaaatcgacttcaagaccattcacttgcgtaatcaccgcttgcgcgaatgctccagcgtttcatatggggatacaagttcatggcttgatcatcaagttggggtttttatatgaagaatatgtatctgcttcgctcataactttttatgcaaactgcaaaagaataggggattctcggaaggtgtttgacgagaaggttcatgaacaagttgctgtgtggactgctctattgtcaggttatagtctgaacaaaaagcacgaagatgcgttgagtatattctccgggatgttaagaaacagtatcttaccaaatcaatcaacatttgctagcggattaaactcttgctctgctttgggaacattggattggggtaaggagatgcatggagttgctgtgaagcttggtttagaaactgatgcctttgtgggtaattctcttgttgtgatgtacagcgattctggaaacgttaatgatgccgtttcagtgttcataaaaatcttcaagaagagcattgtgtcatggaattccattattgttggctgcgcgcagcatgggcgtggaaagtgggcgtttgtcatatttggtcaaatgatacgcctaaacaaagagccagatgagatcactttcactggcttactctctgcttgtagccattgcgggttcctagagaaaggaagaaagctgttctattacatgtcaagtggaataaatcatatcgatagaaagattcaacactacacttgtatggttgatatcttgggaagatgcggaaaattgaaagaagcagaagaacttatcgagagaatggttgtgaaacctaatgaaatggtttggttggctttacttagtgcttgtaggatgcattctgatgtagacagaggcgagaaagctgctgcagccatttttaatctggactcaaaatcaagcgctgcttatgtcttattgtcaaatatatatgcttctgctggtagatggtcgaatgtatcaaaattgagagttaagatgaagaagaatgggattatgaagaaacccgggagcagttgggttgttattagagggaaaaagcacgaatttttctccggtgatcaaccacattgctcgaggatatatgagaagttggagtttctgagagagaagttgaaggaactgggctatgctcctgattatagatccgctttacatgacgttgaagatgaacagaaagaagagatgttgtggtaccacagtgagaggcttgctattgcttttgggttgattaatacagttgaaggaagtgcagtcacagtgatgaagaatctacgggtttgtgaagattgtcacacagtgattaagttaatctccggagttgtgggacgtgagattgttttaagggatccgattcggtttcatcatttcaagaatgggacgtgttcttgtggggattattggtagaacagtgatttggaaaatttcaagctttcacttgtgatgtggaaagtgacttgggaatttacattaatacctgatcttaccaaaaaaaaaaaaaaatcagatattattatgttagaatatatacagggttttggcttgtgtggtggtgattaagtcaagactcaagaaccagtccaaaagaggaaatttccaagaaacaatgatgcaattgctagggaccagctactgcaatttatagggtttcttaacaaccacgcgagccctcacttcgactctaaatttttccagaatctcctctctttatggcttcttcttcctcctcctcttctcgcaattggtcatatcacgttttcccgagtttcagcggagaagatgtccgcaacacattccttagccactttctaaaagaactggataggaaactgatcatttctttcaaagacaatgagatcgagagaagccagtcacttgatcccgaacttaaacatgggattagaaattccagaattgcggtggttgtgttctccaaaacctatgcctcttcaagctggtgccttaacgagctactggagattgtgaaatgcaagaaagagtttggccaacttgtgatacccattttctacaatttggatccatcccatgtgaggaaacagaccggagactttgggaagatctttgaaaagacatgccgaaataaaacagtggatgagaaaatccgatggaaggaagctttgaccgatgtagctaatatccttggatatcatattgttacctggtacgactttatgaatcatattatggttatttaacgaacattattacttgttgtttagcaaacatggttgtgaaatggtctgtttccttattagggataacgaagcaagcatgatcgaagaaatcgccaatgatattttgggtaaaatgaatatatctccatcaaatgattttgaggacttggtcggtattgaagatcatatcacaaagatgagttcattgctgcacttggaatctgaggaagtgaggatggtcgggatatggggtccctcgggaattggcaaaacgaccattgcaagagctctatttagtcgactctcttgtcagtttcaaagtagtgttttcattgacaaggttttcatatctaagagtatggaagtttacagtggagctaatcttgttgactataacatgaagttgcacttgcaaagagcctttctagctgaaatttttgacaaaaaggacataaagatacatgtaggtgcaatggaaaagatggtaaagcaccggaaagctctcatcgttattgatgatttagatgatcaagatgtgctagatgctttagcggatcaaactcaatggtttggaagtgggagtagaatcattgtggttacagaaaataagcattttttaagggccaatcggattgatcacatttacaaggtctgtctcccatctaatgcgctggctcttgagatgttttgtcgttctgcttttaagaagaattctcctcctgatgactttttggagctttcttctgaagttgcattgcgtgctggtaatcttcctttgggcctgaacgtattgggttcaaatttacggggcataaacaaaggttactggatagatatgctaccgaggcttcaaggtttggatggaaaaatagggaaaacactaagagtcagctatgatgggttgaataacagaaaagatgaagcaatatttcgtcacattgcatgtattttcaatggtgagaaagtcagtgacatcaaactattactagcaaatagtaacttggatgttaatatcgggctaaaaaaccttgttgatagatcccttatctgtgaaagattcaatactctggagatgcactctttgctacaagaattgggtaaggagattgtccgtactcagtccaatcagcctggagaacgggagttccttgtggatttgaaggatatttgcgatgtacttgaacataacactgtaagttttttcctgcttttttttcataacctcactctatgattaaatgcatgtcatttcatatgtgcagaattgtaacgaattggttttgtatctttcaattcttataatttttagggtactaagaaggttttaggtataacattggatatagatgagactgacgaactgcatatacatgagagctccttcaaaggaatgcacaatctcctttttctaaaaatttatactaagaaattggaccagaaaaaaaaagttagatggcacttaccggaacgcttcgactatttgccctctagacttagattattgaggtttgacagatacccatcgaaatgtcttccttctaactttcatcctgaaaacctggttaagcttcaaatgcagcagagcaaacttgagaagctgtgggacggagttcatgtaagtttttagtactctaccaggattaatatcgacattggaatacttgttttactttatagatgaccatcctttcaagtattgtgtaacttagttgcatataattcagtcacttgcagggctcaggaatatggatttacggggatctagaaacctgaaagaaatcccagatctttcaatggccactaatctagaaacacttaaactcagcagttgctcgagtttggtggaacttccttcgtctattcagtacctgaataagctgaatgatttggacatgtcatactgcgatcatttggagactattccctctggagttaacctcaaatctctcgatcgtctcaatctcagtggatgctcacggttgaaaagttttcttgacataccaaccaacatctcatggcttgatataggccaaacagcggacattccctctaatttgcgtctacagaatctcgatgagcttatattgtgcgaaagagtgcaggtatttacgtttgctaacattttctcgaacctacatttaactaacacttatataaccaactaggtcgaattacttgaaatatcccttataagtatttactagttatctgttttctggtcgaaatattagtacaggtcgtatgtaaattgatcatgggattttatttttaattagagagtcaaacttggaagacagtttgcagatgagaagttacacgaaatagttatttctgatatttgcaaatgagttttaacatcttttaattgtttctcttttgctttcattttttgtttagctgcgtacacctctcatgaccatgctttctcccactttgacgaggttgactttttcgaacaacccaagttttgtggaagtcccttcttcaattcagaatctctatcaacttgagcatttggaaattatgaactgcagaaatctggtgactcttcccactggaataaacctcgactctctcatttcacttgatctctctcattgttctcagttgaagacttttcctgatatctcaaccaacatctcagatctcaatctaagctacacagcgattgaagaggttcctttgtcgatcgagaaattatctctcctctgttacctagatatgaatggatgcagcaatttactatgtgtatccccaaacatttctaaactgaaacatctcgagagagctgacttttcagactgtgtggaattgactgaagctagctggaatggtagttcaagtgagatggtcaaacttcttccagctgataatttctcaacggtcaagctcaacttcatcaactgcttcaagttagatctaacagctcttattcaaaaccaaacatttttcatgcaactgatactaacaggtgaagaagtgccttcatatttcactcaccgtaccagtggggactctatctccctacctcacatctctgtatgccaatcattcttcagttttaggggttgcaccgtgattgatgtcgattctttttccacaatctctgtttcatttgacattgaagtatgttgtcggttcatagacagattcgggaaccactttgattctactgattttccaggatacttcataacaacaaagttgggtggtcatctggttgtctttgactgttattttccctttaacgaagaatttactacttttctggatggtcaattcaactacgatcacgtggatatacagtttcgtctcacgaatgacaactctcagctcaaactaaaaggatgcggtattctactttccgaagatgtcccatccctggataaccgaccttgtagtccaaatattcttccaggggtttgtgaagatagcgctttagagagaaggagtttccggactaaaatgcggatggtaagcatttggaatagattgtacgtagataactattaatatcccattagatattgtcaggacaaacagaaaactattataccatatagttgactggatgttttctgcagatgaggatgagactactgaagaaactactgaatcgctagacagccaatccacaagatacataaaaggatgtctcctgagcacatgtgggacttcccttacagtattccttcttcgtgaaacttcccccttatataaggtaacccaagaatctcatagaccatcttatgttagttacatataaatcgtgtcacagggcatcatactgaaggacctattatataatgttttgctactgacaaaggaattggtccaattggtaattctacctccttggtccagtttcaaccaatttttttttttctagtacaaattaaattgtgaaacagaaactatgaataaattctttagctctactatgtgtctagactgtagttataaacataattctattatttttcttggcatcttctcatagtcttattttgctatgctacaactgttatagattactgaagttgcaagcaccgttgtaagatctgatgaagaagctaggaatggagacattcgtgagagcagagaatatggaaaagctttatttttgtcagcaaaagattttgtgagtgggaatgatactgaagagtgaggagagagtggtgtaaagacggagggaagaaggaagcgaaagcaggtaatcttgaacttcacattctctggtgttatgtgtttattttccaagagtaattcggaaagcattctatagaattagatcacattggatttgtttctctctgaaccctgatataactgattttagtgaaatcagtaggatcgttaaacacaattgaattaaaatcagtaggcttcttttgtagtatagagattgcatagtttcagcctacaggctttatctcagtctattacaatgttcaccagttattgatacttgtttaatacattacagtgttccaagatggatgtctctgtttctgacaaaagctttgcatattctgagccaaagactaagcagttcaagtctatctcgagtcatctcaaaccaagataggtatgattttatagcccccccaatgtttttattttttgttgattcaacatgtctgaaaaatatcatcaaaatcagattatctttgtcgttgttggtagtatttgctcattttaacacaaaaaagtccttgtttagtaatgttttcaaaatgtacatcaatttttttgtttatcatcactctcttttaatcctgtgtgtcttcttctcattatgttggactatttgatcattttttgtgcagatcagtttcctttggactcttcctcggtggacgccgttttagccatttccaaaacatctggtttcccagtgataaaatatgtggtcaagtatcttgaatggcactgattttgtgtgcaaacatttggagggtgaaatgcaacgggtttgtctcgtgcatctggtctatgtaatgggtttatttgacctcttataatggcatcttccttgcagaccattcaaaggagagtggcgttggctggttttctggagccacagtgtctctatttgaaatctattaagttgtctacattcagtttatcctttggggttagcatttttacacttcttgtctgtcttctctttcttttagtatgaggaaacgtttcttcttcccccaacatatgtataaaaacatgttctttgagttcaggccattctaggcctttaacatgaaggataaaagatcttcattctacttatctgtcaaacttggatatcaggggacaaggtaactggtcctttatatatatcaccattgtaaagtcttgtaaatccttcattcatgtaactttttcttcctctttaggtatctctatctcaaaacttccttgaagctgacatataaccatgcgaaaggtgcatcttcataactcacaaatctgctgtgttgctctgtagccaaagtgatatcactttgaatccgatagcgaaactggagctagagttagtattttggacatctacttcaatctagagcatctcgagaaattatgaatacactacacaaccacaaagttggtctaattggtaacttcattttggagaccaagcgttgcgttaaagaaattaactgtaaaacctattccgaagcacattcccccttcttttttttatactgcttataaagtttctcttcacaacttgttccaactaggtaacataatgaccacttataactaggtcaaactattgtctaggtccaccattgtttagactttagacgcagctaggaatttatatcgaaaacaaaaagtcagatactaatgtaatagataagatatggttctgatttgtgtggccgtgattacctgctactgtgttcataaatgatcttctctgattttcttctaacaatctcaattgccaaatactttttgttcttcttcttcaacaatgatatatgatgtttttcttaacttcagtggggaagacgtccgtggaactttcctcaaccactttttcaaagagctagaacggaaatcgatcattgctttcaaagacaacgagagcgaaagaagccagaatctaagtcccgagcttacacatgcaattagggagtccagaatcacggtggtcgtgttctccaaaaattactcctcttcaacctggtgtctcaatgaattgctgcaggtctatgaatgctaccaaagcatggatctcccggtcataccaattttctacggtttggatccttctcatgtgaggaaacaaaccggagaatttggaaagaattttgagaagacttgcagaaacgaaacagaggcatgtgtatatcagtggagaagagctctgtgcgatgtatctaatttcctcggatatcattctccgaactggtacaattcttgatatttgactactttatagttgacgtttcttgcttctcaagtattgatttttctcatattgttagggctaatgaagcaacaatgattgaacaagtcgccaatgatgttttatttaaactgaatttaactccatcaagcgatttttctgaatttgttggcatcgaagatcatattgccgcgatgaattctgtggataaacgatgactaagttcaagataggtttggtgctgagaaatgatttcccatggggatgttgatgaagcttagagcttaagacttaaagagtttgctgggacatttacataggccaagagaacacaaaacgaggaaaagtaattaattgaaaagtcgaagtctaagaattgactattgaagacatgttcaagaagaaaaacatggattctgaaacacttagttaagattatatgagtaaactcatacaaatacttgatttgataaattggaagcttacgcagaaaaattgcaaggagaaagattagtgggtgagtcagagagacgaaggaagttgaacaatgttattaagcaataagcaatagtcacgaactgaacattctttcaaactgatttgatagcttgttgcacacgtttctttataggataaaaaaaaaatgaattactgaataagtttacatacagtttggccaaatagaagtctctgcttcagactagagctactcagaaatgttaagcgcataagatagggaaacatgttttcttcgaaatcgaataagcttaaattttaaatccttaaattaagatataaagtttgattatgtcctttctttgctgtagtatatccacatattcacacgagaaagttgctaagcttaagagttctttgaaaagtcttaagaagaaattaaagactccatccgccaataaatgttatttttgaaacacaaagaccccgaaagtaatgctcaggataagacttaagaggctatgaaacatttgtttgtgaccttgtgtatactatgattaagacatcaaattggaaacatccgtcaagttgcgtcggaaaagtctgagaaacaatggtgaatacttgtgtggccgtgattaagtcaagttacctctcagctgttatgtcaaatgttttatatccaccaagacagactccctacttctcctctattcctcttcttacaatctcaatctccatagtctttgttcttagttttctcctcctctcactctctctctctatggcttcttcatcttcttctcgaaattggttatatgatgttttcttgagcttcagagggggagacgtccgtgtaacattccgtagccactttctcaaggagttcgatcggaaactgatcactgctttcagagacaatgagatcgagagaagccactctctttggcccgatcttgaacaagcgatcaaggactccagaatcgcagtggtcgttttctccaaaaactacgcttcatcgagctggtgtcttaacgagttgctggagattgtgaactgcaatgataaaattatcataccggttttctacggtgtggatccttcccaagtgaggtatcaaatcggtgactttggaaggatctttgaaaagacttgcaagagacaaacagaggaagtgaaaaaccaatggaagaaagcgttgactcttgtagctaatatgcttggatttgattctgccaaatggtatgatttttatactaaaattcattattagatacatcttgaaataaaattgttgtttcatatttcttaaattatctttcaccttattagggatgacgaagcaaaaatgattgaagaaatagccaatgatgttttgcgtaaactgcttttaactacatcgaaggattttgatgactttgtcggcctcgaggatcatattgcaaatatgagtgcactgttggatctggaatctaaggaagtgaagatggttggtatatggggttcctcggggattggtaagactaccattgcacgagctttgtttaacaacctttttcggcatttccaagttaggaaattcatagacagatcttttgcctataagagtagagaaattcatagtagtgccaatcctgacgaccacaatatgaagttacatttacaagagagcttcctctctgaaattctaaggatgccgaacataaagatagatgatccaactgcactggaagagaggctaaagtaccaaaaagttcttatcattattgatgatttggatgatataatggtactagatacattggtgggtcaaactcaatggtttggatatgggagcagaatcattgtggttacaaatgataagcacttcttgactgctcatgggattgatcatatttatgaagttagtttcccaactgacgtgcatgcttgtcagatgttatgtcaatctgcattcaagcaaaactatgctcctgaaggttttggggatcttgtagttgatgttgtaagacatgcatgtagttttcctttgggtcttaatcttttgggtaagtatctgcggggtaggaatgaggagtactggatggatatactgccaaggcttgagaatggtttacgtctagacggtaaaattgagaaaatactaagaatcagctatgatgggttagatagtgaagatcaagagatatttcgtcatatcgcatgtattttcattcatatgaaagtcacaaccatcaagtccttgctggcagagagtgatgttagttttgcactggaaaacctagctgataagtctctcattcatgtcagacaaggttatgtggtgatgcaccgttcgctacaagaaatgggtagaaaaattgttcgcattcagtccattgacaatcctggagagcgagaatttttggtggatccaaatgatatacatgatgtactcaatgcatgcacagtaagttttttttttttaaaaaatttatcctttcatgactcaatatataaggtttaagagatgccatctgataaacaatgaagtatgagtttgtctctttctcattaatatcatatttttcagggtactcaaaaggttttaggtatatcactcaatacaagaaatattgttgagttggatgtacatgagagtgccatcaaagggatgtctaatctccgtttcttagaaattaaggatttcataagtcaatggaagaaagcgttgattgatgtatctaagatagcatttgattctaccgaatggtataactttttgattattagacattttgaaataaattgttgtttcatatttgttcaataatttttcttcttattgggatgacgacgcaaaaaggaatcgcggattaatcactcaaaattatgttaatttgcttttgctttcaactactcccaaggagtatgaggaacttgttggcattgaagatcacaccgctgaaatgagtttacctgcaactaagagctttgatttcgaagatgacggattgcatttacctgcaagtttcgactatttgcctcctacacttaaactattgtgctggcccaaatttccaatgaggtgtatgccttatgatttttgtcctgaaaaccttgtcaaactcgaaatgcgggagagcaagctatataagctgtgggaaggagttgtggtaagttttgagaataatttcttatgttattattttggtttttggatgacaacagtgccacgtgatgtgtaatttctgttgatctctgtgtttaattgttgtttgaatacagccacttacatgtctaaaggaaatggatctagatggatcagtcaatctgaaagaaattccagatctttccatggctactaatctcgagacacttaattttgagaattgcaagagtttggtggagcttccttcctttatacgaaatctcaataagctgttgaaattgaacatggcattctgcaacagtctggaaactcttccaactggtttcaacctcaaatctctggaccgccttagtttctctgaatgcacaaagttgaagacttttcccaaattctcaaccaacatctcagttctcaatctctttggaacaaacattgaagaatacccttctcacttacatctcgagaatcttgtcgagtttagcatatcaaaagaagagagtaatatgatacaatgggagggagcgaaggtgagtagttctaaacttaatattctctccaaactattttactatcactgtttatatttaaactattgtcgcagactcaaattttgtacacttgtgtattaaaacttaaaaacttaagtgacttttataaaatttacaaattttatattattcaatcataagttttaaaattctaatgaattctaatgttattgaactaacgatttaaaaatcctactatattatttgggaagtacattttaaatgtaaccttaatttttgtaagtaattacataggtatgccattagaaataaaattttaaagagtaaattaatttatctttttaatgattaaaagtcaaatactaatttaattaattaaatttaattaattaaatttaattaaaaaacgaaatacattattattttccaaaaataataaccaatcaaaatcaacatataagatttgatatctaaattttaattaatttaatttaattaaaaaaacgaaatacattattaatttccaaaaaagtaaccaattaaaatcaacaaattatatttgatatctaaattatcatattatttttttattaattattatagttcacttctcatctttatatgattttatttttgcggaaaaataatatcatcattataaaaaaataattagagttatttcgcatatgccacaatttgaatttttaaaaacgaatataaactgttcaatacatgaaaaaatattataacgggtgaaaaatagatttaagaaaactttctactgagtaacgggtcataatttgaaatatttatattcaatttcatacatattatattgaaaatttataatcttatatactacaataattaataacatattagatgtgattcaatttttaataaaagctggaaaatcctagaattgacgggtttagatcgatattaatacaagatggaatactacaggtgaaactcttaaattaacaatcaaactacaagtgtataatcttaaacactaaacaatatagataatatcaacaaaacatatacatgaactcacagtttactatacatataaaatcaaataaaataatatcatatatttttaaatcatctttacaataaaagattttattttaactaaaatataagcctacctgcggtatactgcaagtcaatttaatattttatatacgaaatcaattaaatcttaatcacataaaaattagcacaaaaaaaagtattcaacaattaaaaaattatcaaatctctgtgttatataagttttgatactatattcgaataatgtaatataccttttcaatttgtattctttaactaatttaagctaactaatatatttgctaattttatacctatcaaaaccgactatcgtttcttatctctatagtatttttgcaagacttttttggtggatttggataaaagtgtattcgggtcatatgatacattcccctattaaataaatatggtgcactcctatgttattagctaaaatgtttagaatataattcagagtcatatcattaataaaattaatattaataaactaaatgactttttggcaagacgaatttggagagacgggtttttgaatcaacattaataaaaaagtaaaatatgattaatccaccgtttcaatacgggttaaatctttaatttattattttgtaagaccactaatattaaacatatcaaatcatcataatttaaaaaagattatataaaaccaaaaatgttatgtggtatgtataatgttactatatataaaattaaataataaaatataaatgtattagagaatgatacaatttgcaaaactttaatatataaaaaataattcttaaattttaaaaattactactttaaaaaaataatcacgggacgggtaaaaaaattacagaacgggttttattttggaattgggttatatggtggatgtatttgaatcaatatttataaaattttaaaatattattaatatgctgttttaatagggattaaaacttcagttttttaacaattatctcatggattcgtggtatagggttacctaataacaattataaactggaaaataaaaatattttataaaaataaaatttgcaagttttaatatatattacttttaaaaaataaatcgtcaaaatctagttttacctttaaatctactgttattgaaaccaatttgtggatttaattcttattaattttaaaggatttaagaagatttgaaaagatttctttagttaaaaatatagaaatccaaatctcatggttttagatggaatttgaaaagattttacaataaattacatcaacttccctaaaatcattaaaatcatataaaaccccagtaaaactcaaatcattctttgtccaatacaccctcctaatttcgttttgtttatgaatactttaatttgattgaaaagtaacttttggttacaaagaacgaagaagaaaacatttgattttaaaaaataaaataaaaatacaaaataatggatttcaccaaaacaatatacaaaataacggtaataaaagagttccaaacaatctaatactgtactgatgagatttacccataatactgttattcttttgattttaaaagatttattttctaaatttaagataataacactttaaaagtaatttgccactgaaacttgttatttggttcagccgcttacgcccttcctggctatgatgttgtctcccactttgacgagccattgcagcaggctaaaatgtgtatccctacacatttctaaactgaaacatcttgaggacgctttgtttccagcttgtggggcattaaatcgagttgaattgagtggttcttctagtgggatgaaagcagacaatattgacacagcctcctcttctcttcctcaagtcgaacttgatttcagggagtgcttcaacttggatccagaaactgtccttcaccaagaatcaattatattcaagtacatgttatttccagggaaagaagaagtgccatcatatttcacttaccgtactactggagtctcctctctgaccattcctctacttcacctccctctctcccaaccattcttcagatttagggttggcgcattggtaactaatgttaagcatggaaaaaatataaaggtaaaatgtgagttcaaagacagatttgggaacagctttcatgttggctcggatgatttctacgtttatctacttttcacgaaaagtcagaagggtagtcaaatgttaactatattggactgttgtatccctctaaacgaaggtaatgcttctctagctcaagggaactactacgatcatgtggatataaatattcatataacagaatctcttggatcttttggatctacgtctgaattaaaagaatggggtatacgactcttagaggaagactcttcatcagcagagaaccaacttggtaatccgaacagtactcttccacatgtttctgaagccgaagaaggcaatatggggtattatacacctgttcaaggacttgttaatgagattgaacacaatggagagtctggagataacaatgtagagactgagagaagcacgaagcatgcgggtaagcattaagcattaattgaacattatgactattcatctctcaattctttttgtattattgacaactgaattctctagctcaacggaactactacgatcatgtggatatagatattgagcaaatggatagtgatgatgatattgaagaatggggtagacacttagaggactgtcatcagcgaagaatcgacatggtaatccaaacactatgcagtatgtttgtgaagccgatgaagacaatgatggatgccattagactgatcacaacgaagagcgaggagacagtgatgaatagtgatataggcagggagactgatcactttgaagagtgcgaagatagtgatataagcaatgagagtgatcagagtgaagagcgtggggatagtgacgatgatggtataaacaatgagactgatctgttcgaagagtgtggaaacagtgattaggcaatgagcttgatcacaatgaagagagttgagacagagagaaccaatacacaatacaaggtaattattaatcaagaaatgaacagaatatcagatatctcacaatcaggatctttaatattatagatcactgagttgttttctttgacttgcagattacgtaaaaaataaatgaatctttgagatacttttacggtgatggaatgcgtagttttgctgccggttctattgaacaacaaggagagcccaagattcttcattgtctccctagctggacagacattttcaggtaacccgaaaaaactcaaaaaccatttcattttagttccacatcaattgtaatacagagcataaatccttttatacttattttcttgtttcttacagtttgaggattatttctccataaatcctttcctaacttgagcaaggatcacctcaactacgatgtggagaattatgagctcacatcttcacaagaattttgtaaataaaataaagggagaaagtgtcaataaaattgttctcaaaaatttgttgtctgagattggatgaaatctgttgtttgaaactcttttggctctggattctcctctagctgaagccaactagggtcatgttaatataattcatattaaaaggatttggtataagaaatgacatcggataacttcatttacagaggttttgtacaagaaaatatatctatatatatcaaaattttcaaatttgcttccaatctgattaagcctatcgctatgcatgtgcatatagagacgaagctgcaactatgtagcatattaaggccaagacccaagagtgaataaaccatattctgttgttactttcctgtatgatatcaaaatgagtaatggagtttctataatattgacaccccatattgctgcatcgacatgttagtgtttaaggggaaattgaacacacaatagttaggcgtaaaaacttaactatcaattgttctacaatgcttggttgaatgttgatatccaacctacttggtttgatgatttggagttgatgcgtcgtatgcggatagagaagtctgttttgggattgctggaggatataggtttgggaacgatttgacttgtatgacttgtagtatgacttgtatccggagctagtgcggcagtttatggcttatgttagggttttttatgcgaatgacagggtgtgagatactcatgaaggagcccttatcttcttcattcgtgggtttgagaatgatacttcatatgtctttcttcctggacagtttgcagatgctcagatattttgagcgaatttggaaatggggtttatgattccaaagattcagtgcattcagagattcgtcatcctgttctaagatatttagctaggttgattagcaacacattcttgtgtaagatggagcgtggtaagatgagactttctgagttgttgatgctttatcatgctgtgattgttgaacttttaaaatctgtcatttagaatcatttccagaatatttgtatcagttctacttcttgtatagtacgcaaaattgtagcgtgtaacacaagaaacagagtaagaaccatagagtaacttcgcttgcacatttgttatgtggatggtcctgccattaggagccgcgaccattctacaaacgccgcatcaaagccaaaaccagaatcggagaaccatagacgcacaaagatagatttggagcccaactcgccggaggttaagtctttagctttctactttcactctatctctctatggcttgttcgtctacttctctcaattgggtatatgatgttttcttgagcttccgaggggaagacgtccgcatatctttccttagccactttctcaaggagctcgatcctaaactgatcactgctttcaaagacaataagatccagagaagccactccctctggcccgagcttgtacaagcgatcaagcaatcgttggaagaaagcattgagtgatgtagctaatatgtttggatttcattctgcgacatggtataaaaatagatgtgggtgtagagtttgagtactaataagaacctgaacaagtgagatgttggactatacgatgaaattgagagctaaagtttcgagcccattgggcttatatttcaattttttcttttgttttcagtctgttacaaaagcaagtcatcttattcaataatatatgtcttcttactctaaaattgtaatttctcaaatttagctacaaaaccagtctatctttgacgttggtggtattattagctcattaacacacacacaaaaatgtccttgttggatataacgacgattcaaaaatctaaagacaaagaattgacgattaacgcgtgaagaagacttggggaaccgcatcagtcaaaaagtacaaagactagtattgagtgaccaaagtcaacaaatagtaaatgttctgtcaagttgcatataagaaaagtctgagaaattgctactaaaccacactatgctttcgcacaaaaaaaaaaaaaaaaaaaaaaccacactatgctagtgctgcctgcaaatttagggtttcttaacgacgacggcaacgcttcttcacttttcttctgattgcattctcagtatcaccaggtcttaagttgttcttctcaaaattacattccttttctctatatggcttcttctcggaattgggtttatgatgtcttcccgagcttcagcggaacagatgtccgtcggaatttcctcagccacttgctcaaggggctgcataaatccgtcaattctttcagagaccaaaacatggagagaagccaatcactcgatcccatgcttaaacaggcgattagggattctagaattgctctggtcgtgttctcaaagaactacgcctcttcaagctggtgccttaatgagctgttggagattgtgaaatgtaaggaagagtttggtcaaatggtgattcctattttctactgtttggatccttcccatgtgaggcatcaagacggtgactttggaaagaactttgaagagacttgcgggagaaatacagaggaagagaaaattcaatgggagaaagcgttgactgatgtcgcaaatctcgctgggtttgattctgtgacctggtatgcttctatacatcagtaatttgtgatttcatttatcgtgaatgagcgtagtttcttgtttgggtaaataatcatcgttttctccttgttagggatgacgaagcaaaaatgattgaagaaatagccaatgatgtttcgggtaaactgctttcaacttcatccacggattctgctgagaactctattggcattgaagatcatattgcaaatatgagtgtcttgttgcaattggaagctgaggaagtgagaatggttggtatatggggttcctcggggattggtaagactaccattgcaagagctctgtttaaccaactttctcggcatttcccagttagcaaattcatagacagagcttttgtatataagagtagagaaacttacaagggcgccaatccggacgacccgaacatgaagttgcacttgcaaggatgtttcctatcggaaattttggggaaaaaagacataaagattgatcatttaggtgcactgggagagaggctaaagcaccagaaaactctcatcatcattgatgatttggatgatctagtggtactagattcattggtgggtaaaactaattggtttggatgtgggagcaggatcatagtgattaccaataataagcaattcttaagggcccatggaattgatcatatttacgaagttagtctcccttctaaagagcgcgctcaagagatgttttgtcagtctgctttcggggaaaactctccacctgaaggttttgaggagctcgtagttgaaattgcatggcttgctggtagtcttcctttgggtcttactgtttttggttcagctctacgaggaagaaaaaaggagtactgggtgaagatgttgccaaggcttcaaaatgatctagatggcaatattgaggagacattgaaagtcagctatgatgcgataggcaacgtaaaagatcaagcgttattccgtcttatcgcatgtcttttcaatcacgtcaaagtcagagacattgaattgttgctcgcagatagtggcttagatgtaaatattgcactggaaaacctagttgataagtcccttattcatgtcagaaatgatcatgtggagatgcaccgtttgctacaagaaacgggtagaaatattgtacgctcacagtccactgacaacccaggagaacgagaatttctggtggattcaaacgatagtcgtactgtactcagtgaaggcattgtaagtcttttttttagttgtgctactttcagtatacgaggttaagaaagtgccatttgatgaatcatgaattgtatggttttgtctctatctcactaatatcatatttttcagggtactcgaaaggtgctaggaatatcattggatacaagtaaggttagtgagttttgtgtacatgagaatgccttcaaagggatgggtaatctccttttcttggatatttcctcgaagacttttatagaagaagaagtcaaagtgcatttaccggaaaaaataaactattattccgttcaacccaaacaattgatttgggatagatttccactgaaatgtatgccttatacttttcttcgaaacctcgtcaagctcgaaatgcatgacagcaagctagagaagctgtgggaaggagctatggtaaggtttaagaataaattgttaatgctaattgtagtttttaaatgacgtgatgtgtaatttcaactgagctctgcgtttatttttgtctgagtacagtcatttacatgtctaaaggaattggatatgtgggcatctaaatacctgaaagaaatcccagatctttcaaaggccactaacattgagaaacttgactttggacattgctggagtttggtggagcttccttcctctatacgaaatctcaataaactgttggaattgaatatggaatactgcggtgaattggagactcttcctacgggtttcaacctcaaatccctggactacctcaatttcaatgaatgctggaagttgaggacttttcctgaattcgcaaccaacatctcaaatctcattctggcagaaacatctattgaagaatacccttccaatttgtatttcaagaatgtccgtgagctaagcatggggaaagcggatagtgatgagaataaatgccaaggagtgaaggtatatgtagttctctccaatatcatgagaatccattatatgtttttcttttcaaagtgtaaaggtaaatcttgcattgagtattaccaagtcaatcaacaaacaaagaatgcaaaatgacaaatgcaaatttgtttcgtaatggaatttgttttagcttagattaattaattgaaaagtcccaaactgtaaattgtattattggtgatttttgtttaacatctctaaattgtttatttggttcagcccttcatgccgatgctgtctcccactttgaccctcttggagctctggaatatcccaaatttagtagagctttcgtcctcatttcagaatctcaataaccttgagaggttggacatttgttactgcagaaatctggagtctctacccaccggaatcaacctcgaatctctcgtttcccttaatctctttggatgctcacggttgaagcgctttcctgatatctcaaccaacatcaaatatctcgatctagaccaaactgggattgaagaggttccttggcagatcgagaacttctttaacctcactaagctaactatgaaaggttgccgcgagctaaaatgtgtatccctaaacatttttaaactcaaacatcttggggaagttagcttttccaattgcggggcattgaccagagttgatttgagttgctatccaagtggggtggagatgatgaaggcagacaatgctgacatagtttctgaggagaccacctcttctcttcctgatagttgcgtcctcaatgtcaatttcatggattgcgtcaatctggatcgagaacctgtccttcaccaacagtcgattattttcaactccatgatattgccaggtgaagaagtgccatcatatttcacttaccgaacatctgactctcaaccatttggaacgtcttcctctctgcccatccctctacttcccacacaactctctcaaccattcttcagatttagggtttgtgcagtggtaagtgcttccaatggagtatatatcggggtatatagtcggttcaaaggcagaattgggaacaaatttgattcctttggtgagctacataaattcatggaaattgagaagggtattcatctgtgtatatttgactgtcgtatccgtctatacaaagataatgttcctctatctcaactgaactatgatcatgtggatataaatattcatataactagtggagattggagatctacggtcgttttaaaagaatggggtatacgactcttagaggactgttcatcagcggagaaccgacttggtaatccaaacagtactcttccacatgtttgtgtagaggatgaagaaaatttggttaatgggactgaacaaggtgatagaggtgatgtagtgacggagacaagcagtaaacagaatgaagacgttatccttctgcaacgatcagctgattccatgttctctaggatgtcaggaaaagaaatgatttcatatttcactcatcgcactactggaacctctctaaccaacatacctctacctcacacctctccctcgcaaccgttcttcagatttaaagctttcgcagtggttggttgcaaatcttctggtcagttttcatattttgtcacccatatttcttgtcgattcaaagatggatttgagaatcaaccacgtaggctttataaagctgagaatggtaaccaccttgacatatatgagtgctctttccctctataccaaggtaatgcttctccagctgaaatgaactatgatcgcgtggatatacagcttcatttaaggtatagaagtgactctacggtcagattaatagtatggggtatacgcctcatcgaggactgttcatcatccgagaaccaacttggttatctaaatactctgtagcatgttcgtgaagacagtgaaacggtgagagtgccaaaagttccaagaggctcaagacattgagataggctatgagactgatcagagtgaagagcgtggatacagagtgatgatattggtatagacagtgagactgatcagtttgaagagtgtggaaatagtgatataggccatgagattgatcagagtgaagaatgtgaagacatggacgatactggtggtatatgcattgggattgatcagagtgaagagcgaggagacagtgatgaatagtgatagtggcagtgagactgatcactttgaagagtgcgaagatagtgatataggcaatgagattgatcagagtgactaatgagattgaatacaatgaagagagtagagacagagagaaccagtacacaatggcaggtaagtattaatcaagaactgaacagaataacagatatctcgccgtcaggatctttaatattataaatcactgagttgttttcttttgcttgcagattatgtgaaaaagaaatgaatctttgagatacttttgtggtgatggaatgagtagttttgctgccggttctatggaacaacaagaagagcccaagattcctcattgtctccctagctagacagacattttcaggtgacccaaaaaaactcataaaccatttcattttagttccacatcaattgtaaatacagagcatatatatagtagcatgcttttgaatttctgattgtctggttatagactttttattatatagatatttggctgtattcaattgataaatttcacagccatcaatgttgttcactgcttggttaaagactttgatattatctattatgggataattagatacatgtgtgctagtattatgaggcatatatttcaaaaaaaagtcgtgatgtagttacaaaaattgatggaattcaagccactggtttttaattagattataaagctgaaggaatggaattgtctcaaatggcagatgaagatggtactgttcatgtcaatgttttataattttttgttttttttcttaggttgcacgtttgtgataagcttatttcattactataacgatttaatttctgaagaactatttgtgttatttgtgttcacaagaatttgctgtctggaacaaagttttacagtgtacctgaattgagttttcttttattcgttttcggatttcactctccactagttgaaaaaggtctgaggctttctagattgtttcaaacttcgttaggaacatgaaaatttgcatctagacaatgccctgtggtatctggtaatcaaaattctgtttctggttacttcgtttttacatgggcagaaagtgaatctcctacaggtcttgcgacacagttagcttttgatttgataagcttactgttactttaaccctgttgacatttctcacctatgtcattcgtttgaaagcttgttttgattctctaatgatatgcttaactttcattctctgatgattcttttgtcttgcaattgttattgttcaggaaagctggaggaagtcactttgatgaccaatgttggttacggatctgacaagatattaatgtaagaataagaggctatggacatggtttttacttgagtggtggcgattaagtccaaatctaaaagagatgattaagtcaagatccagcagaaaagaggaaactttcgttaaggtgtatgacaacagtggtgcaattgctaatgtttgtgaattggtcttttttcttattagggatatataatgaagcaagcatgattgaagaaatcgccaagtcttaatcggctcacgttaggtggtggaaagacgacgcattgcaaaagttttgcaggctgacgaaaaaagaggagaatggagatcaattggaagaggttcttcttatttgattggttaatttttcttttctttctatatttagatatacatggtgacacccattattgtccaatttgtcccttttttctgtttcttttgagaccatgtctatatatgagaattgagaatcttacaattaaatattttgaactaataagtcttttattttgtttccaactcatgtgtttaactaagtcctaagctaacactagattttttttaaaagaaatttggttttcctccacagtatttttattgttttttgtggacttgaccacaaaacttcaaaagactcggaagaaaattaaacaaatattatgcacaatttcgcaccactcaatgccttgcctcccctacctaaaatgttgacaatgtcgtcttattctttatgtcaagcacgatgatgtgtctgactttaagtaatttacattttttaaaaattcgtgatagatattctcccaaattctttcaaatatcataggctttaagatgttaccaactaccaagtctcctaaaaagaccaaaaagtctccttagatatttatcaaactctttgatgttttgttgctcgttccttcgttcacagtttcctgatttaacagtggccagtaggataatgattacgttgcttcacttttcactgttactgtggaattgcttggtaatttcgaaaacttgtatccttattaagaatttgtaaaaagttttgcaacttcgtattgtacatctttattaagaatttgtaaatgaatgatatacagtagtaaagacaagaggctatgaaatatggttatgacgattgagtcaacaaagaggaaacttccgccaagtaaaagtctaagaaataattgtgaaaacttgtatggccaagttacctctcagctgttatgttaaatgttttatatccaccaagacagactcactacttgtcctctatttctcttcttaaaatctcaatctccaaagtcttcgtttctagtttcctccttctaactctctctatggcttcttcatcttcttctcgcaattgggtttatgatgttttcttgagcttcagtgggaaagacgtccgcgtaacattccgtagccactttctcaaagagcttgatcggaaactgatctctgctttcagagacaatgagatcgagagaagccactctctttggcccgatcttgaacaagcgatcaaggactccagaatcgcagtggtcgttttctccaaaaactacgcttcgtcgagctggtgtcttaacgagttgctggagattgtgaactgcaatgataaaattatcataccggttttctacggtgtggatccttcccaagtgaggtatcaaatcggtgaatttggaagtatctttgaaaagacttgcaagagacaaacagaggaagtgaaaaatcaatggaagaaagcgttgactgatgtagctaatatgcttggatttgattctgccaaatggtatgatttttataccaaattcattattagatacatcttgaaataaaattgttgtttcatatttcttaaattatctttcaccttattagggatgacgaagcaaaaatgattgaagaaatagccaatgatgttttggctaaactgcttttaacttcatccacggattctgctgagaactctattggcattgaagatcatattgcaaatatgagtgtattgttgaaattggaagctgaggaagtgagaatggttggtatatggggttcctcggggattggtaagactaccattgcaagagctctgtttaaccaactttctcggcatttcccagttagcaaattcatagacagagcttttgtatataagagtagagaaacttacaagggcgccaatccggacgacccgaacatgaagttgcacttgcaaggatgtttcctatcggaaattttggggaaaaaagacataaagattgatcatttaggtgcactgggagagaggctaaagcaccagaaaactctcatcatcattgatgatttggatgatctagtggtactagattcattggtgggtaaaactaattggtttggatgtgggagcaggatcatagtgattaccaataataagcaattcttaagggcccatggaattgatcatatttacgaagttagtctcccttctaaagagcgcgctcaagagatgttttgtcagtctgctttcggggaaaactctccacctgaaggttttgaggagctcgtagttgaaattgcatggcttgctggtagtcttcctttgggtcttactgtttttggttcagctctacgagggagaaaaaaggagtactgggtgaagatgttgccaaggcttcaaaatgatctagatggcaatattgaggagacattgaaagtcagctatgatgcgataggcaacgtaaaagatcaagcgttattccgtcttatcgcatgtcttttcaatcacgtcaaagtcagagacattgaattgttgctcgcagatagtggcttagatgtaaatattgcactggaaaacctagttgataagtcccttattcatgtcagaaatgatcatgtggagatgcaccgtttgctacaagaaacgggtagaaatattgtacgctcacagtccactgacaacccaggagaacgagaatttctggtggattcaaacgatagtcgtactgtactcagtgaaggcattgtaagtcttttttttagttgtgctactttcagtatacgaggttaagaaagtgccatttgatgaatcatgaattgtatggttttgtctctatctcactaatatcatatttttcagggtactcgaaaggtgctaggaatatcattggatacaagtaaggttagtgagttttgtgtacatgagaatgccttcaaagggatgggtaatctccttttcttggatatttcctcgaagacttttatagaagaagaagtcaaagtgcatttaccggaaaaaataaactattattccgttcaacccaaacaattgatttgggatagatttccactgaaatgtatgccttatacttttcttcgaaacctcgtcaagctcgaaatgcatgacagcaagctagagaagctgtgggaaggagctatggtaaggtttaagaataaattgttaatgctaattgtagtttttaaatgacgtgatgtgtaatttcaactgagctctgcgtttatttttgtctgagtacagtcatttacatgtctaaaggaattggatatgtgggcatctaaatacctgaaagaaatcccagatctttcaaaggccactaacattgagaaacttgactttggacattgctggagtttggtggagcttccttcctctatacgaaatctcaataaactgttggaattgaatatggaatactgcggtgaattggagactcttcctacgggtttcaacctcaaatccctggactacctcaatttcaatgaatgctggaagttgaggacttttcctgaattcgcaaccaacatctcaaatctcattctggcagaaacatctattgaagaatacccttccaatttgtatttcaagaatgtccgtgagctaagcatggggaaagcggatagtgatgagaataaatgccaaggagtgaaggtatatgtagttctctccaatatcatgagaatccattatatgtttttcttttcaaagtgtaaaggtaaatcttgcattgagtattaccaagtcaatcaacaaacaaagaatgcaaaatgacaaatgcaaatttgtttcgtaatggaatttgttttagcttagattaattaattgaaaagtcccaaactgtaaattgtattattggtgatttttgtttaacatctctaaattgtttatttggttcagcccttcatgccgatgctgtctcccactttgaccctcttggagctctggaatatcccaaatttagtagagctttcgtcctcatttcagaatctcaataaccttgagaggttggacatttgttactgcagaaatctggagtctctacccaccggaatcaacctcgaatctctcgtttcccttaatctctttggatgctcacggttgaagcgctttcctgatatctcaaccaacatcaaatatctcgatctagaccaaactgggattgaagaggttccttggcagatcgagaacttctttaacctcactaagctaactatgaaaggttgccgcgagctaaaatgtgtatccctaaacatttttaaactcaaacatcttggggaagttagcttttccaattgcggggcattgaccagagttgatttgagttgctatccaagtggggtggagatgatgaaggcagacaatgctgacatagtttctgaggagaccacctcttctcttcctgatagttgcgtcctcaatgtcaatttcatggattgcgtcaatctggatcgagaacctgtccttcaccaacagtcgattattttcaactccatgatattgccaggtgaagaagtgccatcatatttcacttaccgaacatctgactctcaaccatttggaacgtcttcctctctgcccatccctctacttcccacacaactctctcaaccattcttcagatttagggtttgtgcagtggtaagtgcttccaatggagtatatatcggggtatatagtcggttcaaaggcagaattgggaacaaatttgattcctttggtgaggtacataatttcatggaaattgagaagggtattcatctgtgtatatttgactgtcgtatccgtctatacaaagataatgttcctctatctcaactgaactatgatcatgtggatataaatattcatataactagtggagattggagatctacggtcgttttaaaagaatggggtatacgactcttagagaccggttcatcagcagagaaccgacttggtaatccaaacagtactcttccacatgtttctcaagccgaagaaggcaatatggggtattatacacatgttcaaggacttgttaatgagattgaaaatagtgaagactctggagataacaatgtagagactgagagaagcaagaagcgcatgcgggtaagcattaagcattaattaaacataatgactattcatctctcattctttttgtatgattgacgactggattcttttgcagctacaccacttcatatgagtaatattaaacggatggggtatacgacacttagaggactgtcatcatcgaagaaccgacatggtaatccaaacactatgcagcatgtttgtgaggccgatgaagacaatgatggatgccattagactgatcagagcgaagagcgaggataagaatagtgatataggcagggagactgatcattttcaagagtgcgaagacagtaatataagcaatgagagtaatcagagtgaagagcgtggggatagtgacgatgatggtataggcaatgtgactgaacactttgaagagtgcgaagttacttttgaatttctgattatctggttatagactttttattcagttgatcaatttcacagccatcaatgttgttcactgtttggttaaagactttgatattatataaattgtgggataattagattgttagtattatttcaaaaacaagtcatgatggaattcaagccattggtttttaattacaataagctgaatgaacataattttctcaaatggcagatgaagatgttgatgttcatgtgaatgttttaaaatgttttgtttcttttctgtggttgcacgtttgtgataagcttatttcattactatcacgattcctttaatttctgtcaggcacaaagttttaaagtggacctgaattaagtttttgatgtataatagttctcttttgtttatggagagacaacgaacgactgacttgctttgtagccacacctgcaaagtttttaggcatctttcaaagtccataaaccaacttagtctagttccgaataatctttaacacaaagcgtcacaattgtttcaaatgcaagtcgtgttgtggatacaaaaaaactgatggaattcacgcaaatggttttaacaaaatgaagatttctcaaaattggcagatggaattcatttatttgttttcaagtactctgtttctttcttagcttgcacatttgttttgagcttatgtcattactattacaatttaatttctgaatcctcacattatacttattttcttgtttcttacagtttgaggattatttctccataaatcctttcctaactcgagcaaggatcacctcaactacggtgtggagaattatgagctcacatcttcacaagaattttgtaaataaatttaagggacaaagtgtcaataaaattgttctcaaaaatttgttgtctgagattggatgaaatctgttgtttgaaactcttttggctctggattctcctctatagctgaagtcaactacggtcatgttgatatacaactttcatctaacagatacttcatattaaaaggatttggtataagattctctgaacatggtaatgtagagggataattagttggtccataaaatatttttgcttgtggcaaccaaatccctagggacggctctggctatatggctttgtagctatgtaagaaatgatatcgcataattttcaattttgcttccaatctgattatgcatatagagacgaagctgcaactatgtaacatattaaggccaagacccaagagtgaataaaccatattctgttgttactttcctatgtgatatcaaaatgagtaatggagtttctataatttgattgttgaacttttaaaatctgtcttttagagtcatgtccagaatatttgtatcagttctacttcttgtatactacgcaaaattgtagcctgtaacacaagaaacaagaaacagagtaagaaaaaaaggggtaccttcttcaacacgcttccattggaacagttaacaagcctacagaagaagaagatgaagacgaagatgaagacgaagataaagacgaagcataaatgatggaataagtagccaaagttttatgttttatgtaaacagtaagcctaacacattcaatagaacattttgactttcccggagaagcatatatcatactataggattttaattatgtttgtatttggaaatttatcaaagatgtttcatcatatgattaaagtgtgagtggaggagaatggaccacaatccacgaagataattatattaactccaatcccttttcttccaagcaatttcttctctcttttagctacagcaatccaaaaacacacgtatgatattatcaaaactacgactaccatcctgctctagttaaaaatattatgcataaattcaaaaagtattgttacggataataaatattaatcctatgagaaagtaatattcttttgctttttcagaatttagatggttgctttccaagaaacatattttgttttgtcaaactttcaggtcttgtttgctagtaaactcttttatcgcaggaaaatcaaaagacacactcataaactcttttgttatcttgttatatatatgctgcgtgattcgacttttataataagcccaaattgaagatttttttgagatttttttaacctttaattattatatgattatttaaaacaagtaaaaaaaaaaatcaaacaaggaggaaagaagaattataaatttaaatcagaaccaaatttattaaatatctttcttattaaatatagaaacataattagtggacatgatccatttttgttaatatttgtatccgtcttttaggcaaaaaaacagtggaagagtcggtttaaataaaatccgatccaatcaaattttatgaacaatatttctaatcgggtcgggtatcatttgtgtcggaaaactatttaactcatccacaaaaattacttcaaaaatactatggagatttaataaatctacggctagcaaaatggtccataacttatatgcttgggaaaccactcggtcaaattagatgtcatatttttaaggaaattatgcatctcaccaataattttcaaactcgataatattgacgaggtttccttctcaggttttgagcaattgactgaagttcaattgcctgaggaagcaaaagacaccaataatgcttgcaccaagttgtcatttatcacctgcactaactgtttcaattcaaatcaagaagccttaattaccaggtgtagaggtgtctgacgggttaacagaacttaggatcatatgacttgctccacaaggtacatccatcattgttttcctctaacaactacttatacacgtttctttttctatttttttacttgtcttgatatctgtaaaatgtctctgaaattttacacttctgaatagaatatttattcgtgtatcaaaagaaaagaaaatctaaaagcaatataaaacaagaaaaatgcgaaagaaactaagtgaaccaaagaatcttgaagtttccaacggtttttattaaattaatattaattacttttcaaatatttaattgttccctatgaatgaagcaaaatatggattctatggagacagaaaaagttaaccacagcaactcagctttacaactgcggaaacaaaaaaaataaaatgaccttatcaagaaaaaccaaacagccttaaccaagaaaagcaccattactctaacctctcttgaacctatataaaccctaagctcttaagctttaacaagaaaaaaaacataagctcttaatcaagtcatttcacacccaagaaaaaatggtggaacatcagatgaaaccggtggcctcttttcttttagtcctgaacttttgtatgtatgccattgttcttggaattggcgcatggtccatgaacaaagctatcaaccatggtttccttattggtatatgattttttttttgttaatgcatggtccattgttctctagtttttaatttcctgtctattggtattaagttcttgatcgatttaattagtatcggctaatatgaactctatttagttatttcaccaattcagtgtctgataacaagcaaaacagtatttatgcaagtaattttaaactcgttttaaatttgcatgatacgtcagtgattgagtgctttacgaagcaaaagttttgtaaactcataaatataatagtaatttttctaattagcatatgttgtatataatagtaatttttctaaaggaatttattacaagccatttgttttgccaacgaacttttttttttatttaatcatccatatagccgaataattatgataaaccaaatttcaatatttttaccttcttgcaataataaaattcaaggtgcggattatagtcttccggctcatttctcgccgatacattttccaatgggtaatgcggccaccggattcttcattatgtttgctttaattgctggagttgctggagctgcctcggttatctccggcatcagtcatctccaatcatggacaacgactagtctcccggcagctgtctctgccgccactattgcttggtcgctaacacttttagccatggggtatagactttaaaacagcacttttgacttaatactcaatcattttaattatttcatcaaattcgtatataattttcacaccaaatttagcatagcaatctagtggttattaaccttcatttcttgaatgttcttgtgtagatttggttgcaaggaaattgaacttgggatgagaaatgctcgtctggtgagtaaacctcttatggtactattttattgtaaaagtttgttaccataaaaattgataaaaacatacaatgaatatttaaattaaaaataaaaccaaataagttattttttacaaactttaattaattgaattcgttttgtatttctcggcagaggacaatggaggcatttctaattatactttcggcaacacaacttctctacattgctgctatatacggcgttcgaaaataattctaagaaatcatactgttttcttttcttctttttctttgttttgtaatttaaattcttatccgatttgtttattaagatgtaattgtgtggtttggattatttgattggatttctactagaaccctttatcatttatattttgtgtctcactacaatatacataattatactattataatgttttaagaatacacttccaatgaaattggtagaaaaatcctttaggtttgttcatgtattactcttttctttactaatcgtttcatcaatctatgtaataaagactacagcgacccaaaacatttggaacgttttgaacttttttttatagcactagaattttagtctctatgattacaaagttaagtaatagcatattgtaaatcattgacaacaaaaacagtttaactcagtttgcactcatattaaaagctacaagcgatgcataagcaccacctgaaatctccattaacgtttcatgtctcccactctccgcgatcacaccgttcttcacaaccgcgatcatatcagcgtccttaatggtagtgagcaggtgagccaccacaaccgtggtcctgttcaccatcacctgatcaagcgcatcttgcaccacccgctcagactctgcatccaacgcgcttgtcgcttcatcaagcaacaaaattttaggatccttgagaatagcccgagcgatcgcgatcctctgtttttgaccaccggataattgtactccacgttcaccaacggacgtttcgtagccttgaggcaatgagctgatgaagttatgcacattagccgcttttgccgcggttataatctcttcctctgtggctcctccgattttaccatatgctatgtttgatcctattgtctcattgaacagaaccggttcttgactaaccaaacccatttgttcccttaaccaactcaattttaacgattgaatttcaacttgatctaaaagaatcttgcctgaatccggatcgtagaatctctctagtaagcttatcaccgtcgatttaccgctcccgctttctccaaccaatgcaacggtctgaaaaaaaccaaaatcgttaaccatttaattacattaaaccggaaaacctcggctttgtattctttcttttatttacatgtttgttacctgtccagatgagatagttaagcacaagtcactaaaaatctgtatatccggtcgcataggataccggaaactaacatgttgcaactcgatatcgccgtggacgattggtaatattgtccctttctcggaactcgaatcgattttcggtttactatcgaggatatcgaatatcgaagcagcagagtcttttgctttgtttatgtcaggtgccatagtactagtttgagtcactcctacggctgtcaaagttaacgcgaagaaaacctgaaatgttaaaaaaaacactcaaacatcacaaacccgaaccaaaccggatcataatcgaacctgattctactcttttatacctgaaagaattctccgaacgttgccctcctgttctgaatcaaccaggaaccgccgagaaagcatacggactcgatgacatagagagccaagtatgagccaccatagcacaaaccactcaccagtcctaatttgaagccttgttgctttggttcgtcacatttctcttggtataaatccatcactttatcctctgcgcagaacgatgcaactgttcttatgctgctcaccgcgtcactcgcaacctggctagcctcttcatattttccctaaatcgaagtaagaaatcatgttagactatatagaaccagagtttaaccaaggttgttgaatactaactactaactcttgcttttgctccaaaacccgttataaacttgatctggtagtatccttgaaaaaacattactggtgccaccaaaagggccattaaagctaataaccaattagccgtaaacgctataataaatgctccaattatagtcgccatattttgcatgatcaaccctaacacatctcctactatactcttcactgtagaagcatccgtggacaacctcgctccaatcacaccgctagacaacaaaaaaaaacacaatattatgaagcccataacttcttgttaccctaaaagaaaaaggttgattacattacctagaatttttagtatcgtcgaaccaacttatatcttggtgcaagactctatcaaacgacaacgatctgatacgtttgattagttttgctccagcgatagcgaataagtagttttgtaacggaatcacaatcaggtcggttaagccaagggcgacaaaaatgagagcccagaaaagagaatcattctttagtttatttgaaggctcaaagaatatcctgattgtgcgagacaaaagcaaaccttgaacagggaacacaataccgtgaatcactgcagccaatgaaccgagcaacaaaaccgaaatctccggtttgttaaggtgagcaagccttcttaatgatacttccttgcctttcttaaccgtttgagttttggtggaagatatattctcgtggaactcttccgtctggtccaagctaatcactcccggtaaaccagatggtgatgtgagagtgccggaatggattccattttggctatccgaactttcgatttccaaactcatttcacacttttctggttccttgtctattgcttcttctttcttagatccttcttgtagacgaactagctgtgaatatgttccttcgggatctttaatcatctcatcatgagttcctgataaaaaaacttttgttcatatatacaggaaaaaacattgattacttgtggttaaggtattactcaaagccctaacctttctcaatgacttttccctgctgcacaacagcgatcatatcagcggttctaatggtggtaagtcggtgagccaccactacagtggtcctgctcaacattagctttacaagagcatcttgaacaatgcgttcagattctgcgtccaaagcgcttgtagcttcatcaagaagcaatatttttgggtttttcaaaatcgccctcgcaatcgcaatcctctgcttttgcccaccggataattgcgtcccatgctctcctaccatcgtttccaaaccctggacaaaaaaagaacaagaattaagaatactaagctt

SEQ ID NO: 845 - DNA, 79995 bp, Arabidopsis thaliana
gatccaaataagaggttcgctagtaaaattctcggctcagactctaatttgagtcaatgccatcaagaagaactcaatgaaccagatacacataatcgcagaaagataactgaataatcttggcaatataaatcttcttgcttattatcgtctttctctaccaatataactaattaagattctttaaggtctttattttagcatgggtggcttatgattaatacttgtttcgaggaactttcttctgccgcaactaatcttacaacaagctaaaccacatatccctgacatggcagtatcttaaggactatacattaactttacgagcaaagatgaatgaacagagagtaagaaaagacaatgaactacaattacaaagacatcaaaatctataagatcattcagagaatttggaaaaaccataaagaaatgacgaatgtaaagtcatctactgaagcatataaagtactttttatgaaacacaagcatatcgaagccaatcttgaggccatattaaagtgaaaaaaaagcaaggcacccgcacagaacatgaaatgaatgtaggccacagagacgactgaatcttcgcaaactcacaaaccaatttattatccaacttagtgtgatccaaaccaaaggtatgaatacacaatccagctacagaactagcatgaaactgcactatgtgataccacattacagatcttcgtaagacttaaccataactctttatctagctagcaacaagtaattcacatattctcatgaatttgatcaatccctagagtttcactaaccaatatcatcagtcaaaaaggaaaactgacctgaacaccaccgtctaaagcagcacaaggctgaagaataggaccaggattcgaccgttcaacagcaacttgaaccggtacaccaaaacctttccttggtccagtttcacgaaatctcgtctgattctcttcccgacgtttatctccatcaccagaaacagttccagtgttgttatctccaccatcaccatcttcatctctcacagctccatgaccaccaccaccatcgttatgaccaaaaccaagtatacccgttaacttcttcaaaaaacccattaaccccagatatcaaattcgatctaaagccctcaaatttaacagcttttctctcaaatgaatgatcttccaaaattagggttttcgaatatccctttcctctcccgatttttgctactttctccgatcgcttcttaatccaacaatattcatttcctactgttaaaacccagaaatctctgtctttaatctctctctctcgtgaacactgtgttaatcttcttatgcactgcaacaaattatagaaagatgaatttttttttggatcaaagacggatcgagcaagatcttctttttatcattaacggcgcggtttctattaatatactaaataaatattccacattttttttttctctcgtgagtgaacaaaaaaaaaaattgcgatcatttacagttttacttttacacatcactgacatcagagagaattgaacaaaaaaaattcgaaaagtttcgtgttaatcatatatatgaaagttggctaactctctccaaatgattgacacatcatcattttagcatttgccatgtgtctattaagtaattaatgtaagctcttcaacttctaatttataagttaatgatatatttattatttaattttacatatttaattatagtattactaaatttattttaatattacatgatttttcaataaaaccatttaatagttttctcatactcgaagatttttttttgtaatccaaactcaaagtatgagtatataatagtcgtggattatttaatgatttgagtaagttattttcttaaattgatattatattctcttaaatttatatttatacaataaatcattgaggttgaagaatacgtaaggagctccatcatcaaattcttaggtttctagaatccaaaactaccctctcttaagttggtttaatacaaacgttatttatgaattatgtgtatgatgcattgttgagaatgttgttagaaaaaatatttttaaaattaaaaggaattgtttattgtataagtgaataattagataaataaaaattatatttaaattaaacaatacgaaaaaaatccgaaaataccgcggcgtagcgcaggtgatcacctagtgttaataattgaaaattaagaacttctatacattgtttgttacctaaccattcttcatatgtaaacaacaattaaaaatgatgaaggatataatgtactacaggcccataattgagacgcacaggcccagaatcgaataagaccggcccattccaaaatgacgactgaattcaattttgtttctattttttgataaaaaagaaattaaaaaaatatcgcatttcagttgttcaacttcttcgtcgtcgtcttcttcctttgctccgtcgtcgagatctcgtcgaacctcaaatctcaaatctcctgtaaccagatcgtctaattatccgatctgcgtttcgaatctcagatcgaagatgccggtggctgcttccgccatctattttctgaatctccgtggcgatgtactcataaatcgcacctaccgagatgacgtcgggtaagagagcttctccttttcttcaccgtcgatctctttaattttttgaattcggcttcattttcagctccatgttttgttcttatcgcttctaagtagtcgtactttgtaggattttagctgtgagatttgagattttaaaattttgatttgattttgatacttaggggaaacatggtggatgcatttcgtacgcatataatgcagacgaaagagttagggaattgtcctgtgcgtcagattggtggctgctcctttgtttatatgcgaatcagcaatgtctacatcgtcattgttgtcagtagcaatgctaatgttgcttgtggattcaaatttgttgttgaggtaaacttgtttttgtgtttcattttaatattccacaattgttttgattcttgttcaaatttcaagagagtcagattgattctatacacatactgcttttgattcacattttcaggctgtagctttgttcaaatcatactttggtggagcttttgatgaagacgctattagaaataactttgttctgatttatgaattgttggatggtaagtaagcctgatagggtcatgatcaaatcactttcttatcacttgtaaagttgcattagtcgttatatgttattctattttgtggtaacaccaatgaatgatattttgtattgaattgcagagattatggactttggctatccacaaaatctctcacctgaaattttaaaactttatatcactcaggaaggtgtacggtcaccattttcatcgaaggtaaaggcatctatttgtttgtgtatacaacagattttgtaattgtgttggtgtgtggttcttcgaagttaagcagtatttcccgcaataaatagagattatgttgcttcttcactagatatgtttgcattcataagcttcttttcattacagccaaaagacaaacctgttccaaatgcaacattacaagttacaggtgctgttggttggagaagagagggccttgcttacaaaaagaatgaggtgagtgttgagtttctttctgtgtgtatgtagatcggctaggttgtgcggtagtgatgatattttgcattctctcaaacgcaggtgtttctggatattgtggaaagtgtaaaccttctgatgtcctctaaaggtaaataattgccttttatgaagttttttgaagttgtctttcttgttgatttgctgtgtatgactggttttgcattttatggaaacggttaggcaatgttcttcggtgtgatgtgacggggaaggttttaatgaaatgtttcctttcgggaatgcctgatttgaagttggggttgaatgataaaattggtcttgagaaggaatcagaaatgaaatctcgcccagctaagaggtatacgttgttaatacattgaacatcagtagccactgacttttctttgtgctaactgactctcgttttgtgcagtggtaaaaccattgagcttgatgatgtcacatttcaccagtgtgtgaacctgaccagattcaactccgagaagactgttagttttgtaccaccggatggagagtttgaactgatgaagtaagttttcgaatgtccactgttgcaaattgttctggtaccaaatgtgtattaactttatgatgtctcaggtatcgaataacagagggtgtaaatctgcctttccgtgtattaccaacaatcaaagaacttggtcgtacacgtatggaagtaaatgtcaaggtacataacttttctcaaggattacaggatacaaaaaaattggcttgatctttgctctcttacaatcccttcccgtgttttgtctgttcaggtcaaaagtgtgtttggtgctaaaatgtttgcccttggggtcgtggttaaaattccagtgccaaaacaaacagccaagaccaatttccaagtgacaactggtcgcgctaaatacaatccatcaatcgattgcttggtttggaagtgagtttatataatttcccctcatattcatctctataattcttttgttggtgttttatcaatcattcggcatctttctctcttttactctttaggataagaaaattcccagggcaaacagagtccacgctaagtgcagaaattgagttgatctcaacaatgggagagaagaaatcttggacaaggccaccgatccaaatggaatttcaggtcagtctttgtctcttttaggcactgttaaatagaaccagatttgcttaaagcaattattaaccgtctcagctttgttcttttctaggtgccaatgttcacagcatctggtctgcgagttcgttttctcaaggtacgcattgttatctatgcttttgaaagtaccatccttccaaaaaatgcaatgctaagtagcagaatctctaagccattgtgtcattaaatccgttcaaatcttttatgtgatttgcgttttggttaatctgtctctggtctttcaaaaattgattgctatactacttttttggacctgactatccggaacgattggcaggtttgggagaagagcggttacaacacggtcgagtgggttcgatacataacgaaagcgggatcttacgagatcagatgctgaacattaaacacagttcaggttcagtgacatcagacttaaaagtttcatggcttctagttttttgttccttatgcaaaacaaaaacaaaagagttaaatatgttttataccttgttttatgtttgttttgtcgattagagatatctgtgttaatatgatttcttatgtcttaatttggtattgaattctgtttttctttctttctctgtttgtgaaattgtacgagatatagtttagattaattctggtgtaatcgaacgtgatagagtatttgtgaaagcagtcggattctttttagtagtagaatcgggtgtaatatgttaatgaaaacaaattttacttgagaatagttcgaacttcgaaggtttttacacataacatagatcgttaaaatcttttgtaagtctactaattcttcagaaacaaacgggaaattgtaaaagtaatagactatcaaagctacacccaagtacgtctttcactcgtggttggttatgcatgatcgaatttctataacttcgcttatggcaaatgtggtcatggtggttctttggactgtgtcatgtggctctctgcccacaagacaccagatatcatggatactttgctactcacatgcaactcaaatatggtctaagacaacaaacatgattctattgaactgcttctccatcgattgggatcacctcgtcggtattctgaaatccacaagctgggtgtcttgtttttgcatcacgttacttttcaaagttccctataatgtttgacgagaatgcaacaaccgacgacatggataccttccacaaatatcaataacgaattctgaagtttaaggatttttaacttcagaattcgttattaatcattcacaagttattgtgttattttttataatatatccaatgcaaatactcttttttctcatctccaaactgaagtatttttatttttataaactcttaataaaaacggatgaccacaaatatttctgctataatttggatgataatgaaaacaaaccaactacaatctactaaagattcaaaaatattttctcgaatgcttaaacctcacgtaagtaaataccaaatcaattcagataaaattaacaaaacaaactcaaataaaatctcctaaaaatcctataaataaaaagatgatttcattttttttcttcctattaaatttacattttccgccacacttcatctctcccactagtctctcctcgagactctctctgtatgtgtgcgagaagcgagaagcgagagagagagagagagagttgttagctcacacgctttctctattttctcggaattcacaaaacagaaagtttcatcctttacgagaattaagccgaaagaaacaatctttgagtttgatttcttcttccttccttctctctctctgctctaatggattccagagacatcccaccgtcacataaccagcttcaaccaccaccgggaatgttaatgtctcattaccgtaaccctaacgccgccgcttcaccattaatggttcccacttccacatctcaaccgattcaacaccctcgtcttccttttggcaatcaacaacaatctcaaacgtttcatcagcagcaacaacaacaaatggatcagaagactcttgaatctcttggatttggtgatggatcaccttcttctcaaccgatgcgattcgggatcgatgatcagaatcagcaactgcaagtgaagaagaagcgaggaaggccgagaaagtatactcctgatggtagcattgctttaggtttagctcctacgtctcctcttctctctgcagcttctaattcttacggtgagggtggtgttggagatagtggtggaaatggaaactctgttgatccacctgttaaacgtaacagaggaaggcctcctggttctagtaagaaacagcttgatgctttaggtataagcaagtactctaaagtttgaatcttaacacgttttgttttagattacatgcaatttgatttgatgggtttgttctgttttgtttatgtgtgtgtgtgtgtgtgtgagtaggaggaacttcaggagttgggtttacacctcatgtcattgaagtgaacacaggagaggtaaaaagttgttgttctgtcttagttatctgaaaatgtgttttgtttcatgtttcaggattggtaagttagaaatgtttgaaataaatgtattggtttagtgaattttgatggaggaatgagttttaaatgatgttgttatgttaaatttacttactatattcaggacatagcgtcaaaggtgatggctttttcggatcaagggtcaagaacaatttgtattctctctgcaagtggtgcagtttctagagtgatgcttcgtcaagcttctcattctagtggaatcgttacttatgaggtttaaaattatgttcttttgatgtctttagttttagtatttctgtcttaagtgtttagatttgtatgtgtgtgctttttcagggacgatttgagatcattactctctcaggctcagtcttgaattatgaggtaaatggttccaccaacagaagtggtaacttgagtgtggctttggctggacctgatggcggcatcgtaggtggcagtgtagttggtaatctagtagctgcaacacaagtccaggtacagaatatgaactcatgttacagaatccttaatattgtgttcgggttaagaagacggtttcttttatgttcatatgcgtcctaatgtgatataggtgatagtgggaagctttgttgcagaagcaaagaaaccgaaacaaagtagtgttaacattgctcgggggcagaatcctgaaccggcttcagcgccggctaacatgttgaactttggatcagtctctcaaggaccatcgagcgagtcatcagaagagaatgagagcggttctcctgcaatgcaccgtgacaataataatgggatatatggagctcaacaacaacaacaacaacaacctcttcatcctcatcagatgcaaatgtaccaacatctttggtctaatcatggtcaataaaatgaagcggaaattaatttgtttccgttttggttacggttatggtttgatttcttgttgttgtttaggcaaatcttaagaagattcaagcttcatggttttttgtagctttttttttttttgttgggggtttattagataacatatagagagatctagatattagggtcattttaattttttttttttttttttgggggttaattctctgtgagttgatttgaattagagataaaagtctgagattccttactagaacaatatatatattccacattaaaatattatttgttttcacaaattttgtaattatttttaaaaaaattcaatataccgtagttctttaatccaaattattttaaaatgtttttatatcccttagaaagttagaaagagctcagctgttggatgtgatttaaagagatgatgacacgtgtgaaggtttagcaagctaataagctcctcccgagatctactgttgataaagctgcctcgtgttgatataacgagccatgcgattaaaagagaaaggtacttcagagtacctcagatgtgggaatcatgcatatcaacaacaagctcatcatcatcatcatcaagtgcagtcgatcctactcgtactctggcctatgtgttaccacagccaatgtttagaccatagagctgagagtaacgactgcaaccaactttcatttttacaagatatatcagtttgtcgagttattgtagttaatacgttcatatttattggtgatgtcaggtgatttggttagattgattgattaatttatttgcaagataaagagttttagaaagcaaaaataagtgaagtctaactcctattaaaccaaaatgtttttagaaaattagagaaacgcatcacatatggggactatgcatgtcatcagttatccgagatgttgttgaaattccaaacattttgatcaacaagtaattattgagttctgattaattcattatttatactattaattttgaaaaaaaaaaactaaacttaaaaaaaggaacttatgtgttcaacaatttcttaaataaactgacaaacaacttcttcctttaacctttatacaaaataaaacgatattacagtccaatgtatcttattattttttttttttttttgctcaacatcaactatcattaaccaatcaagttttacatcttatcatactccacaaaggatttaacctaatttggcattatagaatacaactgagaatcataattctcgagagaaagagattcctttgctatcctatctgccactccattgcctccacgattcgtgaacacgaattttgtttcctcaaaatgctgaagcaggtgcttgatatcttgtataatcagatctagtgcaggtctgtccccattatcaacaaggagggataccaactgttgggaatcagattcaaaaattacctttcggtaactgaagcgagaaagtgacagcaccgcccaacgcaaggcttcagcctccgcaaccaaagcggattggactcttggaatagcccgaacacctatccaaagcacattcttttcggagtttctaagcacccagccaatgctactggtgcttcggtctgcagtccaagttccatctgagttgcacttaacccaaccatgtgggggttgcttccatttgaccgcaggtggctcagttttctctatgtgcttcggtatgaaactccgctgcatactcagcctccactcctcttcatcctctattgcccgccgaattacatcaggtgcatcaaattgtttccctttgaaaacaaggtcattgcgattcttccacaatctccacaggatccatggagctaccagtccatcatcacccaaccatggatgacactgagttatgttcaataatttgtgcaagttttggtagaaggaatctgaccactcacgctctggtggagctggaattttggatatagcccatacaagtctgccgaaagaacatttgaaaagaaggtggttgacagactcgagctgtgatgggcagcgaggacacgaaccatccctgacaaggtgtcgatgatatagattgcccgctacagagataatgttactcaaacatctccataaaaagtgatgtaccttaggtgagactttagctttccaaatctgctcataaagcgggttgaggctgggttgaaggacatgttgagtctgcgttctacgattcaccacctccattaggacccaataacccgatttcacagagtaatgtccatccctagagtagtcccaagcaactctatccaatgtatgcctaccccctggccgtagttgaatgatttgttttgtaatatcctcagggaataatgcagagagtaagtcccttctccactccctcccactttcatccaatagatctctaacatattggagagaagaaacggacctagcatgggatggtagaactcttttcactacattcacaacctttgctggttttgactctatccattggtgtcgccaaatctcagtggacgcaccgttgtcaattatagctcgggttccttgccttaagagctcttgtgctgcatggatacttttccaagcaaaagatggtctagaacctaggggagcatttagtggatctgttttactaaagtacctgctcttgtaaactctagccattagagagtcttttctagataccattctccaaagttgtttcccgagcaaagcaatgttgaaagcttcaatgtctttgaagcgtattcctccttctgactttggcttgctcagatgttcccgcgctttccaaggcatgccttttgagtcgcgtttatttttccaccaaaattcagccattaccgaggataactgctggcagattgtggttggcagcttaaagcacgtcatagtgtatgtgggtagggccatggctacagccttgagaagtacttctttccctcctggagacaagaagttattctgccaacccgcaatcatggagtgaagtctttcacgaatatacttcaaagtctccaccttagaccctttgaaagattcaggtagccctaggtacacaccttgcccaccttcttgatggatgcccagcttgcttttgatttcagtttttctggtctctggaattttcttgccaaaagtgatacttgactttcgataatttactctctgacctgagacaaggctatattcctccataattcttataatctgattttacacatttcattatagactaacccatctctcctcaaaatccaagactttcattgcttcttctaaaaaagacccattaattaagacttgatagttcattgattttacacattccattatcaggcggtccaatgtatcttattgtttggctaaaccaataatatctgatgataaataagaatagaatcagtttgaccaaaaaaaaggatattaatagaatcatctgctgggtcaaagagaactgacaatgaacaacaaatttcaacgtatgaacatattgattcaatcatgttatacaataaaaaaaaagttatattattgaataaacaaaaagttatacatgtgtatacaacaggaagagagtattctagaatacctcttttttttcttttttcttttttttttttttttttaatggagaggtattctataagtatgtacatagtttttaggtgcagaaactatgctgatacaatgtgctcactattcatccaactgtggagagttaagctaaagctccctttcccataacttagctacaccactataagccagctccaatattgcagtgatgttatcatttacacgtatagaagctttcaatttcttcttcttcgcttttaactcttaatttggaaataagactaagtaagtagcttattaggtggtttaatcgtcaaaacattgtcactaaagactcgttcaatgcaaacaaagcaatcacacacacaactaacaaaacgttttttctaaattaagtaaacaaatcctaaacacaaacactctcacattgtcaccatacacaaaaatttcaaaacacttaagaaaaaacaaatttaaacagaagaatatatatcacaaaaccaaataaacattcagtctttaaatttcccacggcggagataaacaatctccgatactcttttcatcaatgccgatagcgaaaccgatcaaccaaaacactactgttccatatccaccacaacattacagtaaaccgcctctagtcataatcctaaccgtgatcctcctcgtcgtctttttcatcggttttttcgctatctatttctgtaaatgtttctaccacactctcaccgaagcttggaaccaccattaccacaacggattgcccgaaaatcaaatccaagcacaacaagaacccgttcaaccaccggttaaccctggtctagagccacacatcatccaatcctaccctttgtttccattctcatccgtcaaagatctcagggaagacaaatacggtctcgaatgcgcgatttgtctacttgaattcgaagaagaacacatcctcctacgactcttgacaacttgttaccatgtttttcatcaagaatgcatcgatcaatggcttgaatctaacaaaacatgccctgtatgtcgtcggaatttagatccaaacgcgccagaaaacatcaaagagttgatcatcgaagtcatacaagaaaacgcacatgaaaatcgcgatcaggaacaaacgtcaacatcaaacgaggttatgttgtcgagacaaagtagtggtaacaacgagagaaagattgagacgttaccggataaattctcgagatcgaaaacgacaggtcattcaattgtgaggaataaaccggaggaagaagatcggtatactttgaggttaccggatcatgttaagattaaggttacgagaagacacaacaataatcaaacagagagttgtatttcatttggtgagcttgttagaaacagagaaggccggtttggtgaagtttctggtcaatcacttgtaccggaatcaggaagttaaaagaggttttacaatatattttatcaatttgattagtccattttcttgttttttatttcttattagataggattttagagatattcaaatgaaaagttgaatagttaatgtcaaacaaaatttgtttaatttgtaatatctacaaacactcttttatgaatttttttttttgattattttgggccagcatacatgcttacgtaggtttggacaaaataatcagaccccgaagaaccggtttttaacttttgcgtaccgcggattaaaatttaatagttataataaaaagataagcttctgggtcatggaatctctcaacatgaagattccttcatatgtcagtaattatagttacgtttaccaagtgggagttttttttttgcttaatgttacaattaacattgtcctatatgaatttctggacatgttccccgtcttcgatggctttcgtccatctcccttgttagaagcacatgtcaatagaaaaagatcgtacagagagtgaaaacaataattcaagactttctataacaataaatataaaaagaccaaaaataatattacactataacatccaaaatattaacatataaaccaatttagctgtatttgaatggactttacaatttaacataatataaaaaaatatacccaaagttagttgtattttgattgatcgcaaaagaaataaattgttgtgaagacaaaggtttgaagttggcaattttttttgtcaacaatcgttcgtttgcgttttgaatgatagtgaaacgataacgatattaatgtaaactatcaaattagaatacgacatctaagttgaagaagaatatcacaaacaatctaaatcctcctttttttagcagccatgagttctgtgggtgtatttcttaaggaggaaattgatggaaaaccttttttggtattcacattagcacaaacaaaaaaccttacctcttctagtggagcactagccataaattctggtagcgacaacctccctcttcaacctctttttttctgccctgcttcccgtatcaattttcagaacctcaaccttacggaggaggataaggagaagtttcggccatttaattcttctcctcatttcccaaacacaagaagcggtgatcagcaaggcggatctttgcttgattgcgaccaacatggtatatgtaagctccctgtagtccctctcttttggtgcaacaataaaagtcctagttctgacgaattcatgtgcggtgcatgcgaaaaaatagtgctcagcacaaactattttgcatgtctccagtgtcaaaaaaatttccataaagaatgcgtccagtctccacttgagatcaaacacccttcccacccctttcactctcttcgactttatagttacctaaaagatttcaagacatgcttttgttgtaaagtttttaacagtatggtcatgctttatcattgtaccacctgggatttgagtatgcatacagtatgtgcgatgagatcaataccctttgttgtcgaccatccaaaaagccatttacatcctcttaccttttttcccgcacaagcttctttaatttgcagtttctgtgcaacgattaagaagcttgatcccacatacatctgtatcgaatgtgtcttcgtgatccatgaacactgtatgggtttcccacatgtcataagaatatcccgtcacaaccaccgtatctcttttacctcttctcttccatccggaaatctgttttgcagagcttgtcatcaacaagttgacaacgattatggtgcttactgaaattccggatgaaccaagaatcgtattccccaaactcagaaccactgagtatcactttattagaaatctgattaagaagtttacaactaccttaattggttttacacaagatctaaactactttagcttgtcacctgagatttccctaaacacacaagagcagatcacaagaacacactctttgatctctctagaatttcaatcagactaaaccttagtctctaataatgaaaagtgttgcactagcttttcactcacaatcacggctagatctaacaagaaccttagcacctctatttataccatcgaggtcttttgtcttctaggttagccttcgagatattggatcactccaaatcttcgcgtgaatatctcctctccaaactgaactcatcctgttgtgatctccacgtcattcgttcatttggcggcatatccacgtcagcattaattacttgatcttaactttagtctgctgaaacagcttccggcttgttccagcaatcagcactccttctggtttgtcctgacagagggtgcactaacaatctccccctttttgatacaatttgtcaattcaagcaatcatgcaagaaacccctcaaagaaaactcacaagcacacatcaagtcatagagataataagcagcggaaataaccaatagaaggtctcatcatagattgcataaataagtttttaagatccaaaacacatcatcgagtacttagaagcaaagacctactaaaaccaaaaggacatgattaacaaacacagcttaaaaactcccccttaatcctaaactcccccacaacgagatctaaacacactaagaagattgagtatcttcaaagccttcttcgttatcaacatctagagagtttacaaatgaatcagagttctcaaggaccagttcataatctccccctgcttgaatgacacaattgatcaaaaactttatctagacactctaccaattaaaccagacactgagcacaggaccaagacaccataccttccatatgtgtcgttattgtcgtcagcaaggtagagacatatctataatctacaggtaaggatgtgccaaacacatactctggattaaacatctctcgcatacgccgggcatcgctgcgtgttctcccatcgctagtgtttcgacgtgagagctcaattttctgggttttctcacttgtttcattcgatagatccctttatgcaaaccatagaaactcaaaaccaaaaatcagtgctaaccggattttggtccggtcaaatctcataaaacacaataaccaccataaaacaaaaccgaacaacccaattagcttatagaattgaactaagtacctctgaaagtcaactcatttttctgaagccatcttgatatacacagaacaagtccccattagtatcagcacagtaataaccatctctccctcatactgaggtccagaactgtcccagaggtgattgtacaatactaagctcattgtaacttgattcaaaaaaaaaaaatcagaacataatctgctgacacaacacaaaagagaatgttgattctccaagagtagtcttcacaccttcatatctcagagtgttagcgagtccttttaataaggagtgtgacagactgtgcagcaacattcaggctattgataaattacaagtctgatcttttgtattcagaacttattgttgcttcttactgcttctttctgcagagagacgagatgtcagtgagagaacttgtttttgcaccccccccttttttttttttttttctttttttttttcttgtcttgttacagagtgtagtgatgctctttcttacttgttctctcaatatttttgtttgacatcccttctctccaaagtgtaggtgaacaagatttctcctttgttctcatcgggttagtgacaagatttctcctttgtccaccgtgtcttagataagctcatgcttcatcttatgaaatgaaatgcttcttttctgcccctttctgcatttcattccttcctaaatgctctacacactatgtctgtcacacactttactgactttgcatctccgaacaatgaagggtagctctttctcttggtgaactttttacagcagaagatttgaaaaccggttatgacactttgtaaaatagatatgaaaacttgcttctcactgtacaaccaaccctgtttcagcacaaacactcatcaagaagatagttagacttcaccaaatacccagggacttttgcaagttcacaaacatgttcaagtccaaaggcttagtgaaaatatcagcaagttgaatttcagtaggcacatgttatacggtaatttgtttttcttcaactaattctctaacaaaatgatgtcttatagctatgtgtttagtgattgagtgttgtactggattcttagatatggcaatagcactttcattatcacatttaacaagtaaaggtcagaaaatgacataccgtaatccaaacccatgtgtttcatccaaagaattttagtacagcagctgcagaggttggtagtgcgcataggagtttcaactggattgctggaacacatatcgaagcgtttcaccaggttctgagcataggtgctttgcgagatagcaatcccttcattaatctgattgatttgcaaccccagaaagtatttaagttcgcctaccatactcaacctgaactcagttgtcattgtcttcacaaacgctttgaccaacttgtcgaatgtgcctccaatcctcacataaacatgatttatcacataacatgctgtactgatagcctctgtccagaatttttcaggaactccatgtccatgaatcatggctctggccatctcttgaaaagtctcattctttctctcaacaacacctacaactctcttgtgttggactctaatctctttatcttgattgtaggcatcatacacaattttctctatgtgtttcagctcttgtactcctctaaccatttctttgctcactatttctgacatgctcctcgcattcatgtgaccaagacgttgatgccataccactggatcctccttttcagctctaagacactctttaggttcttcccacatgtagcaattgttcccagttctaactccagtgagagtgttttggttcttctcgtttgtagcccagcattttacactattgaaactcacagtcagcccttcatcacatagctgactcacactaatcagatttgcagtaagcccttcgacaaagtacacatttgtaagctgaggcttttctgctttagtcaaatcaaattttcccttgatttttcctttatccccacctccaaaagtaactttactttccttgacagaggtgtaattttcaagattggattgacttcctgtcatatgtctggatgctccactgtcaaaataccatggtttctttattccttctttaatcgaggtgtatgctacatgacaatagagatcctcccttctgacatacatcttggaggttcttccttgatatggatatagttttccttgtctcttcagcttattcaacctagcagcatacatgtagcaatatctctgaatatgaccatgtcttccacagtagtaacattcgtaacctgtcacagttctccgggaatgatagtgatcgtgattctggtacacgcgtcttgctggaacagcatcatagttgcttcgaaaacctgtttgactttttgttggagcagcagcttcgcttcgtacaaaattcgtctttgtacctgatccagcaccattgtatcctaaaccaaaatttgattttcccactcttccagcagcaagtatactatccaaatcttttgttccactgttcagcatgtggatcttcttgcgagtgtcactaagctcttgagaaagttctctgtttttctcttcagccacactgcatttttgaatcagcttagagttcttctgatttgcagcagttaactctcctttcagcttttctgttagttcttgaacttttagcttctcttccagccaggcaactttctctttactcagcatcaaccagctgtcatacagtttcctgaactcttcattgatgttaacgtccttttcgatgtcagaatcctcatcagctgagtcgtcctcatcctcaccatctgcttcactatctgaactttcatctttttcttcaatgattcctacaaaagacacgaaaccttttatataatcttccgagtctccatcatttgagtcactttcactttcagaactgcaggatttatcaggcttagactttgatccaacacagtcgaacttagtgtgtccaagaccattacactcagagcacttgagatcttttctctttaaggagggacattcagctttaatatgtccgtatccttgacattcatgacattgaatctcatccctttttgaatttcggtctcgatatctatcagttccctgatttcttccgaatcctttcttctcaactctcctcattgctcttctgaagtcttttgccatcatgctcattgtatccttcaattcttgtatctcattcttctttgtcgatgcagctaaagcaagtcctttggagtaacctccctttccggaagtgatttctaattcatatgcttggagcattcccactacttcttcaaaatcgaatgagtcagtatccaacgacgttcccatggccgttctcttactttcaaaccttgatgggagacacctcaacagtttcttgaccagtttcttatctttgtatttctttcctagattgtgtgcttcactcgctatggcactgattttcccactgaactcctcaatgttctctgtttcttccatactgagattttcaaactgagatgctaacatgtcgattctggatcttttgacactacttgtcccttcatatgctttagcaagtttatcccatgcttctttagctgattcacagttttgaatccgcttgaattgattttgattcacggagttgaatatcaaagacagtgcccttgaattagttgggcctttgcctcttctgcatcattccattgatcttcagtttttagcacatcttctccatcttctcccttgatgaccggagccttccatccaatgttcgtagcaatccaagcttcctttcctagaccacgtatgagagctctcatcttcactttccagtgtccgtaatttcctttctccaacatgattgctttaccgaccgcaacgaactctttggggtagtccatcctctccgcaggatttgcacctgttgttaagtacaacttggttcagatgcccgctctgataccaaatgaaatttcggatgaaccaagaatcgtattccccaaactcagaaccactgagtatcactttattagaaatctgattaagaagtttacaactaccttaattggttttacacaagatctaaactactttagcttgtcacctgagatttccctaaacacacaagagcagatcacaagaacacactttttgatctctctagaattccaatcagactaaaccttagtctctaataatgaaaagtgttgcactagcttttcactcacaatcacagctagatctaacaagaaccttagcacctctatttataccatcgaggtcttttgtcttctaggttagccttcgagatattggatcactccaaatcttcgcgtgaatatctcctctccaaactgaactcatcctgttgtgatctccacgtcattcgttcatttggcggcatatccacgtcagcattaattacttgatcttaactttagtctgctgaaacagcttccggcttgttccagcaatcagcactccttctaatttgtcctgcaataaatgcgatgcttattttgttcattcaaaatgtgcattaaatccaaaggtgtgggatggtaaagatctggaaggcgtaccagaagaagatgatatgatagatgatggtgagccgttcgagaggatagctgaaggaataatactccatccttttcatagtcaccaactacaacttgagatcttcagagattacgacgaaaagaagtattgtcgagggtgtgcgcttccaatctacgaaggtcaattctattcatgcatggaattggaatgccactatatcctccataaaagctgtgcagaagctccacgtatgaaacggtatcccttatttccacatccacttacactaaaagttgccaccacacatgatagtggcagaggtcacttttgttgtagtgaatgtgggcgtgatggcaatggctttttctatgagtatcgtaaagagcaaaaaatattccggctagacttacggtgtgcctccattatggaaccgtatgaatatcaaggccaccaacatcccttattcctaccttggtacacagaggaaaagacaccatgtcaagtgtgcaaatacaaaagctacaactcaaagttaatttgcatggaatgcgattattctatatgtctccgttgtgctaccttcccatacaaggcaaggtataagcatgacagtcattttctcacaatctgtgatgggaaagaggcaaatgatcaaccagactggtgtgaggtgtgcgaatgcaaaatagaagatgtaaagaagcctggatataataagaatatgcaaaatgtggaaaaacgattttataaatgcaatgactgctgcaccactcttcatattgattgtttatttgggggagacatgtacatgaagcccggtgaaacagaatatgactacctctcctttggcgtgtactcattcgaagatcgagattacaattggatagatgttagggctcttcttaacagttccctctcccgaccaatttgcgttcaatgcatgtgccgttgtccattcccaatatttttcaagttgaaaggtaacggcagaatatactgttctgtgtattgtcttgggtttgcacggttatgactgagcaagtgagcatccacctagtttattcctttcttttcttgttaatttggagtattttgagattctggatatgttgtttttcttaatttcagttgtgcgttgtaactttctatgttgttttttttgaaggaaaataaaaaaacaatgtttatgtgattttatattttcatttccttgaccctaactaataacaaataaatgaaaatcgttgtcagatggcttaactagctttgctaggaaacaaatattatgttttgaattctactaaattaaaagagtatagtattaaagttctttgttggagttttgataatttgccattcaaattcttgattggctctctccatctccttttgagttgtgtcccaggtccaacaacaacaagacacattgtcttcgtagatgtttcttttctcctgtaccgtgtagtgcgctgcaggattattaaacccatagtccatttttttcatctcctctgggtttaaaaatgaaatccagaaaacataaagaatcgtaaagacttcataatacgatttataccataaaccctagttaattccaatccattttcagataacaacatgcaaaagagatattagaaaaagctactaaaacatcaacaagatcatgaaactaccgtattattgcaggtttaaaactagaatacgagagaagaagaaaagcatagcacataattcgaaacaaatattctttcctaattacagagattatatctttattatttatacggcgtcgtttacttgcaaggatggtcaataaacatcaacgacagcgttttagttagtattattactcctcgtcgtttttgcgagaatggccttaaacgacagcatttaacttaataatacacggtgtcgtttagaagatcaaaataaaaattcgtcgtcgtcaagctctctgctcctaaattctcgattttttttttcttctaattctggagttttcttttccatatgtggcaaaatccgtgatcctcacgtttcaaaattacctaaaacccctaacaattctacaattcttcttctatgtcgattctatttagtaatctcgaagaatggttcgtggattgatgaaattcccaggaatctcaacgaagttattaaacataagcgttaattctctctgcaaatttcgaaacttggagagagcagaaacattactcatagacggaatcagattaggtgttcttcctgatgtgatcacttacaacactctaatcaaagggtacactcgtttcattggaatcgacgaagcttatgctgtaacacgtcgtatgagagaagctgggatcgaaccagatgttactacttacaattcattgatctcaggagctgctaaaaacttgatgttgaatcgtgtactccaactgttcgacgaaatgcttcactcaggtttgtctcctgatatgtggagttataatactttaatgtcttgttacttcaaattagggagacatggagaagcgtttaagattcttcatgaggatattcatttagctgggttggttcctgggattgatacttataacattctgcttgatgcgctttgtaaaagcggtcatacggataatgcgattgagttgtttaagcatctgaagagtcgggttaaacccgagcttatgacgtataatattctcatcaatggtctttgtaaatcgagaagggttggttctgtggattggatgatgagagagcttaagaaatcgggctatactccgaatgcggttacgtatacaacgatgcttaaaatgtattttaagactaagaggattgagaaaggtcttcagttgtttttgaagatgaagaaagaagggtatacgtttgacgggtttgcgaattgtgcggttgttagtgcgttgattaaaaccggaagagcagaggaggcgtatgagtgtatgcacgagcttgtgagaagtggtacaaggagtcaagacattgtttcgtacaatacattgttgaatttgtattttaaagatgggaacttggatgcagtagatgatctattggaggagattgagatgaaggggttgaaacctgatgactatactcatacgattatagtcaatggtttgttaaatataggcaatacgggaggagccgagaagcatttggcatgtatcggagagatggggatgcagccgagtgttgtcacttgtaactgtttgattgatgggttgtgcaaagcaggtcatgtagatcgtgcaatgaggttgtttgcgtcaatggaagttagagatgagttcacttacacttctgttgtgcataatctatgcaaagacggacggcttgtttgtgcttcgaagctgctcttgtcgtgttacaataaaggaatgaagattccgtcatcggctagacgagcagtgttgtccggcatacgggagacggtatcttaccaagcagcaaggaagacacatatcaaaatcaaagcagctattgagtgtaatacactaatgtacccttaagacattgaaaagtatctaatagaaaaattattgaattgtacatgagcataagggatgttttcatactaaattctagtcgagatttgacaactctcttaaccatttgaatatttgtaatattagccaaagtctcatcaaccatatcaatgactcgagttattaagcaacaagctcttcaatatagctaagtttttgataatttatcagttactttgtttaattttagtcatttgattagagttttggtcagagtcttttaagaattaagggaccaaagtaacttcagacaaaatgaccaaagacaccacttttgaaaccactggtcccaaaaacgaagccatgttactcatgtgctgcttctgaacacagttaaaaagctaatctttgaactatgaacctactctctagaactttttactatttgggtttctttgtttttaacagaaaacagtaaagttttttttttttttttgcagaggactaaaagataagactgagtctagtctctcgacgtggacaaatctgacaagaacagttactgctcttcgtcctctttgttgttattgtcgtctctctctctcggactttgtaaaatgttacactgacttctcttaatctctctacgtaagtacaaagatctattgcatgttagagatgatgttttcagaatttttttagagacatgaacacgtgtttgtttgttgatgcaacgaatcagattagagtagacacgttttctaggtttaaaaacattcacaggaatctttttaagttaaattcttgataagaaatagagacgagtttgtccaaaaaaaaaaaaaaagagagatagagacgttggaacttggaagcaaaaggtttttgttgcttgtcaaagagattaagagaatatagttttgaattaaccaacaaatagagtctgattaatattaagtgtgtatactttacttagcataacaaatgtgaattgtatttagcaattataaatactgagatcatccaaaaaccctagtggtggaaacaaatcgaaccgataaaacaactctaaccctaaaggtcgtcacaaagaaatcttatatgaaaagactcaaaataaaccaaaaggttaattaagagaataaaaggagtctacatactagataccttaaaactaatactattgtagtattgtttgattttcgcttgctattgtcaaattcgtgaaagttaacattttccctttttgggtattagagcaacggccattgttgagtggtaaacgaataaacaaatttagtaattgtagtctaattataggtcgttaatttggttttgtacactttatcacttgtagaattttgcatggagtgttttgtttctgttaccgaaaatatttgattgattttgtgtccggagctgttgtctaattcgtgaaagttaacgttttttgtttttgtttttgagagatctgacaatttgtatcagaaaaaaacaaaaaagtgcagatagttaaaaagtaatttaaataaatagagaaatttgttttaaatcacgggttgtgttttttaccttcatagcttcttctggtccttctaatgtgcaaacaaaactgactgatgaaatggagacagtccttttttaattataagcatacaattgcaattaataattactcacttttcccaatattataaaaaaaaatcttatggatatatatatattcaagaggaaaataaatagcaattgtgagattttgctttcttccagcactcatttgtctctttacgtgtatgttattgtccggtccccacggtccaacattgctaaatacctaaccggtttggtcccatttgtttttcttcttgagtcgaatatttggaatttggtctccatttagatgattgagttttcttcctttttttttttttatcgaataccatatcacatatatacgctttgtttttgcatttgcattataaaagtcttcaaacatttttcggtaaaatgccaacgcatgatctcaaacgtaaaaatgagattcaactatgcaaacaattgcgttaacatttctgtatagaagtctgagttttgcaacgaacaagaattacatatggttccttttgggggttgcaaagagttgtttttaggttgaaacttgaaaaatgtaaaaagattaaaggtttttagagtagtgaaaagggtaattaagtgaaaaagaaagaatggtccacgatttcgagaaaagaacaagaccttagactctctctgacccctctcacgtgccaccagcactccattgctcttcttccttctctaatccttttctcatctatgaatatatatacatatgcattttatatttatttatacactatgagttaatcaaaaaacaaattgtacgttatgattttaggtaaacgattacaatttatacagcttgtgtcatttatttttgccaactccttaaacatatatcaaagcatggtaaacgtagtcttttcttcgaagtcgataacttcatcggttaaacctggctgaactattaacctatatcgagtacatgtggtttatgtttccattttccaaattcttatataaaataaaatatatgatcaaaatagatgactcgagaaaaagaaaaaaaaaaacatatattgagaaatcatatgatctttgtatctcttcttatcataatttaggtttgtgataataagttagtcaagtgtacgaattgcaactgataatatgtggaaacatgaaaatgaatatatatgtgattatgcatgtttttagcaatagtcaagcttttacaagatttaataagaaaaagtatggcattcagcaaagtccataattaagttttcttcagaagtacccttccatgatagtaccgatcacaatcaaataatgtctcacatgtacacacactcagagcaccatagcttcaacgtttgtcaagaaaaaaatttccttttaatcattgccttttattttttcgaaaatgtcgttttcgcccgcaaatatttataacctttatatatttttttcgaaaacaataaattaaagatttggaatgttgctatataaatcaatgatacttagtaattcaataaggaataaacttcgtgaagagaaatgactctagaagctttatcatcaaacggtcttttaaactttttgctctctgaaactctttcaccaactccattcaagtctctcgtcgatctcgagccattgccggaaaatgatgtcatcatatcgaagaacacaatttcggagatatctaatcaagaaccgccaccacagcgacaaccaccagctacgaatcgagggaagaagcggcggaggaggaagcctagggtttgcaaaaacgaggaagaagctgagaatcaacgaatgactcacattgccgtcgaaagaaatcgaagaagacaaatgaatcaacatctctctgtcttgcgatctctcatgcctcaaccttttgctcacaaggtttaacttttatggatatatattctttttaatgtttgtaaagtttcaagtagggtttcaatttttatggataatttttttaaatggtttactatttcgatttgggtttcaattaatatttacaattcactgaaaaagattaaattttcatcttgagttttattttttatgaaagattcattctaacggtttaaatctatttgattttcaatatttatggccaattctaaaaaattgattttttattaaatatatatttgggtttttatttgtttacttatatgttgttttggtggatttatttgtttccccatgaaagggtgatcaagcttcaatagttggtggagccatagatttcatcaaagaacttgaacacaaattactatctcttgaagctcaaaaacatcataatgctaaattaaaccagtcggttacttcttcaacaagtcaagactcaaatggtgaacaagagaatcctcatcaaccatcttcactatctctatcgcagttctttcttcattcatacgatccgagccaagagaataggaacggctcaacaagctcggtgaaaacccctatggaagatcttgaggtgactctaatcgaaactcatgctaacatcagaatcttgtcgagaagaagaggtttccggtggagcacgttggccaccaccaaaccgccgcagctttcgaagctggtggcttctctacaatcgctgtccctctccattcttcaccttagtgtcacaacattggacaattatgctatttactccatcagcgctaaggtaataaaattaaaaccctatcatctgaaccggactaaaccggattagtttcaatgcaatttgtgcggtatttagatcaaacagattacaagataggacatttatgctatttactctatcagtaactgatgaaaaaaaaaaaaaaactctatcagtaactagggtgatacaaaccggagctaaaccggatttgttcaaatgcgacttgaggggtattttgggaatatatgttaggaatttaaagctagacggtcgattatgtgcggtccaagggacagagcatataaaaggaatgtctatgagctcttaactagatttggtccaacatttattaccatacttggtggagtcatttttcttatttttcacccatttcttgaaaacaggttcaattattgccacgtgggttataaaaattgtaacaatttgaagcttttttcaaattcacattatgctatttttgtaaaatcattttcttattggatgttgaaaggtggaagagagttgccagctaagttcagtagatgacattgcaggagcagttcaccacatgctaagtatcattgaagaggagcctttttgttgctcatcaatgtcagaattaccatttgacttctctttgaatcactcaaatgtcactcattctctctgagaaatctcttttttgttgttgttattccttcttttaattttatcacatagcacatctttagtttttttttttcagaatgaagaaacacataagctttcttttaaaatcctaggttctttttctgactttgtaaaggctaaatgtgaatttataatggcacataacatattagttgttttactcttaattttatgcattttctgatagtaattaagttataaattagtacacttgtgagtgtttgaattgttttatatatataactggattcttatatatacaaatcatcaaaaaatttagctaggctctcgatcttggatattagttagtagagagtatatactaaaaatctttttaagtgtgtttataaaatttcaagggctaaacagatgatattttatggagatagttgtcaatttaagaggctaagttgtaacatgcaaatggaaaaatctaaagaaatcaattacgtgttaatgtgtaatcgtattaaaatctttttgtgataaattaatttggatattctgttacagaagattttaagacatccgccatcattgcgagtgagattgttgtgttcggttgcttatgttgttatattaccatcaacatccacgacactattttatggacctttctccagtggcccatattaatagttttagatatgggctttatttgatatatccgtctagctttaggccaccaaggctggcaacagaggcgagagtacttcactttagtattcggacaaggtttatatttctccaaaattgtttgctatctttcgacttaatttgcactcatactcgataggatgataaatgctcatcattttggtacaatacacaatttttttggtacccgctgcttttttttcgttcaatgcttatcatattcgactttactcgtaaccgacgatctttgtacccataaagaagtggaaatcttgacttttcttcacgaaataaagattctcttcattatctcctttggactccatgcgaatttggtcaacatgttcacattttccacataactggttcgttctaagaagggtattgttgtttattataaagggaatagaaacaaatttattttgtttttagattgttagcatatatacaattaatgtctgtatataaaaagaaattaggatatgtatttgatttttgttttctgttctattaatatgtacctttatgtgaaaaatacttgcatttgttgagagaacacgaaaagatatacatagacccgcgtaatctctcccgtttaactaagattgtttagggctgggcacaaggcaagtacttgccgatttggaggtacttgtgacttgacttgccttgtcaaagtaattggatttttggcttgttatttgccttgttaaaacgagtacttggtctaccaagtatttgtctaaattttaattacttgcaagttacttgacccaccttgttacttgtcaaaattaaatacttttacttgaacctaaaatatttggaataaaaaaccctatttcatacataatatttaaggtcaatgagttttgttataataaattttaaaattttagcttttatagaccaaaccaaaattataaatttgttataataatttaagcattagtatgttagtaacaaatatacaatgttcaacaattaacaaggtaagtaatagaaaaaaaaaaaatccagacctaattattagttatcccacaagtcacatgtacaaataacgagtaacagagcaagtaaaaggacaagcatcaaaatgatgcaagtaacgaggcaagtaacgggataagtatcaaaacgaggtaagtaacgagtcaagtatcaaaaaaaattatgatacttgatacttggcttgctcttgcaagtaataaaataaaccgacttgttacttgacttgcctatgacaagtacttgaattttcaagacgagtacgaaccgagtagcgagtaattgccgagtagcgagtacttgtgcccagggctaagattgtttgtaataatgaggattactaaatatggtccttcgagatgggacaaaatatttgcatcggctcttccacactagagatgcatcacaactgcatatagaatcttctaacacaatggagttcacaaattgttgtggaagttaatgtctcccaagttcaatgaatctgtttgtttgtcttaattcaggagataacttgagcaaagagagacctccatgtggtattatccactgcacataaataaaaaggaatttcaaaataaggtttgtaaggatttttttttagaaaaaaaaacagattatgcggtaaatagacaatttctggtttaccattttaccttatgaatacattctagagaagatgcgccactgataccaataaatggattttatcattgtgaaattggatttgggtatcgcttattggtgccttttctagtctagtatctcgaccggtgaagacttattctctcacgtctcagtgtcctagaagaaaagatgcaagtaataaagagtttgtgtagttataaggtttccgagttcggatgacattttttgaatcaaaatctcgtgtatgtgattgagtattaaaaatagacatgtaagttcacgtagaagttctcgtgtataaccaagttcggaaaagtagacttatgtgagttcatgtagaagttccaatctaacataaacgcaaaggttttcaataacacatgagaacaaaaaaaaaaacaagagacgaatgttttgagcctttagaatgctagatcggttattgcttctggtaattctttttttttttttgttcacctacttcttgcaattcttactagagattttttctggttaattttcgaagattgttttttatgcgaattgttagtttttaagctttaaatttaatcattataagctgttcataattttctaaaagcataaatgttatcgaaatgttgaaaaataatgaaatttaactatctagatatcttcaaattaagaaatatgtgtgtaaattattattatattgtttaatttattaaatacttatcttttactcaccttaaatacagtaatgataagaagagcataagaaaactagacacttagcgtatttgtaaatttgtgtgtcatttactcatcttcccaaaattttcttatgattaactcattaaatcaacattatcttgtactcacatttggtaatcaaaattgaaaaccaatacactaattttaaaatatactttcaaaagtgtaataatatatagctttgattgttttctcttttaagatagataaagtcaatatacctaatttaagaaatgataaatccacctttttctcaaatagttacttctttttcatataagctttattcagtttcacacatgtaaatctgtctctctctctcaattattaccattaccctaaatcccatcaaaccaaaaacatatttataaaacattaatcacttttcacacatgtgaatctttttctttttctgtctctctttaagttcaattctatttctctctctatttcaaaccaaacagatttcaagaacacaaaaacagagttaaaactctcatctctcccaaaaaagatgcctttaagcaacaatgtaattggttgcataaacttcatcaccgtcctcctctccattccggtcatcggcgccggaatctggctagccataggaacagtaaactcatgcgtcaagcttcttcaatggccagtaataatcctcggagtcttaatcctcttagtgggtctcgctggtttcattggagggttttggagaatcacatggcttcttgttgtttacttaatcgccatgcttattctcattgtacttttgggttgccttgtcggatttatttacatggttaccataagaggctctggtcatccagaaccaagtagagcttatcttgagtatagtcttcaagatttctctggttggttacgtagaagagttcagagatcttataaatgggaaaggattcgtacttgtttgagtacaactaccatttgccctgaactaaatcagagatacactttggctcaagatttcttcaatgctcatcttgatcccattcaagtaagtatcctcttcccattttattcaaatacattttcaatttttctctgttgttttgttgcttgtaattgttaattagtttttgcattaagtttgttaattagtggaagaaaattagggtgtaaaatgaatatgagaaagtatggggtgaaaatttaatggctatgaaaagaaaaggggtggtaatgaaatgtagatagaattggtgctttgcttgttaggtttgtcgcttaaaagactcagaaatatattcttttgattagaaaaaaaagctgaaaattcagttgaagattattacatcgagttcaaatttagggtgtaaattgaatagataaaaagtacagggggaaatcgaatggccatgaaaagaacaggtggattggtaatgaaattataaattagaaatgattcttagcttattataggctttgtgggaaccaaaaactggaaaagtttaaccttttaataaaataatataaaacgtcccaactttctagattcttccactatgtgcacttaatcagtcacgccgaactacttttttggccccaatattttatattatttaaatttaaccccatttctttactttcagtctggttgctgcaagcccccaacaaaatgtggattcacatttgttaatcctacttattggataagtcccatagatatgtctgctgatatggattgtctaaattggagcaatgaccaaaacactttgtgttacacttgtgattcttgtaaagccggcttgctcgcaaatattaaggtagattggttaaaagcggatatctttctactcttggcgcttatcggattgattatcgtctacattatcgggtgctgcgcattccgtaatgcggaaactgaggatattttcaggaagtacaagcagggttatacttgatcaagatgagaagtttagtggcaaaactgcgaggaattttaatatttactggattcctgtattttagtttctctacgttttggcccctgtagtatgtttttgtgtgaactacctgaacattcgttgtaactggaagattatgttgtatatctatctttgatttgggtttgtgaaacttaactaattatctatttttgtcatataatctaatcaaaaacaaaatttagaacaaggaaatagtcataaaaacaccataaaccactcactgtctagtctcattgcatcacaccaaaactttacaagaagatattgtatatatatatatacacttactagttgtttgactaatccatagcactacgtaacacaagcttcttcttctttttcttgatcacaatctcaactaaatggagctcggtgaggaattcccttccttagtcgctttcgcagagaacgaggaggaaattgaggtgtaggtggactgagactctgcagatttgaattaccattctctgctccagaactgttattctccactccagaactgttgtttgaattatctgagtcattcgttgtatgcttcactctcttctggaagactccagatgttcctgcaaccttttgattcaatcaccacaaaaacacagataagaagtttatcagaagaaagactctttccaatattttagcaagtcaaaagcttcaaacttttctactgtaattaactagaagtaaccacaaaacaagggaggtaatggatgcttaacgtgtgaagataattggagtgtaagtaggtaaatgtaccttgcagccaatagagcagaagcggaagcagttttcggcaaggccacgataacagaccatgcaggcattagtaaaacctttaccaggcttagactgaggcctctcattcaagaacaaaacctttgagctattgatcacatatgtctgaatgcttgatatgtctaagtatttctgtatctcatcgacctttgtcacattatgataagatgatatccttatctgcagcaaaccaacaacttcttaacattcaaaacctgaattaaacaatacgagaactttggattcagagatgaaacacacctgaatggtacgatgattctcgtgttcagaaagacagagagaacaaaacgagtcattggtacagtctaagcaatacattttgcattcggttctaggtaagtgtccatgaaacttgcattgagcaaaaaagtgttggtttagtaaaggtttgagccatataggccactgattctctccttcctgcaaacacaacataactcatgagccattgtcccaaaagaactcaaaaaacaaaaaaaaaaacagttggctttttaacctaccagagacaccattgtcttatacattatcaaaaaagtctcctcctttacatagacttgaggagactctaatggtttattttataatcttgcaaccaaagataataatgaatccacaaattcgtcttgcagaatatattctgttttttataaatttttataaaaacagaagcaaatttgaagggcgataagtacggaatcgaatattaagccgtgaatctagttcgataaagatcctaattttttatcacaagattcttcttcttcttcaacattttcccccaatttaaaaccctaatctaacaactacattattcaagcattgttctttgtgacattagaaaattaagtattgttctttacaccaaaacagagcattttcaataagtactcgaatttgaccatctgacaacaaaaattagggaaaatccacaaaactctcttgtttctagtggaaaatctcaattcaatcaaaacccatatcttagaatcgaaaaataaggagtagaagattcgtatgaacacaaagggcatacaatgtaaacagaggatataacaatgagaaaacagagtttcaacaatgtgataatgtagaaaagggtttatggttagacttaccatgaatcttctgttcttaggtttgatttctcgatttgggttctcgtaatcttcaatcgccatttcaaaatgcagtaaaagacccaaccttttttgagtcagcaccaaaacttttttacctaaaaaggagggttttagagagataaagggtttaagaaagtgaaagagagagagattggttttcttgcagagaaagagttttagagagaagaagacgaagcgaaaagcaatgagaaagagtcctacttatcctaccaatgtcgacaatgtataatatttccgaacctaatcccgaaccagccccgagcctaagaagaagcgttgggttcaaggaaccctcttggaattttctaattttatttgattatttccttttttttggtattttaaaaatatctttctgtccttctttggtcttatctctctctctttcactattatttttccaccaaaaatattaatcaatttcgtcaaattttattccttttttggtttttcttttcacaaaaagtatgtattataaactattatatagtcatcacattaattggttgtgagagacttataactatttccattttccattgctgaaaagttctgatattttaatatatttttaaaaaagtatatttattgtgtttagaaagttattgctccattattgcaatttgatatctcatatctaccatttgatttagtgttaaaatcaaaatttgacaaaaggtcttcaatttacaaaaactagattttagcattttattaaaaatatatatttttatcattcgccatatcaataaattctcgtaaaatcaaaacactatgtctcatgcataaacttagtcggttcagtttatttagatcggtgtaatcaattttttggtttattcgggttaaaaatttgtcaccgaaatagaaaatagttgaaattggttaaaaaaaaaacaaaaactatcggtacagaaaatatatgaatttggtttgcagcagaaatatgagaaaacatagcaaaaaagatttacaaggccaaatactctacaaactggtctgttttaattgctacagtctcgggtcagtggcaagatcgaatggagagtttcattgctcgttatgttttccatgctacgatgtatatgatatggcgaaaaagaccaagagtaaaaaccaagagtttttcagtgtggaagaagatattgctatttatcaatttgctgtttcttactttgcactaccttgtttctatttttaggtattgttctatcggttgtaatgaatcttttgctggagaaaaaaattctttagtgggaagagaaacaaatcattctgacaatggcgcaaaatagtattgaccaatatacgcttcttacttcagctgaattagtatttttgaaccaaaaaaatatatgctgaattaatatcatcaaccttcacgttttgatttgatctttcttttccgtatttttatttagttattttattttgaaaatcaacagctaattatgtaaaagagcgtatactatattactagatagtttttccgcactatgtacaagataaaatgattattaaataaatgtattatagtaaattagaacatttatggattattatttaaaatctgaagtttatttgtgtataatgtaatgtaatatacctttttattttatctgaaccaacaattttttacatagaaataattgttaccatacattgattattattaatatctttgttaacatatatttttatgtttatataaaaaaatgaaggtagttatatattaagttctgaaatattagttgcttaattattaggttgttttagttagagtttagtttttaattatttactaattttaattagaaattgttttttatttttatgttgttgagatatttatatctaataataatgaaaaattttgtaagtaaattaagaaataatggataatgaatcaagtttgttaagaattgctctaattgcgatacgtcaatatgacatctgcgtacataccaagatagctaaaagttaatttcttaagtgcatttctctattaatatataggggatattattatttgattatatcttttgatcaaaacgttattatatttcctcaccaaaaaaaaaacgttattataatttcttaacaaaaaaaaaataagaagcgtattaattcagcaatattatattttttatttagttattacacgttattatattgttagttgtaacatttttctcttaatgatatccaatctgactataacaaaattaattatccggtaacctaacctctcacacaaatgtgacagtgatgcaaagctatctttgtataagttaattcctattacatcatttatgcttttatacacaaaaatgcgtatttaatgacttttgttatatgcttactcataagtatgagttggaaagaatgtgatgcaaacaacggaccgatgttgtatccttgtatgcatagtacgttgagctagagctacaaagagagataagcttcttaattgggagaatttaacctaatacatttatgttttgctcactaatttaatcaaatcaggaggagattactgcacaaatctaggtttaaagatgagtgattacgcaatacccttttgtgtttagtgtttgatttttgttgatgtttctatttaaattcattaattaggaaagctaagttgcgaagtcaatactaactattcctatcatgcatcacctgaaagggaagttgtgtttaaactaataccttcattgatgtaatacaattttaataactaattttgtatgttgcaatcaaattttgtaggtggcaatttaatattcttgctaaagaaactaattttctaggttgcaaccaaaacaaaccaacctgaaaacattgattaggaaaatagctaaagttatgttctgtttcattttcatttttgctaaactaattaaaaaagagagaaataaggaaaaacaaaatcaagtttatgaaaacgtttggttaatatgaattatggataacaataaattataaaataaatgatatacttaaaaacaagaaggtaaaaaatatgaatttaagattgtattttaattttcatggtttttgtatcctatgttaaaagctaacaaaactattatcgagcataataacaaaatataatggataaatggactggctttggcttatagaaaaaaatctagataccgtacataggatatacaatattgaaataaaagtgaagcaatgagacacggcacgccatatctgacccagaaatatccatcctttcccacacacttttgtattattttgttttattaccttatggaaccaatccaaattattgcctccgcaacttttaattttaatactttttataaccatacaatgaaccgaagaaatggacttagtgtaacataaattcagcatcaaatcaatgtaattttctacttcaatcagttaatgaagattttttttgctaaatttagtgaaactataatatgtgaagcaaaccaaccggtccagtgaaccggcattgtgtattgttgttgctatttccggctttcaatgttatgaccgttgacttactattactgtttttggggtcagtgttgacttacaccattcacatttctcacgtcttgtgtacggatcacatctttttttgcacggcatgtttttttttctgcgcaaagataatttaaaacacacgagaggagagtgtgtaaatggtagggttttaatttcatgcgttcaaagcggtccaaaattcacctaaacgtttctttgtcgtgtttcaaaaaagtgtggaaatgcaacaccactattctttggttcggctaaaatgcctctacattttaaaagattttttttgtgtgcatatgggcattgggcatagctgggtaaaaaaatgtagtaagaattttatggatattataacgttgaatcaactaaatattttacttttttatcgattatttattagttgaagaaaatatatatatatatatatatatacttttttggctgaacgaaaaattgttgtcattagaaattttaaacatcaacaaacacatttgtgatccatgcgaaaatgctactactgttaaacagatgatcaataatatctgtttctttcttcaaccactatatgattataaaatatctaaaactccaagcaaatttggccgacctcttcactatttctgataaacaaaaaaagaccacaaaagtaatctgaactcattggtgaagtagtgtgtcacaccatgctttaattaaagccccacacttatcaaacagatattattaagttttactagaaaacaaattacaaaaagtgtttaagacaatgagatcagatcattactaatctgaataactagcatcgggtttttgtttacatatatttttgttcatactttacttttgtatttgtcttatagctaatataataacatatcttccctaaattctttgacaaaaaataatctgttcgataaattaattgtttctcgtaaagacaatttgttggggaacccaaaaaaaaaaagagaagattatgaaactcgccaatatcacactgagtggagttagtctggctcatgtggaacaaaactatctgggccaattcttaggcccataatagagaatcaaaggaaataatttagatgtaattaggcctattcttaggcccataatagagcatgcataagttacttgctcaatttcaccaaatcaacgcaggaactcatcgccatgggaggatcaaacaagaacctcatattcgtgtacggaacgttaaaaagaaaccatcgaaaccatttcctcctagaagatctgatctcaacaaacgacgccgtttacataggacaacgcacgacccggttacaatacccgctcgttacaggtctctatgggatcccttacttaatcaacaaatccgggtcgggtcaaaagatccgaggcgagctttattcggtttcaaaacgtgggcttgtacgtcttgatgaattggaaggtatcaaagttaatcactacgagagattaccaatagaagttattgaggaagatgatgaagaagaagaatcaaacggtgtcgtcttggctgaggcttattttgctcactttggatttggtgagagattgtgggagaagaaaggtaaatgtgggatgtgtgaatttggtgaaaacgatggcgttttgtatgttcgtcctaaagataggccaatgtttagctctgttcttgatgaaattgaaacttttgtgtcttctagtaatgattgattactaatttaattcaatgggtatgttcaaaattccatctttgatgattatggcctataatcttcttggtcatgctcaagtttagtagtcatttagtgaacattttgaattcagttgcagagttataagttttcaataatgctcaaagttataatcattgattgaattcaaataagattcatacatcatgtttcttagattgtaatgacgaaagttgtaccaatttttaagttttcaggtgttaaaaaatgttatttccactacgttttcatattttcacgttttaatacaacgagagtttaaactttttacgtgattatattacgaagactttattcaggtggtaagtgtttggactatttacatgttatatctgtgtttacaaagagtcacgggctgttataatttgatgattgatgctgagtggtgcagtaacatattactgtatatgaagtggtggtaggagaagtaggcaaaggagattcttttgcggctctataatgcctaaccctactacgcactttgtttttttctttcttttgatggtgtcatgtgtgagagaaaccaaatttctactagtggacttttttgttgttgttgttgtcagactatgtgatctccattgtcagtgagggaccaaaagctttgtcctagaattattgcaatttcgttaagactcttatgtacaaacctgatgctatgtcccaaatccccaattaaagatttgatttagcaacttcaggagtcggaaatgagctaaagatcgttgtagatatggtcgtgtacttactagtccccggccgatcttaacaaaactgtgatcgatgttttaaaaatgttagggttaagctcggttcgtttatgtctatgcctattatggactatacggattagagtaaaccatcaaacatatcacattcttgacattttgtaaattaacacacggttcattcacgagtaacaagtttgtgacaaaactttaaatttaatccaacattttatgactaggataattgatataaccgcgatgtttgaaactgttgctctatgaaatttaaactattctcttatggattgaacttgcacattgtacttgatgattcaaaggaacacagtttcttgatgatcaacttaataggacattgtgtgggatctatgatccgattgacaaaacttaagtgattgagtttttttggggacgcgtggaagacaagtgaaagaaggagagcactatggtactagtactggtcctactgcttcttcttcacgccattcttcaacagcaacggtgtgtgtgctttatttcatgtgatatcccactttgtgttttgtgtataaaactgtacatatagccatttatatgtatgtgtttggacatattgtatcatcattaccttcatctatttctctcactcaatggaacaaattgtattttgctggaaccaattatgggtaaattgggtgcttatcctttttgacaatgccaatagcttgagctcttcatttgtcaatgggtttacacacttttctccaatgaattatttgtgaaattcatagacattaaacttaaaccccatgaggatagtgaagcgaatcgaaacttgtgtttagtctagtgacataatatagtactatatattttcattggattaaccgaaagattcttatcgaacatatgagattttttttatatgtcaacagcttttaatagattagctcaaatgccaactttagggaatattattagctcaaatgatataatatagttcggtaagaatattttgtgtcaaattatccactttaacatttgtactacggtgaaccaaagataaaaaaaagaagttgaattcttccttatcgatctgtatttcttttaggtatgtaaaaaagattcggttgaacatttgatcattgatttaaagtcaatttcctaaaaaatgtggatagcattttagaatattgtttagaaatatgcataatgtatatacttattgacttatttttgtatatattattttatttcagtgtattctctacggcataataagtagagaagtggtcgttggctggacagcaccaatgacttgaaatcttgattggtcttcttagtggcaatgctacgacgcaagacacccattattaagtgtttttatttgttactagctagtagtttcttaccaaaatctttattattttctatacaaatgtttttgtaccaaagtttcgagcattaaaataatcatgacttctagaagtaagctctcattagaaaatggtattacacgcaaattaggttcttcttaatgcatgcatttttgttggattcatataaggcttcttatatttttgataaagatttatatatatttctgcagttttctatacgtgaattactgtatttagctaatcaaaatagtattagctatatagggttttatacttttattttattttattaactagcctatttggtattgaatctcgacacaataatttatttaaaagcagtttcgctaaattactgaaagttccaaataattttgattagtcatgcatatgtcataagcaaattttattcatgtaaatcaaaataagagcttagctgtatagcaatgcaagacataggctaaaataataaagaacatatcatttggttttggatactatatagggttgtttgaagatttggtgaggaattactcaacaccgtaattcaagagattgtgacttgttatttataaccttaattttaaaatatagctatataagctattttggattaaaacgcttaattcggtgtattatttgcgtaattgattgagtaatttagtttaaacatgtatgttgattttttttttttgtgtgtcaaaattcacttttcatgtaaaagctagtaagagttttagttatataacaatgcaaagcatgagtaggtgaaagtaaaagaatatacaaaagatggtttggtttggaaataaatgggttgttaattagaagctaagctgagtaagctaagtcaaaagaaatactcaaacactatatacttctcgatattatgacttgttaatgatattctaactactttttaatccatttttaataacccaaacagtgaatatgtcaatggcattctatcttcatatacttataatgctaaaaaccaaactaattgttgttagttaaagtatataatggttaccaaaagtgtaaaagtactctagaagtatggttcatactaaagcgttctagaggaattgcttcgatgtgcattcgctcaagatccgtaatagaactaaccaaatttatgtctagtactgtatttcagggaccaaatctatttttgttaaagatatttagagtaatttacaccagtggcaacagagaacatgttattaaaggaaatagcaatgacattttcttgaacgtttctctcattcatatagttgttatagggaatacgatttttttttctacaacatttgtttttgtgtagacgtttattttattagatggaggttagtttaaggcttagttctattaggacatcacttgataaacacagtagacgtctacataacataagatatcaacatcaggacgcccacatatccatgaatccatgtgtcaagcgtatcttctatgaaccacgttgcggtctattacaactttatatgcgatatggtccattccggaacaaactatgtcactcacatcatgtacgtagataacctagccgaaaatctaacaaaaaaaatctagccaagtccggattcattcctctagttcaagattggactcgcttccgagttccgaccacacatcttgagagagagtatatatgtgtagctctttgtatgtatcctctttctcattcaattgaatttatatatacacaagagataaactctttacaataagtcacattattgttttttcttagtttcatccttaaatattcaccctctacataattcatccaaatatgtgcatagaaatatatgtctagagtataaattttaaatattaaacaaggccataatatttgtgagccggccttgtttttgacgattgagattgacgtttgagctagtcattggagattgctatattacaactaagaatttgagaaaaaaagtcgaaaaactaagaaattgaaaccaaattacattaggagtaatggtagggacagtaaatctacacttttggtcggcagcatgtgactcttttatacagtggccgctgctcaacataccaaaccccaattactataaatacctcactgagtctttccatttttattcatcaagtacttaaacacaatggtttctctcaaagctttctcaactgtgttttttcttatactcggcgttagcatttgctacgccactagccgcaatcttttgaactacggccaagcttctggcggtggaggacatggtggtggtggaggttctggaggagtgagtagtggaggttatggaggagagagtggtggtggttatgggggcggtagtggagaaggagctggtggaggatatggaggtgctgaagggtatgctagtggtggcggtagtggtcacggtggaggtggtggtggagctgcttcctccggtggttatgctagtggagcaggagaaggaggaggtggtggttatggtggagctgctggtggtcatgctggtggtggaggtggtggtagtggaggcggtggaggatcagcttacggtgctggaggagagcatgctagtggttatggaaacggagctggtgaaggtggtggcgccggtgcaagtgggtatggagggggagcttatggaggcggcggtggtcatggaggaggaggtggtggaggatcagcaggaggggctcacggcggtagtggttatggaggcggtgaaggaggaggagctggtggtggagggtctcatggtggtgccggaggctatggaggtggtggcggtggaggaagtggaggaggaggagcttacggcggaggaggagcacatggaggtggctatggaagtggtggtggtgaaggaggtggctatggaggaggtgcagcaggaggatatggtggtggcggtggaggaggagaaggaggaggcggtagttacggtggtgaacatggaggtggttcaggcggaggtcacggtggtggtggtggtcacggcggtggaggctatgccccatgaggaaaccaacttaagatcagccaaaagaaaggctgaaaaataaaagataatctgtggaggggtatacaaattaaaatgcctactatttcaaaacattttgtatccattattattgaacgttgtattgtattttcctaataattgaatattttattgtcttatcattatatcatcgaaagcataatctcttgcgaggaggtgttcaactttgtgtctatagatggctaaagcagggttttcgagtgtccgagtgtttgatcagttagttgtgattggtgtatccctttgtcgaagttcaaggattcttccttgtgccttagtcattccaccagctattgtaatatttcaaagtgtatcacttcaaatgacaaaagaaaaataatcatatataacctaaagaattgttggttggagtctcaaaacaaaattgatcagagtttgtattcacaagaaaaccccaaacacaaaaactaaaggacaacttttcattttctaatagctaactcttcaaagtttaatagatcttctcatgttagagcttttctttttcttggtcggagaatcactcaaagcattagcgagctttcgagcgcgaggtgtctgggccctgttgagatatgaaagagcatgatttttgtacttaggatctggagcagaagcagcaacattgcttctaaacaacggccgctttgttttacgagattcttcttgcttcttagtttgcaaatgcgcacgttgaatctgaaaggttcctgttacagaatcacacacactcagactaaggatctttcgtattttcaccacttaaatacataaaactcttccacagttttactataattaagattaaatctatcaaaacccatggtaccttggcgtttctgatgggaatttggtttttgatacttgagcttaggtccaccgagcgtagctctctcaccagctgtacatagagttacaaatacactgtataagagctttgttgacagatcaatactatctagtttgttctaggttctagttcagattgatacttcttgcaacagatgatttacggattactaaaggacaatactttatctgaatctatcagaatctcatatctttcttagtattctccaaggtaagctatcaaaaatacttagtaagagatagtacctttgcgttttggagatatgtcttgattctgaaccttgagcagaggggcatcgatgctagctctgtcagcaaatggcttaggttctttcggttgagaggtctcagcaaatggcttctcagatttatcgatgtaagctttgttttcagttggacatgactcaggctctgtctgttgggaggtttcagcaaatggtttctcagattgaggtgacccgagagcatcaatcatggccgaagaatcttcattgttgctagactcggctgaatggaacacttcctcttttggctcttgacagcaagaatctggccattttacatcagggatcgatactcccactgagtcgttgcaggctttactggaattatcaacactctcgtaactgttatcaagcacagatactggtgaaaaatgtaacggagtagcttcaaacactgtcttcaactgttcaaaagtactggaaaaccaaggagttccttctcttgcataaaacaatatataagcaggacgggatagaactctctcttcgctgattctcgtgacctgccatagtttcgaaaaaaaaacattaagaaagttaaatttattgaaatcagagaggactaagccacacaaatgatatgaaagcactatataataatattaccttggagtcatcaaaattatgccatgtctcaggagctgatctcacataagaggaataatgaccaaaggttgctctaatcccaatatgctccacaaaggcataaagatgatatcttgtggaaacctgaatatacaaaattgggtgttaagactcaaaaatctcaagttttacaaaacaaaaaagtctgaaattttgacatacctcaggatcatggttactgctcatgaaaggggacaaatccaactccaaagggaactcaatatgatcgaagatcttctccatagtaactccatcattagtaaacctcttaagatggaatgtagcaaccggcggcaacttatcgaacctaagttgcttctcctttgtgactttctccttacagttatcacatgttaactggtcctcaagtttttcgacacatgtaaaggattctagagctttccagagggtattaacatcttctatttccagactccatccaagagaaggttcaaacgtgttggaaacagaattacaattgcaacaacaaagctgaaaaaggaatagatcaaacatatttccaagagtcattatgcataaatggaaactgcttcaacactagattaatagtacggtaatgaattaacgatatcttaccgtactcatgagaccgccaccaaagacattgtcaacaatgttcaaatcttgagatgagacagagccaagctgattcttaggatctaaacaacatctctctaacttatccagaaatgattgtagaaactcgtgtgcatcttcttggtggtttatcataaaatcagatgaaaaatctgtgattggttaaggataaccaattcatataaagaaacctccaacacaaaattatgcacatatataaacaaaaaacacttaaaaaaggatacaagtcaagttatcacgaaatctatcaatgtttattccatatcctgaagacctcagagcaagctcaatatgatctcgaagagcttgcattacacagaacttctcatttccacctgaaaacccaaagaaactataagattaaaaccatgaacgaaacaagtcaccaaactcaaatcaaaccaaataagcaaatcttacagttgcaagggtttccatacatgaatgaacgaagactatcgataagaggcacagtatgagtgaagcactgtaacacagaagctatgaaacaagtgttgcctgaattatatagcccagccccctgaagaaattgtataaaacatccaaaatgattcaatttcggataccaaaacaaaatcagataaaaagggaagaagagaaacttacaacaccggtgggttcaatcctcggataccaccatgataactgtagaggttttgttggttccatcttattaagctcgtcgtcatcgctttcatactcgatgtatctccttggtggacgataaagatacgaatctgacgtgttcgtgatccggagatgattgttgttgctaacaggcgaaatctgagctggtggcgcaattagggttttatctgacggagaagaggaagactcatctgggttcacatctctgttttcctctggattgaaatttagggttttgtccggcggagaagaggaagacccgtctggttttgccggagaaagggcttgaatctgacgaatcggtgaggaaagagagagcgagttagtaacaaggtctcgaattggcgcggttggtgaagactcatctagggtttggttgggtttagttaatttatgagaagaagagagattagatggtggtgggtcactaaattccgccattaacaacaaaaccgagaacggattttgtgaagaattgaaggaaaggggaagaagtggaagctagggtttagttttgggagaattctgcatctcgtaaatcgatctgtaagtaattgaagaagataaatttgagtttcgctccaaaaaagttgggaaattttcgaaatctgagagcgaatcgaaacgatttggagggaagatgagaattggagtggagaagaaggtttgaattgggagggaaaatcaagccgccatttatttggggatttagggtttcttttgaccttttccacagataaaataagcgtaattaaacgttgattaggttatttggttaactcaaccatggttcgcacttggttttggaagtttggattctcagagactctttgaccaattatattttttatctttaaacaagtttaattgacaaaaccagaactgtcgaaaaaaaaaaaaaatgacaaaaccagattttatttttttgggttaaatagttgaaggaggaaggagaacaatagggaaaaacgcaagttgattgttaatttgtttatcaatttattgaaatttaatattgcttttatttgtgttatatactttacaaaataaaaatatatacagttacttttatcatttttttcctaaaatctagatttatttactttttccaaaaaaaaatattgtaaaaatatttctagttactgtatgccacatcaatttttttgtcagtttgtttctaaaagctaaattaaatcatttctttaacaaataatggaaatactaacatttctatattattatcttctttatattgttgaccaatttaaagttttcattagcctaagttgatcttacgttttctttatattgtttgcccaaatatagctttcctatatctttttcaatatagttttccaagtttaacggtttactatattgttgaccaaatttctttcaagttaaaaaaattatatattttactttcttgtaaaatcacctttttagtcttataaattaaatttattcagtaataaatataacttttaatataaaatcctcataatcaaaatttaattatattataataaaaatggaactattttaatagaaatgccgatatggtcaaagaaaatccatctgctcacttttctcctttttcaatattagttcttttcaacaaaagttttgattggtaataagttcttcctcttatgctgagttctttttttttttttttttttttgcaaccatatcaagggaataaattgatgttcaataccatacataatactgtaacatattctaccatatccacatcaaattatcaaattccacatttaacaatttacctcaaaaatcactctttcaactacaaagtcaaaccaaaaataaaaatgacatttatatccaacaatttgttctctgtaaatcaaaagacaagatcctttgtatgtttcttacagcattctatcctgaagatcactgaatatactagaggcaaatgttcccagcttattctttgtttcctcagctaagttagcaatagatgacatatcttgctgcgcctgtgcccaataataaacaaagtcaaataaaaaaaccttataagcagagttaagaaaagctgaagaatttgattctacttcagaactttacctggaaagaaattcggttgatgagatcgcttgcagtgatatcgatgttggaatcatctggtccgtggccaaaaagatcagaacttgaaatagctgctgaaccctgatagatttgtaatcgcattaggcatgtatgaacaacgagactaaagaaaactagtatagagtttgatcggttaaggacataccgagaacttctgaagggtagcttttgagtcaagatcggcatctctgttctgatttccgaaaaattgggcagaggaaatcgatttggcgtttgaaaacttctttcttgcttcatctgtttcttcaacctaagtaaaaagaaaacaggtaaacaaagaggaatcgagaattgatttctatctctttcttcagttctgttaaaaatgaaacttttctttacctgagctttggatgagcttgagcttgacttcttggggaaagcactgtccattccaaattcattaaagaaatttgatgactttggtggagcaacatggctaagcacccgtgtgccactttgcccaccagattgctcatcatcaaagtactcaaatcgagaggcaaatgatgatccagctgctgatgtgtcattggttggagaagcagcaggaatcacaggtacaggttcttcaggcttctgctcatagaggttatcctttgactacatatacaacaaatactaatctaatcaaaaccaagaaccgagaagctaagctataattctttataaaaacgaaaaacgttaccttagtagtaagcttacgagcaccaagaccaccagtcttcccagactttcgcgaaacaagaggtttcttaaacgtactagcaacaactttctgagaagcttttggtgaagagacaacagctgcttcttgcttcaaagaactctctttcggagattcagaagtaaacccattttcagatgattccactggctgagaagtagcaacagaggataacgacggtaaaacagtttcttcagccatggctttagcaacttctttagcaagagtctgtctatacatatcagcagctcttgaagtatacttagcctcaatcttaccaccatcattccatccatgttgcttaaaaaacacctgagctcgattgttccctccaaacatcattgttcttagctgctcaggactccacgagtctaagttcgttgacctgcacaaaaacaatatgatcttataatagatctacaacaacatgaaatgctataaatagagtggtcaacaggaaaaaataagtcaacatcttcctaatcacagcttaaaccctagccagaaggtgaaacattgctacaagtccatgaagctaaaaattaagcctaaagagttcaaatttgtgttcctcaagattcaaagttttacctgacgaagctgatatgaacacctagacttcgatgaacagcagaacaatcgatgcataggaagatcccataaggaacagaagcccatgttggattcttcgcactacaatcaaagcaaacctaaaaaccgaagcaaaatcataaatcaattcggaagatttaggtcgtataagctccagatctgaacgaaattcaaaatcgaaaattgagtaaccctaaccttgttctcggattttgatttcagctttctgaaaacaacattcttatcggtgagattctcagtcgccatcgttgaagagtttagagatgtttccccagaatctggaaatctgaaagtggcgattatggatcgactcttcttcttcaaagcagaaatttttgtttttgtttttctgttatcttatttgtttacgttttttgattagaggatcaatactaaactcgatgggcttgtatggcccaataatgaataagcccatatttgtatttcgtaatttcgtagatgtcattatttttatatgaaagtcacacaattctaaatcaaatgtaaactctaaccatagtctaaatcctgtaaaaaacttctaattctttaatcacaaaacttaaccataaaacagaaaatgaaaaaggataaaacctcatcgctaaattttatcatgattttctccatcttgttattagcgcaaagaggatcgcttgaaagatgaagacagaattgtgaaaaattgaaaaccaaaataattgttaaatccaaaaaatcgacttgttatggaagtacattaaggtattaaattaggttatcttcactaattcctctcgaaccttttactttctttcttttttgataaagtaaaactttttacttgatacaatgtttctgtgacatgtaacatgtttatcaatgtcttgtaagaaaactggcaagaagtagagatattttattatgtaatgtcaataatcatatgttagtgtacgattagtgggtctaaagtcgttttgtaattacatcatccacgagaatcacgtgagctggatcattttagccatcgtgattaaccattgaatattattgtacatgttgtccttttcactgactacttttcttcttctttctttttttttctggatattttgtttataagtaatggttggcattatcatgtgtagttctttgtcaataatcatgtgtaactttgacaaaaaaatcatatgtaacgttttaaaaaattatatactttggttggtcattatagttttagccaaacgataaaaaatttgatgaaaaaaatgtggttaaagaaaacttacagtataccgtgacaaaaatatgaagattgttaataaatagatatgtcaattatggtgacagaaacatggaaagcagacagacgatgcctagacagaggacccaaacaattaaagtgggctacacaacataattccaatatttaaaaaaagaaaaaaacaatttaaaatgtctaagaaaaaataaattcgaatatgaattttatagagaaaatacaaattttatacgttaatttcttcctctttcaaaaattgaacggaagttgctatgttgttggatacattattatttgaatatatattacaaataatttttaggactagcaaatcattttttgagttttctttttatggttttcgtagtcaactccacaaccgatagttttacatcgatgcttgtacaattttacagtttgacagatggtactgtactacgacatacggttctatgcaccacactaaaatctctagatagaaatcgtttccattaatcttcaataatttgtaatctatgaaaatcaaacttcatatatggtgtgatgaagtattaatggatatttagttaaccattacaccaaaaaaaaatttacaccggataattatttgaaaacgtaaatttcatattaacggttcaaactgatttttaataaaatgaacataatgaaatgatatttaaaaaaaaaagatgattggagaaagaaaacacttttagttttttcatatatatttattttcctataactaacataaaatcagttgaaatattattttaaattcctaacttaattgatataaattgagtagaatctatttttttccttttaaaaatgcaattcttttttgcagtttaaaatattaatttatatgaaaaataaaatttatattttagatttctaacttatgaaattttgaattatagcattggtccatattcgaaactctaagtcactatatcaccataaatggattatttattagttttttctccataaaacaataagtggctatgtgataataaacggatctaagttatgtttcagacaaaacagtgtccaaacgagaattatcactccatgaataatttatttacgttttcgtaacagttaaccaaattattatcgtttggtttttgtcatataatatgtcgcaactctcaacaaaaacttaagaaaataagaaaaaattatttacaattgttttagaaaaacaataaaaataaaatatagtattgtagagagaatcatcttctccaaacaatcactaaacgccatttgcttagctttttccctcttttgatttttcctccctacacgtcacctctctcttcttctcaccggaaaaaagtcttcacctttcaccggaaaatatcaccttttcaaccggcgtatgttcacatgaacggcacaacatcatcaatcaacttcttgacctccgacgatgacgcgtcggcggcggctatggaagctttcattggaacaaaccaccactcatctctctttcctccaccaccacaacaaccacctcagcctcagttcaacgaagatactcttcaacaacgtctccaagctttaatagaatccgccggagaaaactggacttacgctatcttctggcagatctcacacgacttcgattcatccaccggagataacacagtgatcctcggctggggagatggttactacaaaggagaggaagataaagagaagaagaagaacaacaccaacacggcggagcaagagcatcggaaaagagtaatacgtgagcttaactcgttaatctccggcggaattggggtttccgatgaatcaaacgatgaagaagtaacagatactgaatggttcttcttagtttcgatgactcaaagcttcgttaacggtgttggtctccccggagaatctttcttaaactctcgtgtgatttggttatccgggtctggtgctttaaccgggtcgggttgtgaaagagcgggtcaaggtcagatttacgggttaaagacgatggtgtgtatcgcgactcaaaacggcgtcgttgagcttggttcgtcggaggttataagtcaaagctcagatctgatgcataaagttaacaacttgtttaatttcaacaacggtggtggaaacaatggtgttgaagcttcttcgtggggttttaatctgaatccagatcaaggagagaatgatccagctttgtggattagtgaaccgacgaacaccggaatcgaatctccggcgagggttaataatggtaataactcgaattctaattctaagtctgattctcatcaaatttctaagcttgagaagaatgatattagctctgtagagaatcagaatcgtcaaagttcgtgtcttgtcgagaaagatttgacctttcaaggtgggttgttgaaatctaatgagactttgagtttctgtggtaatgagagtagtaagaagagaacttcggtatctaaagggagtaataatgatgaagggatgctttcgtttagtactgtggttagatcagctgcgaatgattcggatcattctgatcttgaagcatctgttgttaaggaagcgattgttgttgagccaccggagaagaagccgaggaaacgggggaggaaaccggcgaatgggagagaagagccgttgaatcatgttgaagcagagaggcagagaagagagaagttaaaccagagattctactctttgagagctgttgttcctaacgtttcgaagatggataaagcttcgcttctcggagacgcgatttcgtatatcaatgagcttaagtcgaagctgcagcaagcggagtctgataaagaggagattcagaagaagctagatgggatgagtaaggaagggaataatgggaaaggttgcgggtcaagggcaaaagaacggaaaagttcgaatcaagattctacggcgagttctatagaaatggagattgatgttaagatcataggttgggatgtgatgatacgtgtacaatgcggcaagaaagatcatcccggtgctaggttcatggaagcacttaaggaattggatttggaagtgaatcatgcgagtttatccgttgtgaatgatttgatgattcaacaagctacggtgaagatggggagccaatttttcaatcatgaccagctcaaagttgctttgatgacgaaagtcggagaaaactattgaacaaagttggcatatcaaagaggggaaactagtgttttcatcgatgaaatgggatcgaatttagcgggtaatgtatggtcttttgtaaagtagtaagtactcattttgcatcactcgcttcatgttgttaaatgttgttgttcattaggagaacttgcttagttcttagcttagtgttatcataagccttaagtgagaaggaagttggagactagaagaccagagagagttagcgaaataataaaatctttggttgtacttgtatgtatatatatgtatggagtaagattaagtgagatcctaaattctattgaagtttttttattctatgattgaatttttttgttagtttgtaactttgtagtgtacataaaggtccaaatttatgaactgtagtgtaccaaaaagctgaggaaaataagtggttgtaaatgggttttgcctagagatagtgctcttatctttgtaagggggtatgaggaaactgtttataatgccaaaaatgtggagacatgtgtgatttgtttgtaaaagaaactaaaagttaaaccaaagatttgttagttttaagtaatgagtaggaagtcttttagtgcctatcttatcttatcttatgtgtgagtttgagtatatctctatgtttagagagccgtgtgatctacctatgtttcttaattcttatagtcttgtgtacattagtaacgactagtctttaagtagtttagtaacatatataccgcaaaaatcaagattttccgaatattctttttggaactgagtttgtagtatcacaatttgaatttaaatccgaaaatttgctagtaggtttagtctcaaatttttgtttaaaccaaaatgtgaaggcatttgattttctgcaaacatgaagaacatttactgcataatcaacaatgaaagttgccaataagctacttttctccaccattgatgagttctaattaaaaaccaccaacttaagttttcataataaattgaaaaatacttttcatgtagtaccataaagttgacccctcctctttaaaggatgttagaaaattatagccatctttcatctatcttaggtatatgtatattaaatagttgttcactcattcgttcacactataattttgtaatgaaaatatatatgacaacaactattgttaattcttacaaaatttgtctttgattataaccaacgaccaaagacagaaaactctctcatttctatgaaggttatagttgttaattaacgtgtgaggcgatatccctacttacacatgcaacgtgtgtgttacccaaaatcgaatttacaaatatacacttttcactaaaattagattagttctcgttagtcttttactaaaataaaacaagaaacatattactaactaaataaaaccatatagtctctctttcttcttccttgtctctctctcgctcattattgatctccattgtcgtaaggagatcgcaaaaaagccatgagcctaaattgtctatcatgtcaagcccttccacgaacagattccaacaaagatgttgatctctccggtcctggaccaccaagggtcgagattaacaatgttctaggtaaaacatgttgtgtaaatcctattggtgggagaaattggtcagggaatttgagtcctaggatctatgagaagattggacggccaggatcgtctttagcgcataagatgaagaaggtgaaaaagattcatcacgttaggctaagtggtcctgttggttctagccctagcaatgtaccaacccggccggaacaaccaaagctcgtaaggagcactggagtccgaaggaattggagttttgagaatttgagagatcaaggattaatagaagaaaaaaggaagattaacatatgaatatatgatcaatgattgatcatgattctgagattttatataaatgtgagaggataaagctgattacatatagtttcaaatccagattcgtgattatataatcgtgatagaatatgtgagatgtataatagtattatttggacgacaaaacgtttccattgatttattacttgtcacgttttgttctctttgaatatttgtttttatgtttcttttttgtctttgaatgaaaacgtaatttcattaaagtgttttgtttcttttctaaaatcgttttcatatctgttttcgagtttcttgcgtaacacgagagatcatccttattggtggtatactattccatctaaatagccaaattgcataagcagtaaagcttttgctatctttcagaaaattattagtaaccaacaaagcaacaaaaaatcaatcataagagaaacaagaaaacttatctctaattctctaagagtattatgactcgacttaaaagttaagtaaatcatcattacaattgggcctactttcgcactgcgtaatttcgaaataattaatacacaattgacatggcagattttgtttcgaatcgtcatgacatatacttttgtggtatagcttcgtttctttaatcgttatccatatcggcatatcgctatatagtacaaactataccattgcaatacaagatatacggttttaacaatcacaccaatcataaagtaatatcaacgttactaaaacaatattctcagctatttcacatcgctagtttaacgataagagatgtaacagttctacaatttttcgacgatctattagattatcaacacttgtataatcaactttagtctgatcaatcgtagtaaaaccatggtataaaaaatacgactcctaaataatcaactttagtctttagtcatattataaacactaatcctcaacttgtttacgtatgtatcctaaattcctaattttaatccacttgttggttgtatctagtaaaaaatcgaatagttatcagaaactagttttaaattaagatttaacaacttaatggagagaaaaagagagacaaaaagtcaaagtttcttttttaaagcctcttgttttgttcttcttctcttgtttcttcttttccaatcttcatttttccagtcaaattcagaaaacgcgtaagttctctttctcgttaaaagggtttgttataaaacccttgattttacttgttttagagaggttcttggtttaaatcttcttgtggtttaagtctttgtggtttctctaatattttcttcccaagatttggatttgctctgttttgtttgtttgtttcagttttaataatggatgatcagagtaatcgtggtaatgataatcataataatgatcatcatcatcatcatcttggtgtgaataagatgggaaaaaacattcgtaaagatccaccaaaccaacaaaatcaacaacaaaaccctcaagctttggtttacaacatcaacaaaaccgatttcagatccattgttcagcagctaaccggactcggttcaacttcttccgtcaatcctccgcaaacaaaccatccaaaacctccaaattcacggttggttaaagttagaccggctcctttgacccaactcaaccatcctccacctccacctccacctccaccgccggttcaatcagttccaattgcatctgaaccggttcagcctgttaaccaattttcgagtaacccggctgaatctcccatctcggcctatatgcgttacctaatcgaatcaagccctgtcggaaaccgagtgcagccacaaaaccaaaacccggttcaaccatcaaccggtttatttcagtcacatcaaaccggtcctaatccaatgtcgttccagtctccagcttcacagtttgctttgtcaccgcagccaagatcaccatttcctttgttctcacccaattttgcattttcacctcggtttttaggcggtagtaacgaatcgctaccaccgccatcaccgggttttttctttccattgcttagtccattatggaaaaatcaatagttgaatatagtagcagtgtattaataatcctgatggtggattaagtgctccaagttgtaagcattatgtaatttgaaatagctagaaagaaaattgctcatttcattatgtatttgactgttgataaactaaggccaatatcgagattcaacatcaatgtgttaatcgttttttttatcctcatgatgagtttagatgcaattttgtttgggttggctgattttataaccataaactaattgcattctcagcttttaccttaacactttttgcctcttaaatttccaccataaactttgataattctttaaattacaacatgtactttcagattcatccttaaacatacatttccaattgaaccagtcattaaaccgggaataaccacaaatccgcgtttactgtaccgcgattgcgatttactcgattactcacctatatccgttaagaaaagggttgactgattttatagccataaactaattgcattctcagctttcccccctccacactttttattcctaaaattttcaccataaactttgataattcttaaaattgcaacatgtactttcagattcatccttaaaaatatgatttcaattgaaccggtcattaaaccgagattaaccacaaatccgcgtttattataccgctattgtgatttacccgactaatcccacacccgttaagaaaacgacgtcgttttgtctttgttttataatgtgaatctatctatatatgttatgtgttgtgttaattggtaaggaaaatgacaaatcgaactagataaaacttctaatcataaggatagataagactccaaatcaatcagtcaacctaaataatatcatcttaaagagaatcaacttccgaaaatacatcatccaaaatagacaaaagaggttgaagattgttccaatgacaatctaaatcaataaagaactagaactactctcattgatcacatagattgcttctttgtgtgagtgtgattgtatcggctccatgtggtgtttcttgaagctccattgtcggcttacaaaacaacattgttttcttaacggtgtgggtgattagttgggtaaatcacaatcgcggtacagtaaacgcggatatgtggttaatctcggtttaatgaccggttcaattggaaacatatttttaaggatgaatctgaaagtacatgttgcaattttaagaattatcgaagtttatggtggaaatttcaggagcaaaaagtgtggagggaaaagcagagaatgcaattagtttatggctataaaatcagccaacccttcttaacggagataggtgattaatcgggtaaatcgcaatcgtggtatagtaaacgcggatttgtggttaatcccagtttaatgatcggttcaattggaaatgtatgtttaaggatgaatccgaaagtacatgttgtaatttaaagaattatcaaaatttatggtgaaaatttaagaggcaaaaagtgttggggtaaaagctgaaaatgcaattagtttatgctataaaatcagccaacccattttgtttggtctttagtttgaaaagtatgcgagtctagctagacctataccaaaatgacaaactacatgtttacaatgtcttatatttatttttgtttgcataaaatcataatctcaatttttatatatatgaattgctatttgttacaaattcccattttcgtgatttttttttcttttttttttcttatgttctgtgaattttgtgtcatgtcacgattgtgtggtttcattataaatccaatcaatgaaatgttgttatggatcaatttcgttttacaagtattggtgattcaacttaacatgtgggaaaatgatacaagtgtagtctctcatcattttgacatagtacaaaatgtcactaaaacgcatttgagaaaatgtgtctaaatttgtgtgaaaattcttcaaatttgttgaacctaatagacgcacccctataccttgtaccaaacttgctagttgctaacgtcgttagaggcataatcattcttttgaatgactttcaagtagcaagtgcatacgatatgggacattgactactcgaaaaagataaaacactctatatattcaaaatctcaacagttgacgggaagatggatccagcatactcaatcattagatataacatcacaagcttcgactatcctaacagtaagtaagatataatatgaggtaaacaccaagtgtcttgatcgtttttcttcattgtgcaggcttattagttattactccagaacctgagatataattgccagaaggacatgttgctctgatccgtagacatcatttggcgcaaaaatattaattttattatgttctttgccaaaagttaccaatcagagtaattgggcagaaaaaatatttttgttggttcaccatcattaaagtctggagcctttgatttcacttttttattttttttatcctccaataaaataaacccaaaattaattttctgacttttatttattaaccaagttggcaacttgtagtaccccactagatttgtccctttccctaatggaataaaactagaagcatcttcagttcctcaccttttttgcttcaattactaaatacaatcaattactttttaaaataaatagataaaccgaaactaatcattatatttttccactagtttctgaattataatgaatattctacttataagatttacatagattactagaaaacatttagttagtcaactactaaaacattttcattcaacaaccaatttggatttttattttttaaaccaatttggaaacatgaaaactaaaataagcatataatgagagcacacaaaagaaaacgcatatacaaaagaagtagtactagtgttctcccacaattgccaggaagtatataaaaaggagtggctcccataatttgtcgtcgtccaaccatatttgagaaaatagattttatgtaacaaaagtatttcagtgttgtctcatgatggatcatccaatctttttgatcaaaaaaaaaaaagatggatcatccaattctggagtctctaataatcgggaaaaagaaatcgagtacagtttatttttgttggtcaggcacttagccactcaggctcatcagacaaagcgatgaccataacataattataattaggtgtattgacaaaaaaaaaaagaaaaaaaaaggaggatcataattagatgtaaaaaatggtgagctctctccaaattttaaaatgaaaaataaaagagttcaaattataatgggctttttcgtcgttcaaagccctttccccttcaacagtaattagtttttgaacgtaataatgttactggagcgcgaaaacttaagcaaaattagcacaaaaatacaaaaattaaattttacaacgaaattgtaaataaaaaaataaaaaaaattattgaacaaaaaaaaaactaatgcaacggtttttttttttaggtttttttttttgtcattaacgctagaaaacaaataattttgcgaatttacgaattgccaaaattgacttataaatactgccaattttcagacattaagcttttattcgttttattatgaaaagttactacacacaacactatattaaaacatacgctataaataaatatgtatcgaagaacaaaaaaaatatcattatttttccatctgacctagaaatctattccatgcatatatcatttcaaatacaaaaattgaataaaacaagaatactaataacctacaaaatagtacaatctacacaacagttaaagaaaactaactactataattagtatgttatcattcctgtataatttatcttgtcaaccaattgaataaacgaactactataattagtatgttatcattcctaattctatgatataacaagtatgttattaaatttaacctatctcgaccattccaattatccaggagactgattttttttaaaaaataaaacataaccataaaatcaaacaaggaaattacaattcaagagaagaaaaaaaacgttttacaaatcaaaataaaaattaaaactcccccaatttagaaacatttttctttcccccaaatttcatcattacctaacctgagaagagttgttgttgttgttgttccggttcatagcttcagtgatcgaagcaagtttctgaagattcaatctaataaccgtatcagcaaacaatctcgtatcttcctccgaattaccttccggtacatcaacaacataagattccaaaacaacggtccagatcctttcttcttcttcttctttctcaaatctatgaaccgtcgtaaccgatttataattcctcagcctatgttcaccaccggttatactaaacccagtcactctccgatcatcgtccaacagatctaatctctctcgagacgtattcgccggtaatccacttatcacgttcacgtcgcgcgtgcatcccactcgcatctcgaaatcttcactcacgttacagcttttgatgaagtgtttgtaaatctgtggcctatcgaaacgtctcaccacggaccatactgtttccggcggcgcgtggattcgctgagctaggagagatgagcaacggccgttaccgagttggtacgtgtggaactcggcgattgattgggagagttgggtgaattcgtcttgagttaaatcggaaggcatggtttggtgatggagtgttgagattctctggctgttctcttcttcgtttactggtgaggaggaggactctgaattcgccattgatattgtttgttgaaacttgaaagagagaagttgaaaatttgaaggaagaagaaagagaagaagggtatatttggaatttaatagacttgagttttttttaatggctatcacataaatgtcattaggcactgaatctttctacttttagttgataattactatatttgtagacacgtacatcaaaattagtaactattacaaatttacgtaatatttttgtagattctaaaataatactacaaaaaaaatatatatccgttcattataatagatggaattattttgctgaattcgaaaaatctgatttaatttaatgaacaataacacacagtttagttagacttatcatattattcatccatctatattctgattgaaatgtataaactatatagttaaaattatatatatatgatactaattaaaaatatcttgaacgagttaaactatatagttaaaattagaataactcattttatcatattcttcatgaattcctactattttatattaatcatcactttggtaaatatattacaaatgaaattggtcaactcgtaatagaaatgcaattaaattataaaataaaaaattatttacgggagttgaattatttttttgttggcaaccgtagaaattttgattagatgctcaaatatagaatcattatttattcgaatgcatttaaaggttagccattagcctttgttcgtgaagctattataagcctatacctatattacttatcttaatctataactcccaatttctctcgaaactaaataattgtaaagattaaaacaattttcagttacataaaaaaaatatacttgtaaagattaaaacattttacttgtactagagaatttttatcaagtgataattaaatgtgagcaactgagcatgaagcctccgtgtcatatacttactagttttggccatgtttatttatctgcaaccgaaatgggcaaattacttttttctcttatcaccttgacttttgttttttctattaaaattatttttaatattatggctgtgaatggtgactgcgttttgcggtacgcaaaaagtgcggtgcggttcaaatagtaatgaaaatcagcactgttgcgatacggttttaagtgcggttttggtcaccattcacagcctataaatcattatacttttgtccaaaaaaaaatataaaaaatcattacagtaaatagtttattttttgttacaaagatataattgggtacgtaagaagtagaatccaagagatacggtaggtacaagttataaatcataaaaagtagtctccagctgttttttttggcgtcttgtagacatttaatttttatgtcaagtatatacttgcacattgcacttgtatatcaaatttgatgattataacaatgatttagttaaatatccagagtgtaaaattatattgctaaacactatacctaaacgatttttctataaaattttatcattacgctaaattaattttttcaaaattttaaatgaaaaggacaatagtgctctcaaactggtatgattaaattttcctaaagttaaagttagaaaataattaatatatttatgaatagatagattgctatatatattctttagcattatagagataataaaagtatcaaaaagtccatttggtggaataatattgattctgatcattgcgaatttttttattctaaaaggcttgaaagaattttcaaatataatattttcaagaatccactcaccatgttataatggaatgtacattgattaaaaaaaaaaagagtagtggaatatacagtgagtgatacatatctctacatccacacatttgcatttttttggagagtggttgctttaatagtccagcctaaaatttagtataacaacagattttttttttatcattatatagtagattttggctacattgctttggagtttcgataagcagagcatatatttcttttgtcttttttcaagagcatatatatgctaaaacatagtttatggttgtcacaaaaaaaaaaaaaatagttgatgtcgattaatatatacttgtagtccctactgctaacttttcagttttattttaggtctgttttagaaaatcatgttaactctaaatcgaaactaattaatccagttgtttgctacgatcatgtcaaaagccgagcttatctagtatctagatacacagcaataaaaaaagagtttaagcaaaactcgacaatcctaaagtttgatgggtaaagaaaaacttagatttaaacaaatacgaaataatgcatagtccatgaaattttagataaaattagcagcccaataagctaaaacgagaccatttcttgggagattttgtcttcttcttctttggtttgcaagtttcattagcatcattctttttagtcttcttatttttcttctccagtaatggcttctctacattgatctcttcttctttctcttcctcaatcttctcctccatctcctacatatcacaaaacatttttaatcacaattatgaaagtatctaagtttttaatctaagttgttataaattatgaaaaacacttgttctttttcctaaaacaattcactgttagtctattataggttacacatgaaaaatgacagatctagtatgtcaaattactttaggcattttctaatttccgatgtaagatcctaacaaaaatgacataattttgctacttaaatgcttagtcaagacgatctaacataacaatatttgattattttcttgtaatttgtatttgaaacattaaactcttgtctataaatagacaataaaaataaatagtatacccgaaggtcttgtggatgttgtaaggggacatgaaaaggattaatgttgctactgaaaatgggtaatgtctttgtcaaatctctcttaatcctttggcttgatgtttcaccagaccctccagttgaagtagaagatccactgctcgattccaactccaaacatatctgttacacattatacaaatgacaccctttaaaaccttcctatacaaaaaaacccttaaaacattacacttattttgaaagaaaaactgatcaaaccatacctgaaaaagtctggtctccaaagccgcgattcgatctagtaacgatcctttgaaatacgcttctctaatcgccgtgcctctatcgattaacccacgcgtggtaggcgcgctttcgtctttccatttcggaaggttttgttgtctctctagattctttatctacataaaacaaaaacaaaaaactcgaataaattcataaaagtactaatgtatgttttcttaacttaggaaccaaagacaaaaaaaacaatttacaacgaaatccaagtgttcaagcctagagagcataggcaaagaagagagtgaatgtttttgttgctcaatcgtctccataagacttgttatttttttgggatttctctaacatgtgatattatttttttggtttatatagtggaaaaagttatatagataagtaaaaaaatgtaagacgataaaggaaaaagcagttgagttccctcctttttttcctgttgacactctctacttgtacagagtcatacgctaatctgttatttaatttaaattaacaaaatagtctaaatataaatattaactccaatttataaaccaaaaatagaaaaattaaacccctatattataaacacctaaaaggctaaaaactttaaattcgtaaccccacaatataaacctaatttttatagattaaacccttaaacaaaccccttagcgaactcttaaatcactaagttcggtttagtttgatttagttaccatccgattctgtttttgttcggttcaattcggttaaaatgttaatgtcaaccactagttcttctgtgtaagaaatactgaaataaactgtgtaaatggtacataaattttgcagaaattttttaagaatcaaatctaaaaacagagaggttaatcgcaatggaacattcagaaatcgaaccaacagttaaacccaaaccgaaccggtttatcccaagcttgaccttgtcatctcataagccaagaagcaagcagcattagcaggaacactcctagccatagctggaccaaatcctttatacaaacctttaactccttcagatttcagaatcttccgaaaagcatccatcgaccccgtgtatctcgggtttttgtaatcgtcgacttgaagaacactcttcacaacatctgtcggatatactattccccaaaaagaagcaccagcgactccacccgccatgatcaatgacccttgtcctaagcttgaagtgtctgaaccaccggctaaaaaccgcttgaaagcttcgtaggctgcaaacattgttgcatttcccgggacttcacgggcgaatgtagggaataaacctttgaatagacctcgtgctcctccttctgatcgtaggacatgacgggctacatccattggtccaccgtatttcacggctgcaaccactgagcttgtagtagaggcaccagctaatgcaccttgtgcttgcaacctgatggagaaacaagattaaacacacacacaaagagacatgttttagttctgtttcagtctagagcttgagttaaaagcacatgtatatataggctctgattggtaatacatgtaaaaagaacctaacctgcacttgatcaactcggtaggacaagcaaggaacgaaacagcgaaaccagcgcctgcaccggccacaaactgttgactaatggtcaaaggaactccagcttcagacctaagcagcccttccatttgacctctcacagtgaacaaaaccgcattgaaggcagcaacggttgcaagtggagctcccatacctttatacaaacctttggttccttcagaagcaacggtctgtttaaccgcatcgattgcaccggtgtaccttggaagttggcctggtgctggagtcggttggctctgaagtttgaccttgatagtgtcaaatggatgaccaacaactagttgagcagctcctccaacagtccctgaagctaaatccttccacgcatccgccatttctaagaaacaataaatcaatcaaatttctcagaatcaaccaaaaaaatcaaaagtttttgttaattaagaataagttttacaccacttgaaacaattttctcagaacaaaccaaaatcaaaacctttgttaatgaatacttgtcatttaacttgtgacctaaaccactttaactaaccaaatgtttcataaaccaaccaaactcactactttttgttaatgaataatccttcaagagtcaagattaacttataacctaaccacttaaaccaactatatcatcatccaaaatcagtacttttgtcacttgtgacctgaaccacttagccaatcaaaacgtataaacaaaccaagtttgaatataacaaagacgtttcaaagagtttttctcataaaaagtggatatttttattttgcttccaagaaagtaggaatcttatgatcatttccaatcattaccaaatcaaaggattcagaagacaatgagagaaatcttaacaaaacctgaaaatgtaaccaaactcaaactctaaaaacatgtcatttttcctcagttgtctctgagaaagtttgaatcttttaatccctagaactcaaatggtggattcataagacaatgaggtgaaatcagatcaaaaacccagaaggaaaattcaatcaaaagtgattaaatattagcttaccaacgattgattagagagaatccaatcgatatcagatggatccgagaaaggttagccgctcgaataaaaatgaaaaaaaaacaaatccagatgcgaatccacgggatagagattcagagacacaaaacgagtgatcagataaaatccaaaaagaaacaaaaaaggattcaagtggacataaaagtttttaacttttaaccactcgaatggctatctacgacacaaccacaaaggatggagctttgcagagactgaagttttgtttgtttgttttgtctctttaaattttctttaagagaaaacgtttttgttttaagtgtggttggtgaaaaatgaagatcagtttggctggtcagacgttcgatcagcttaatcggtcggttaacgtataacgtatgtgtggttcaggattccaatttggtttaaggattgagctggtttggagctgattgggtttctatgtttgaagatgggccgtggagttcttgttcagcccaagctcatccggaattgttgaagctgttataagcctaacaaaacaatataaggtattttaggtatgaaaataactcaattaactttatattttatgaattagtttactaattaaaaatattactaatttaatatattgggtcaataagttcttttctcaaaagaatattatgaatggggtcaaaggtaggaaatgatcatatggcatcaacatgaaaatttttatacaaaaacatttaagaattaatattattaagtaaattaccttataattaagaattttcagatgaccaccttccctatatatacattggctccgcctcaacggctgaacatagaaaatatgcaaactaagcaaatggcttctccttggttgttgatcatcatattctctctttcattactttgcttccatggaaggtctcaaaatactaaggtctgtcaccattttgtaagcactttgatataaacttaaatatataatacaaataaagttaaaaaaaattctcatatcttgtagcctcaagaacctgaatacgaatgcgttgatatctacaaacaaccttcgctacaacaccctaaactccaaaatcaccgaatccaagtatatttctatatatttacatttgtttgtcgatttcctgcacctaatgtttatcatgatcatatacttatccctatttgattgatatattttttgatgcatcacatagatgagaccgagcgatgaagccttagccatgctctcaggagatacatcatcagaaaacttatcaaacgatgaaatggttgctgagtttgatataccagaagaaggatgtcctcaaggacaagtaccaatccataaaccaagaaataatttcaaccacaccgagaaacattttcagcctattaatggatttggaactgttggtcaacatgtgaagtgactaaaattttatacctttactatatatgatccaaaccatttgatgtgtattttttttttgaaaaaactgatgtgtatatatatacaggctgcggtaatgaagaaaatcgatgccaccccgtggcgtggagcatcagcatggataagtatttaccaacctaaattgacaaataaagagcaattcagcatggctttcatttggctcaatactgagtatgaaggcgaacgcaccagtgcccactttggttgggctgtaagaatttaattttttgttttgtttttttaaatcgtgatatactagatcaaaattaaacccacttaatgcaaccatcatttagcatatgtataattagttcatttgaataaatatcatggttaaaagttttactgataactttttttttttactacgtatgaaatatattaaggtgattcctgcactatatggcgatagccgtacacgacttactgcatactggagtgtgagtaacaatgtcaccaattatcgtctgtccctatcacaagaaagtagattttttttttctcttctttaaccccaaatcgttttttgcagcaagatacattcgaaagcggatgttacaatataaaatgtaagggtttcgttcaaattgataggagactctttcttggagccggttttgcgaacacctctgtggtgggaggccaaaattttaaagctttttttgcaatcaatcaggtatataagtatatataacaactacgtttttgagttaaactaaattcttggtttgatattgatttattcaaaacaaaaatttgaataaaaataaaatttctcaaatattattaaaacagttctttagtttcaattggttagtaatattctttaaccgataaactcgaagaaaattttcactagataaaactagtgaatttcttcacaaactttagtataatttaccaaaaacaaatataaccttacacttctttttttatgggatctacacaaataataggatccaaaaacaaacaatttgctgctgacagtggggaagatttacttagggtattggccagaggaacttctaccttttttcactgaaggagcggagtcagttatatatggtggattgacgaatgctccatctgatggcattcaaccctttaatatagttagcccaccgatgggtaacgggaacaaaccgctggatgaggaagttgatctaaagcatacttgttatatgcactctcttaaatatgtgacacaagattacaagagtgtcgatgttgataccaacaaggtcgccgaagttgcggacgcaggtatatgttacgacgcgatttattttgataaacttggggggtatggacaaacgtttaccttcggtggaccaggtggtcattgtgatgtgtgatcttcctttatgtgatactttgatatttcacttttattcaataaaacaatatttaaatttctaattccctagtcgattttgatagctttatattcttttacaatgtttttgtataaccaaaactcatggacatcaaaacaagagatattcgcgtgtcgcattcttttaatcatcaaaacacacagtactaggttgatgaacaattataattctaaaaatcttttacaagtttttttgtcattccaacttaaatttgagaaaattgttgtatgcatcgattgtttttgtattgtatgtttagacaggcaactactaactatgccaaccgccagatatccaatggaaagggtttgaaattgctcgaatttttctgatattgtgtgaaaacccttttcctatttttttggcgattagtgtagtaagtacttgcgtataatacaaaacactacacttcacctataaaaatttaaaaacgtctccaccttatgtaaaaccgagtaacgggtaaaacatgtcatgtacgtacggaaacaaaattatatgttgattgggttctaaataaaatactaagccatgaaatttaagcctttcataaactgatattgaagcttcaattggaatctgtcaatcaaagattgtaaccattgacaaaaacttatagttttaaaatcagctaccgacaacaataaatttgtcattgttggattcaaaatacaagtctgttttcacaataatgttaacttgagtagtttcttctttcattctcaaatctgctatcaaaagccagagttttggtaactttaaataaatcggtcaggacgttaacaaatttattatcactaaacgtcattctactaattattttttcttagaaaaatctgttactatatggcagatttatgtcaaaaataatgtctgacgccactaataaaataaatttgttacacattataataaatctgttaattcctaacaaagcaataggtattttaggtatgaaaataactcaattaacttttatattttctgaattagtttactaattaaaccctcacaataataaaaatattactatattgggtcaacatagttttttcccaaaacaatactatgaatggggttaagataggaaagataatatggcatcaaaatgaagactttataccaaaatatttaaagattttataccaaaatatttaaagattttataccaaaatatttttaaagattttataccaaaatatttaatagttaatattattaagtaaattaccttataattaagaattttcaaatgactaccttccctatatatacattgcctccgcctctgttattaccaacggctgaacatagaaaatatgcaaactaagcaaatgacttctccttggttgttgatcatcatattctctctttcattaccttgcttccatggaaggtctcaaaatactaaggtctgtcaccattttgtaaatataaacttaactatacaatatatacaacttaagttctaaaattctcatatattgtagcctcaagaacctgagtacgaatgcgttgatatctacaaacaaccttcgctacaacaccctaaactccaaaatcaccaaatccaagtatatttctatatatttacatttgtgtgtcgattttctccacctaatgtttatcatgatcatataattatccctatttaatcgatatattttttgatacatcacatagatgagaccgagcgacgaagttctagccatgctatcaggagatacatcagcaaacgatgaaatggttgctgagtttgatataccagaagaaggatgtcctcaaggacaagtaccaatccataaaccaagaaatctcaaccacaccgagaaacctttaagcctattaatggatatggaactgttggtcaacatgtaaagtgactaaaattttatacctttactatatatgatccaaaccatttgatgtgtatatttataacatattgtatatatatacaggctgcagtaatgaagaaaatcgatgccaccccatggcgtggagcatctgcatggtttagtatttaccaacctaaattgacaaataaagaccaatttagcatgagttttatgtggctcaatactgagtataatggcgaacgcaccaatgcccagtttggttgggctgtaagaattttatttgctttactcgtgatatacttgatcaaagataaacccacttagtgcaaccagcttttagcatatgcaattagttcattcgaataaatatcatggtttaaattttttactaataaccttttcttatatgtatgaatattaaggtgattcctgcattatatggcgatgaccgtacaagacttacggcatactggagtgtgagttacaatatcactatgtcttgtctatctctattacaataaagttggttttatttttatttttgtgttcttcctggtacgtatctatatgagtttctcttctttaaccgcaaatcgttttgcagccggataaaatcgaaaacggatgttacaatatacaatgtaaaggcttcgttcaaactgaccatagagtcgctcttggtaccggtttttcgaacacctctgtggtgggaggcaaccaatataaagctttctttgcaatcagtcaggtatatacaactacgtttttgagttaaattaaatcctcggtttgatattgattcatcgtgagctggtttttaagaaaactatatatggatggtcattgttcaatatggataatttcatctactcttaaattagtgagaaaattcaagaaaaagttgattaaaccttactttttctccaatattttatatattaaaaccagttctttagtttcaattcggttagtattacttcccaaacttgaagtaaaatttaccaaaaataagaaacttacatttttttttattttttttgggattgatacaaatataggatccaaaaacaaagaatttgtggctgacagtccagaagattaacatagggtattggccagaggaacttctaccttttttcaatgatggagcggagtcagttatatatggtggattcacgaatgctccatctgataacattcaactctttgaaatagttagcccacctatgggtaacgggaacaaaccgctggatgaggaagtggatctaaaacatacttgttatatgcactctcttaagtatgtgacaccagattacaagagtgtcgatgttgattccaacaaggtcgccgaagttgcggacgcaggtatatgttacgacgcgatttattttgataaacttgggcggtatggacaaacgtttaccttcggtggaccaggtggttattgtgatgtttgatcttcctttatgtaagactttgatatttctcttttattcaataaaagatatttatattcctaattccctaatcgattttgatagctttatattcttttacaatgtttttctataaccaaaactcatggacatcaaaacaagagatattcgcatgtggccttcttttattcgcaagggttgatgaacaattataattctaaaaatcttttacaagctttttttttgtcactccatctataatttggaaaaattgttgtatgcatcgatttttttttgtacaaacaaactatattgtatgtttagacgaacaactacttactatgccaaccgccagatatccaatggaaagagtttaaaattgctcgaattttttctggtatggtgagaaaacccttttcctaaaaatttttggcggttagtgtagcaagtacttgcgtatataatttagaaactatatttcctaaactgtttacatgcgaactttcatctctctttgattccatcgcctaagaagtaaccacattttattttattagtagcgatataacatatagtgtcgtctgtctaactcgttttattaaacaccgataataactttagacggacttgtaaacgactgatatagaaaacattcaaatggatgatttctgtgtcaagaattttttgaacacttctataaaagcgaaattacagtcactttaaaattgcatattgtgttttcgtgtaacaagaattgcacaatgttattaaattggttatcaggtttttaacccaaaacaattgtcgtaatcagtggaaactaagttatatggacagtagaatagtgggccagtggggacaacagatataaaaatgttgcaataatcaattaaatgattgtgtcctttctgtatctgacatcttcttttgtggatgacaatttcatcacgtgcgttgttggttttcgaaatctaaaataagacgacgattttacaaagctgcgaataaaataaaatatgttttgacatgttcaataaatcgaaaatattgttaaatcaagacagggaataacatatattctcttatatatcacaaaaaattaaacaaaattggccaaacatggctgacaaattttgtagccaaatatagaaaaatgttgatatataaaaaggcgagtaaccttttgattctttaacctatatctaaaggctttttatgtgctattataaactaatttttaaaaatcttatatattgaacaaaaattccaaaaagccttaacaagagagatgaggcgatggagacaagtttatttgtgtggtggttgttaagaatatgtggttagagtttagattatagagtttaggatc

SEQ ID NO: 846 - DNA, 33479 bp, Arabidopsis thaliana
gaaaaaatatatggctagtgatagatcaaaaataattttggtcatttaacaatgaaaaaagtgaactatagttttcagaaaactacatgtgaaacttttaagaacttgttgaagttctcaaacatttgtaagtgtcgagaaagttggagaaaagtttcagaaactgtttcgtacattaaattaagggacgtgttgcattagcattttagcgttcaattaaccttatgagttataacatagtagctagatagctgtgaatacatggacaaatgttatctcatgtcattgtataagaaataatgttcttgttgtaactcacaccgtcagccacaccacatcggcacctctcttcctctctttctatgttcctcctacactaagtgccttgctctcgaaggtcgacattttttgtccaaaaatacaaaaaatgtttctaaatagaaaataatgaggcattgttgggggaaagtaaattattgtaaagagaaatatatagaacaagcaaaagctgatgtcttggggctcaacttttaaatctgcaactttttaatatgtttttgaaagaaaatcagttgtatagctgttaattgttttaagagttaagatttattttaatttaaaagaaatgtgaaattagttaaaaattatatattgaaggtcttcctttttttttttgtaaacctatttattgaaggtctaaaaaagtatgtttatcaacaaattttataatgccccaaaaattctcaggacagccaatcacacttactgctgacagcaataatacaaaaaatttgtgaaatcccataacctatcaatttatcacccactacaaatgttagccatccaatactctgggcaatgttatctgccatatgacaacatcttgggggccataagtgaatagtgatgaaacaaaacacagtaacaaataataaaataaaataatgatggtgaagtgtcgttgaagagaaagagatatactatagtgaccgcgttatagaagaggtgtcgttggaagtttgagccatgattgcggtgattcttttcaatagtacgctacgcgcaacaattcatttcactggttgcgactccttttaatagtagcaacgactctcttttttaatcgccaaaaatagtctacgtaatctaattctttgccgaattgggactttttgtaggttactattctaataaataattaattataatgaaataattacatttaactggaaagatttattttgaaataataattttaataaaatcaacttcattttggtgattatttagttattaagttaaaattatagtttttttccttgcactatttttctattttaaaacaattgtattatatatataggaatttgtaatcggatacgtctgtttgaatatagtaaagacttcttcttcttcttctatttttttgcactgatccagtgaccattttaactctttaatttttagtctccacgttagagagtcggacaccttttcatggaaggcaacacatgtttaatcacttgctacactcaagaaaagttcatattaattttataacgtaaccaaaattataattttactaatttaataaatccgcgtaagattacaaatgtatttttaatggttaagacttaaaagtgtcgcacaaattttaaataaaacagaatatatttatatttttaacaccaatttgtccgttaatatcaatatcttttttatgacatgttatttatgtttatgtgaaagtgcgaaaaacattttagttaaaccatgtaattttttttgtcgtatttgtaagttgatcacctttatttaaatatattccaaattttggttacttaatccttttaacatcagttgtttctttgaaaaggtaagtcgactaaaattgcataaatgttatttatatcgttgtcggaaataaagttacatcattacaattgtcttacttagtagacaggtggatgtacataacacagtcgaagagaaggtccaaaagttttaaaaatcacaaataattagaaaacgacagtgtttctgtacctagacacatttctttgtaaatctacaatagccgacgacaaaaaatggagtaatcataaattacacaaataatgtataacgtaattgtcatctagccaacaaaaaaaaagagatcaagacaacaatataaacatctatgtatatactttctccgttacatcaatattgattttctaaaaatgtatgtatgggtttagtttataattattggtttagtgtttagaacagaacatttgtaaaaattactgaaaacagtcctggtcattcttgagaattttcttttaatttgtgaaaggatcttaaaattaacttgctgagtttccaaaagctgttttatatttcttaaaaggtttgaaaaaatgtctgaaaattcgaaccggaaaatagtgtggtaaactatctacacttacacaaacaaattcctatcaattcaaaaataatttgtgttaacacaaataagattgtttcaacaaaataaaaagcttaaggatgtgatcttacaaattaagtacccatttaaaaatgaagaaaaagacattaatgttgttaaataggatgtggtgttaacttgtcagttgctcctccccactttttcttggtctccttatcattatgcaagctcttccttccacataaacccaataaagatatgaaatttgaaagaaaaaaaaacaaagatacaaaacagtgtaatttcagatttttgttgttacattaatcactttaagttcaaaattatgcaactcttttgtcaaatgtcaatatctagcattcacggctccgtcaatagattgcgtcattatttaaattttacaaaataactccattaaaaaatatagaaacacagaatcaatgttaagcttcaccattacacataaaaactaaaatgtctatttaaaatcatcatgatggggtgcgagattaaaggattgcattgctaactttgcctctttacgttactttggttaaacccaattgttaaaagggagaaatcgaacattggttatttgacttttgagtatattagtatcaaaatgtataggtaataatgaaaaaaatgaggaagtgcagtgcaacaaagtccattgacattgttttgttaacctgatccatatagaattaaagagtgataacaaaagaaaaaagaagaagaagaagaaagagtgataattttttttttttttttttttttttgaaagagtgataacatatatgggtgaactaggtgtatagccataattgaacaaaaattaagaatatagccatataatttacgtaattcagcaagtaaccaaaaactctaactaattacaagtctatccctgcattatttccctattttccaatttgccatgactcatcatcttcttcgttttgttgatcagatattgatctaaaggtaatattccatatgttctaaaggtaatggattgtgaatcagatattgatctaaaggtaatgtttttttaacagacctttttcattcatcatcttctttgttgcttcttctcttctctccaatccaacaaaaaatttccagaaaatttaacttttttatatcaatccattctaatttaaaaacatctattgatttaagaaaactaaaccctaagatactatatatggaacccaaacaaaaataattaaactaaatgaaatcatctcaagaatcagtttttagaaatctgacaaaatcatgtttatatacttttaatctcttttctcctttcctaaagcgaattgaaatcgattcgattttgggtttaaatttgtgttagggattttcaattttagatattgatcaaaccagaaaatattcaataagatcttgtgagtcttcgttttcatttttttccgttctaactagcaaatagaatggtacaaaattgaaagtaaaatagaaaactatagttcggttctgttttaattaagttaaagtagaaaaaaaagataagaggcgagagaagtgaaacaagcaatggaagagaggaagaagtgattaaggtggtggtggtgtgtatggtgtaggtcgtagtaatatttgtgttggtggttgcagtggtcgtgtgtcaattgcggcggcaataatggtgatggtggttgagatgacagcgtaatggtagtttctatggtggtgacgattgcagtggtgatggtgatgatggtatgacatttgtggaaataatggtggatgcgatgatgatgacggttgcaagggtaatggttgtaatagcataaaaaagatggtgattgtgtagataagagtactttagtatatattatagtttatatacaaaatatcatctctgtttttgttgttggttagtttcttaattatagtttttttgttagtcaattttgcaaatttcccgacatataatcgtgtttcattcaatccattttgttcaacgacgaaacaatcccgttacctagaaaaatgtggtccttttacctggtgataggtgatagtgatacatcagctatcgcacatgggtcgttaaaattcatgaaaagaaaaccacagaaaaatgtaatattttcatgcactcgtgtgaaacaaaataaagagtacactctatactctatagtttctcgtttagtttagatatataaatacaaagacttgagacgacttctaatactccggcaacgatgattaataccgacgataacttattgatgatcgaagctctcttgacctccgatccgtcgccaccattacttccggcgaatctcagcctcgagactactctcccgaagcgtttacatgctgtgttgaatggaacccacgagccctggagttacgccattttctggaaaccgtcgtacgatgacttttccggtgaagcagttctcaaatggggcgacggagtttacactggtggcaacgaggaaaagacacgagggaggttgaggaggaagaagacgattctgtcgtctccggaggagaaagagcgtcggagtaatgttattcgggagcttaacttgatgatctccggcgaagcgtttccggtggttgaagacgacgtcagtgatgacgatgacgtggaagtgacggatatggagtggttcttcttggtttccatgacgtggagttttggtaacggatccgggttagcgggtaaggcgtttgctagctataacccggttttggttaccggttcggatctgatttacgggtcgggttgtgatcgggctaaacaaggaggggatgtagggttacagaccatcttgtgtattccttcacataacggagtgttggagcttgcatccacggaggagatccgaccaaattcggatctttttaataggatccggtttctttttggaggatccaaatatttttctggagccccgaattcgaactcggagcttttcccatttcagttagagagcagttgttcaagtactgtaaccggtaacccgaatcctagtccggtttatctacagaaccggtataatttgaacttctcgacgtcatcttccacattggcgagagctccatgcggcgatgtactgagttttggcgagaatgttaaacagagttttgaaaatcggaaccctaatacttattctgatcagattcaaaacgtcgtccctcacgcgacggtgatgctggagaagaagaagggaaaaaagcgcgggagaaaaccggcgcatggtagagacaagcctttgaaccacgtggaagcagagaggatgagacgtgagaagctaaaccacagattctacgcattacgagcggttgtaccaaacgtatcgaaaatggacaaaacgtcgttgctcgaagacgcggtttgttacataaacgagctgaaatcaaaagctgaaaacgttgaattggagaaacatgcgattgagattcagttcaatgaactcaaggagattgcaggacaacgaaacgcaattcctagcgtttgtaaatacgaggaaaaggcatcagagatgatgaagatcgaagtgaagattatggaaagtgatgatgcaatggttagagttgaatcaaggaaggatcatcatccaggagcgagattgatgaatgctttgatggatttggagttagaagtgaatcatgcgagcatttctgtgatgaacgatcttatgatacaacaagcgaacgtgaagatggggttgagaatctacaagcaggaagagcttagggatttgttgatgtcgaaaattagctgagagtttctgcggtgtgttttgagaaaattaatcatggggtcaaagtgtaattaagttttgttgattttctcataagttaatggccgttttattagattttggataatatacagttctaatcttgtgacccaaaattagggggacttattgcaaatggtcaaccctggaatgaacgagatgaacacaaacacaaatggtgcttgaattctttttttttttgtttcctcttgtttgttcatcttactaacatgaaaaagatgaatatttatattttgcactttcagcccaaatggtaaaaatttgggttgaatatatttttgagaaaaatccaaaaaaagattattgcacgtttaatatccaaacttttttggttggaaggaaaatatacatagtttaattaaaacatataatttaatttctacaattttactcaagatctaataacaaaagcaaaattctagttttactcttaccatctcaattaatttataattgacatggtatatttgatttgaataaaaattattttttgttgataggttgtttttattaaaattattttattttgactaccaaaataaaaattagaagaaaatctttttaaaaaaatcttcaactttccttttttaaaacacaccctttaatagataaaattagggtttttggaatgaaatgttgaagaagatcaaaaaatttagattttttctatcccaatttaagtgggtgagtaagacaatacatttcttgctatccttttgtttttaattttcaaagaagaaatttaaagcatacatgtatcttaggtttaaaactgatcttgttattatatatagtttcaaaatccaaaacacacatcacaagcgagatattcttcattaaaagaaagaacaaataaaatggagagtagaagatcttcctatgcttttgtttcggttttgatccttgtggtgctcttgttttcagggtcaaacttgttgttgcattagaggactatcatcatccacaaacacttaattgaacaactccgtaaggttccaatttgtatcattaatgtgtgatgtgtccaactcctaaactaaagtctcaataaaataatggagttatcttgcttactcgtacatgtatggaataatggtgtagtagtgactgatgagatttacaatgaatcaattctgaaaccaaaaagtgattcagcccaatgatgtgtgttttaaagcccaatgactaatgggcttatttaacccaaccaaataactaatgggctgaattcggatcatttaaacccgacccggtatcatctctatggcgctctctggttaaaacatacaaacttttagggtttcttcaatctctctctccctctttcttcctcttctctcattgaaatcgaacgaggatggggaagaagaaatcgaaggtaacggagccggaatctcaaaacgatgaatctcagacaatcttctccactctcttctccggcgaggttgaaagctctggctttgcgagtctcttctccgctgataaccctttccggcgaaaacaacctcaagaaatcaaagagtcgtcaattcctgatgagaagaaaggggataaacgaaatgcagagaacgaagaagaagaagaagaaacagatttgcctgtgaagacgaagaaatctaaaaaggaaaaaaagcttacagattccggcgacgagaaagagacgatttcggaggctgtagaagaaagtgggttggtttcaaagaggaagaagaggaagagagatgagattgagaacgaatacgagacgaagaagtatggaagcgttgagatgaaagagaagaaggttggtgagaagaggaagaaagctgatgaagtagctgatacaatggtttcaaaggaaggttttgatgatgagagtaagcttcttagaactgttttcgttgggaatttgcctttgaaggttaagaaaaaagtcatcttgaaggagtttagtaaatttggtgaggttgaatctgtgaggatacgctctgtgcctattgttgatgtgagtttcttatagctaaagcctaaagatgaatttaggttgagtttttgtgttcattggtttctgatttcgtttgatttttattgattgatttagtcgaagaggacaaggaaaggagctataatgctgaaacaaatcaatgagaaagcttcaaggtttgtgcttgaaactctatatagtaatcatttgattttgaagtttcagtgatgaaaaagtctaatgtcaatgtttgtggaattgcagtgttcatgcttatgttgtgtttgaaacagagcaatctgctgcagcttctctggcacataacatgtctctggtaatgtaacttttgcgccttttgttctatctggttgatttttaaggagttatgtgtagattggctaatagttttatgttataatcagattgatgggaatcatgtccgcgttgatagagcatgtccgcctcgtaagaaacagaaagggcatgatgatactcatttgtatgatcctaagaggacagtctttatgggtaatctccctttcgatgtgaaggttagtagtactagtcttaaggctcttcttctgtttaatttgcgatgatcgaactttatcttagattctcagttttgtttgtttctaatgcaggacgaggaagtgtatcaactgtttacgggtaagagtaatctggagaacagtatagaagctgttcgtgtcattagagatcctcacttgaacattgggaaaggaatagcttacgtcttgtttaaaacacgggtatgttgaagtaaactttgatctttgtaaggtttgagtaataaaaactaattagatctgatgagtccttttattttgttaactataggaagctgcaaatctcgtactcaagaaaggatacttgaagcttagagaaagagagttacggatttctcgagtcaaacctgatacgccatcaaagagaaagagcaatccgtctgaagcttactcgccggcccagaaaagactgcagaaggacaaagtggtcacaccaactccaacagggaaggctaatctttcatatcaaggtgtacgagcttcaaaatctggtgatgataagaaaacaccttatcagaaaagctccgcgcagacaaagatgagacctagaggtagcagcagcaatgacaacaaaaaatctgggaataatagtgcttcaaaggaaagaagtcagaagcgaccagctgttgcagcaagaaaggcgaaagcaaacgcaaaaggttcaaaagagagcggtggtaagcggtttgcagggacaaagcgtaaacaagaaaaccggacgcctgaaagcttctctaagaagaaaaaaacaaaacggttttagacggtttctttcaaccataatggtgaacctctttcttcttccttagttttgatactagtagtcgttttgtattgttctcttatatcaatcaatgatgatatactgtaatgttgcaacaattatgttttcgtgcaagtttaaaaggaaagctattttgatgattgtttgttaagatatatttaatcacataaaacagaattaggagtttatgtgcttgaacttaacttctcatggataatctattgtgataaatacctttacatctcgtatgagttctattattagagtatgaatgaatcaaagcaacttgaataatgtgaaatgattactattacaacttgtgtttaaacgatacaacaacaggtttaacatttggtttgaaagttggtaatgtacggagaggcttgacttgtctcgtgttgtgttcatcttttagcaagaaagctctactgctccatggtgacttttcccggaacaaaagagctgtttattcccctaagttcaaaattaataatgtcccttaatacttgtagtcgctaggcatcaggcatgtatctctgtaccaatctgtatctgtaagagcttcaaactatctgaaaactcaagacgaatattgttgagtcgagctgcatgttacagattacaacatatctaatctagctctctctagcatagatttaaatagtaaagtcaagtcctactaattatctaaatatgtcaaatatttctcaaaaataaaccattccctaagagacctgattaataattttcaaaaaatttcagtaagaatcaacataaaattatacaataaatagtttcccttgtatagatcaaagagatgacgactcagtagttaattatcgcagtgggtatgttcactatcaattcatagtgttccgtgattggagggtttctaagtgatatagacttgattaacgcctaaatcctgaaaatatgaaatcgataattactctgattgattggtacgtttactgtttatcaccgaaaaatctctcaaactttattcttcgtctaagactttaattttgaccgccacatataattcaaataaaatggtacaattattagaacaaaagttcaaatattcaagaactttacggtaaaactacagaacatagacaagatgattaccctaagaccaatggttttaataaccactgtccgaaagacaaaacaaaatgaagacgattcttctataaaatatcaaatacaagaagaaaaaaataactcaaatataaatcaatatgaatttaaaagaatcaactcaaaacctgaatcaaagcactggaccaaatcagaaagaaagcaaaaaactacaaaacttggttttatttctgtttgcttattcaaatggaacacaaaaatcaaaattcgaagaaaacatcttatagaacacaaaccatatacataactagatatttcatatttagttgtagatgcaattgagttaccatatgcttctggtcatgcttgactccttgtacgccaccggcagccgattttaaaaccaaaatcggtatccactcgtggcatacagggagccaggcataacgacaaactattatatgtatatattgttgtataccaaacctctacgcatgaacatatctttatacgtggatcttggcttgaatcgaatcagaactttttttaactgttgggaagaggaaatgaagtagtcagagagaaatgttgaagagttttggttgaagaggaatatgtggtacaaatatataaaggggaaagagagaagagaactaattatgttcttgccaaaaaaatatattcaaaagcatgactaagttaggttttgatttttaaaatctttaatgtgaagatagatgaataaaattgttaacaaattaaaggacccatttactcactttccttaaaggtttctcctttttccacatattttatttatctattgagagttaaatcatgcaaagaattttgctttttaaagcacataatagaaaaagacaatggtgatgcatattgtattatttcttcaatattcaagttctaagatattataaacttgcttaaactccaatatatgtacattgttattgtaaggtggaaacaaaaataaggattcttcttgtcaaaggtaataaagattacatagcgtgcaaacctgctgagttacttttaattaaatagttatattggagagttttttataaagatttttggtatcatacaaaggaaaatttataaaaaagaaagagtgaatgggccattgatcaatcatcttcatcagcataaaggacctacattttcatcccaatccagaactttagcgttggacaaatcaaattgatatcccattaggtcttgctttgtttttgtttcttttttgttggtttatgtatgcgtttgtattagtatttacaagttaagataatgtgttcattgtcaaattgtaaaagggttttatacatgatatcaatgcaaatacatatatttggggtttgaaataaccaaaatcttaaatcttcataacttgggaaataatgtgaataagcatttctttacaaatgaacattgtacttgtagacacactatgaacatattcatgagcgtgaacaaaaagtgagtacatatatgttttataacgaagagaattcaaattcaaagactctctaaagcttaaaattcgattcttcttttgcaaaaatagattttgtatgcttttttcatcatagctctacatcggtcgtgggctctttcactttcacttttcattcttttataagtgaagacactttttctttagtgtcattcttagtattattttctcttttctttttattcattttccctttcgtttgtttttttctttgataatggttttaaaaatttagtccagaccaaatatggcctagaattagagaatcttgttaggatgaagttttattttcttctttggtcttacaaaaactgaaacaagataaacgacgtcgtattacacacaaacaaacgaaaactaaacgacgtcgttaaatattaaaaaaaaacggaaacgagatttactagtttggattttaatgggctcaacaggcccatactaaaccagtatgggcttctttcgtgctgcaactcatccagatgatctccggcgacgagtaccttcgccggcaataatggtctctgtgtagatagatcgtgaagaagattagagaatcgaagaactcgtatcagataagctaaaatcaatgggtagccaacgacgaagatcggtgatagctttgattttcatctgctgcgccatttcttctacctcatctgatcaggttagagatctccagtgcttcaattcgtgttggttggtagctctctgatacgatttagggttttttgatctttgaaaccttgtgattgcgatgttcgtacaggttggaacaaattatagagattctcatgaatttttcgattccgatacaatctgtatctctgatcaatacattatggagtcttatttcactacatacacttccttagacgactcagagtttcgaaacttcttgcttcttcaacaatgttctgacaaagttcctactcaagattcaaacattgttcctgcaacttcatttatacaacatagaaacattactggtgaaggttcacatcgtaatctcatcacatccatcaagcttcttcttcatcactcagagtctcagtttcgtgagctcgtgatcgttgaacggttgcctttgggtgtttttgctgatccttttgagcttcagagtcttcaacaacgcagaggttaaagattaacaagaaatgtcacatgaaagcttttttgtctttcgaatttgatggagtcttgaatcttttttgcagctttcagtgacgtatctgtgtttggtgacacaaatcttgagctgccttcgtttagatcgaacagatccgtcgttgagattcatgttgaaatcagctctagaaattatgaaaatggtgaaataagctttaagcttcctttacatgctcggtatcaggtaaatgatcacttgaactaagtcttattttggtcgatgtcaataagattggatctttacttctctgttatctccacagcctctggacgacagtggatactctagagtggagtttggcgagccagacttgttcttgtgctcgagccatgtacaaaaccagcgacgtgaacggaggagatgtttggttttgtcgattggcagatcgaagactgaaaccaggtctgttttctgggatatccctgccggaatcaggggtcatacagagtatgtttccgccttgacattcgccgctgcggttttttctgcattttcaatactcgtggcatcggttttgagctcaaagggtgaatcttgtaaaaacttgaagcagtcatgactctgcttttggtttcaaacttctttgtgacactcattgagcaaatagtttttgtttcctctcaacaaagatttaggagaacataggagaatcacaaacaaaacagagtttctgtcatctccaacaaaatgtttgcacaacaaaaaagccacacacgcacacactattacattaaccaatagaacctcaaaccgaactgaaccaacccaaacaaacacaaaaccaacttctaagtgttctcttcaacatataatatataccaagtagttccagtcattgatgccttaagatcaatgaacacacacaaacgaaatgttcttgctgttcgaaatcaagctgcgagtactataatcacgatcaggagaacaatgccaaatatcaccaagagcaagcatgtctgcgtgtaaacaagatcaacacattagcctaaggtttccaaaaaacattcagtcactgtttttgtctgaaaacttttttgagtgttttaccagagaggagtttgatttttgtgttttcgcggcttgcacaagctgagattttccttgtgaagttgcagcacgggagttgtcaatgtgagtaccaatatcatctgcaagaaagaaaaaagtgagttctctaactgcagcttcaagggcatgttctaattaagtttaatagattgtctttacctatcatgactccttgatcgttaaccagaaccgcaagatctttgaatatctcgttaacctcaccaatttgctgatggatttcttgtattccttgctctctttcttcaatcacagcctcgttgaatgcaatctcgttgtctaacaatacaagttcttgtctacaacaatcaagcaaaggagaaaataagttgcatcaacaatcaagcaaaggagaaaataagttgcatcatataagagatgtgtaaaagaatattttttcgatatcacctaccttttcgactcctgaagttgtgcccgctgttccggtaccttatccacctcacccgccgtatagctatatacggagtcagacaagaaaaataaggaacatgattatcaaaaccacacaaacaattcacaaagtgatgctttttgcttatgataatcacacttctaattcgaattcgagcttaacatacatgaaaccacatataatcaatcagtcacgttacctagagggaagagcagattgaggcacgaaaggagtataagtggtttctctttcagcagcagtttgttgagctttctgaaactcttttaaaacagcttgaaagtcccttgcaagcttagcatctgcaatcttcttacttggctacacaattacacaacaatcaaacacacaacaaagagtcgcttaaaaaccaaacaagaagaaaaagattccactttacattgacaccgctttgatgatcagtttcactagcttctttaagtttagctgaagtatccttcacaagctgtccaatatgcaaccttgtcttgtgcctatcacaacaaaatccgaataataatttctaaattcagaatccacaaaaaaaaaaaagcaatcaaaattgaaatcaaaaattcaattttttttatcaaatgaaatttagatttcaatttcaacatacagcttctcccggagctccggtgtatctttgggagtaccaagtgtgttaacgagtcgctgaaacgtggagactccggtattgatctggaatattccagaagcaacggcttgtgtcgaatcttgtcgaccaccattgaatttcctcgttgatcttcctcttcctgattctaaatcttgaaaactcatcttcttcgcgaaacctctttttttcctggaaaaattggatctacaaaaagattgagaaattggttatcggagttttctctaatctctgagaaaaaaaaaacgaaggtcaaggcgtggatcgtggagacagatagacgaagattgaaaagcgttttcgaaaaaatcccaaactgattttaattgagaagaaaaagctgagataaagttgtttcctttttgatccttttatttctatatatttagtaacctctcctcgtttctgtttttcttgccaaattaaacaattggtttggtttattgagattttggtttgggtcagtttgtttttatttttgatttgattcagttttagttaataaacaataatttttagttagtttatatattaatatgattatattttttctcaatatgtgtaaatagttaaaatgtaaagttttaataaaacatttatttggtttggtttagttcagatacaatcaaatcagtttatataagattccactacggtttaaacagttcaatttggttcggtgcccttagtttaactattttaggtgaaagtttaataatgaaaagtaggtctgggcacgaagcgaatattcggaaaaattgtgatatttgttattcgattcgttttaaccgaatacttgattttatgatttgctttgattcgaaactttccggatatccggaatttcgaatatccggatttttttgtgatatttgcggatatccgctttgatacgtataaatattttaaaaaaatatataaactatataaccatatcagatattcaaagtttttatttaacatgctttcaaaataagttctaaataccaaatataacctttgttgttatcaccggtcaacaaaaatgttatcaaactaattccaaaaactaaaactcgatagtttttgatgtcattgatcaaaacataacataaaaaaaaatatcaaacaaacatcttaacataaaaacataaggtagcaacaatacacaaactatttatgatatctatatatagatataactatatattctaatatatatcaaaagatacggatcgaagcggatatttgattttttaaaaaacaatatttgctatttgattcggtttttacgaatactacattttcctatttgctttggtccaaaatcttacggaaattcggatttttcgaatcaaatcaaatcgaataccgaatcgaagcggatcgatcgaatattttgcccagccctaatggaaagtgttaatgtaattactttatcagcatttttttcgcaagatttccaatgatgaggttattaaactttactacatgtgaaaagcagaaacggttttggacacgtggacgacagatagtggttgataatgtgattatgtcacgtcttttgttttgttttaaacgtaagtactatatgattaaaatttaattagaatctttcccgacaaagaaatagctaagcacgacctttttcttccttgaagtcgccggcgagacaaaaaaaaaaaaacataatcccgacggttacacgtaccggagaattgtatttaaattgaatccgctttgtattttcctcacagccaaagatttttccttactaggattttcattttctcttctgttttcgtttcaaattcagaaaatcttccgtttcaatccggtttatatcggtttttagcaatgtcggtgagtactccttcatatccgattaatcgttctcgtctcgtatttgtagaatttcgatcaccagctgcgattagatatgttgaaattggcgtttagaatcactaattttgggttttaccttcttatggattacttgtttgataaatgtgattagtatttatctaattagttaaaactttgtgaatttatttttggacacagcttcttatatgtataacttttaagttaatcagaacttaaccaattcgttaactttaggagtaaggggtttaacacttttgtgctctctgttttcaaattcatgtcagtctgaacattgttaatgacacaactggtaactgttaatagacgtctgaacgtttttcttcattgcagatggtaactgtcaaagttagcaacgtttctcttgaagcaacagaaagagatctcaaggagttcttctctttttccggcgatattgcttacctcgagactcaaaggtcagttttttcgacttacattttcatctgaattatgttcttaccgattcctaaaactttccgagttggtttctacagcgagaatgatggttctaaattagcatatgtcacattcaaggatttacaaggagctgaaaccgcagttctcctcaccgtacgtaaattcactttttcttaaccttaattcaatgagtcatattgcaatgctttgttttaatgtctattttgtttcagggatcgacgattgttgattcatcggtcacagttacaatgtcaccagattaccaactacctcctgatgctttagcttccattgtaagctccttataaaccatttctttaacctcaaaactctctttaagaatcactgtgtgtaatcataacattttgtctccttaggaatcattgaaagagagcaataaatcatcatctcctacgcgagaagatgtatcggtatttagaaaagctgaagatgttgtaagtggtatgatttcaaaagggtttgttttaggtaaagacgctatagctaaagcgaagagtcttgatgagaagcatcagttgacatcaacagcttcagctagagttacatctttcgacaaaagaatcggattcacggagaaaatcaacaccgggactacagttgtgagcgaaaaagttaaagaagttgatcagaagtttcaagtcacagagaaaacaaaatcagcaatagctgctgctgagcagacagtgagcaatgctggttctgctataatgaaaaaccggtatgttttaaccggtgccacgtgggttacgggtgcgtttaacagagtgagtaaagctgctgaagaagttggacaaaaggcgaaagagaaagttggtttggctgaggaagaagaagaagagaagaagaaagtggttgatgaagttgctatagttcatctgactgaatcaccaaaggctttagaccaatcagaacaagattcaaaactccctgaatcaaaatcacagccacacaaggagcttaacgcaagtgttgtttgagctcaaccttgagatacgtataaggaactttctccaaacgttttttggaacaatgaagctgactctttaggacagggcttatatgttccaaatacattgtattgaaaatcttcttttgttgttgttgttatttatgtcttctttcttcttgttgtttctcccttacacaaatttggaagaatgtttaaactgaatctctatttttgaacatttcctcttctttggataatatttcagttttgatgacaaatattttgaaatgaaaacaacagaagattttatgaaaatttaattattctgcttaaaatactcaaaacctacgagattttgattggtacctagtataattgtagaccaacaattcaacatgatgtgatcaattatatatatataataaaaaaaaatcatgatttatgtttagctattttgtatgatattgtaagtttttatttatttaaagatattgtcagtttattgacttaactttaaaagaaatttatgaattaagttatcctttgattttttgcagtttgatcaagtttactgagtcatttctcaactttattagatgttcagaaaccagaatgcaaatcaacctaaaattaatattccaaattccaaaagctagataaagatgacaagatgatgcggataagtgaaaacgattcgtggaaaactacaaagaaataaatttcgttaactaatggtatattactgattccaacgttgactgtaaattagattctgtatattcgaattacaaagtttatccacaagatgacaaaagaaaaagtttccactatgattatattcgaatgtctttatgtctaaacgccatcttatgaataaattacagtcagtttgacacatacacacaccaaaaaaaagaataataaattatagatgtggtggttataaagataaattcaacaaagttgaccaacaaaagaagaaaagaacaaatattcttcaaccaaaaataaataactttccatgaaatcatcttgaattttgtattataaattagtgaaccatctttgattcacctagtaactcaaaacaaacttgtggtgtaacgtttcacaaaacaaggagaaaaagaaaagaaaaatgaagacctcagctttcttcatcgctgtattgctcattctatcatgtaagtaatctcaaatcaatatttttttataacaagtttcaatttaaacatgcatgtgcacgtatatatatttgatagatgttacatatatatgatatttgaataggctcatcatcaatgataatgggagttagctatcatgagaaccgttgccatgactgggtagattgtgctatatggtgcaaacaatgggttcctcaaccaaaatgtattaaccgtgtttgcgattgtaagccaaaatctcttccgaccaacgacgagattcccaaatcggcttcttccagttcgaagaactaaaatatgattatgactctatgtatccatgagatatattatctagttcatcaataaagttatagttcttatgtgagtatgctaatgaatgatagaaacagcgatgacgttgtggtgaatttgttcttattttctttttgctaagtcgttggtaacttgcgagaaaattaattatactgactagatgagtacccgcattacgtgcgggtttatgtataactatttacaaattgttttatataatgtctgttcatataaaataaagttgaatgcatcggttttgaaacataaatatgatttgtaactgtttttgaaaagtctaactatattagttcatctgaaaaacgaatgtgtttgagttgttttttattgttttttttttccaaccacacattaattaaaaagtaatatctccatgatcggttacccaattaggaggaatagagtatacaaaagtaatttcagaaattaaaattttattgttgttttagattctcaattttttttttaattttatatatccttgtttttttggttatatgtttagattgtgagagggtgaaattttagaaaattttcttcttacgctaaaaatataacatgtctttattaaccatgtctctgcatattcaatctaaacatatttaacttgatgttcttggaaagtttagttaagttcttgtcataatcttatatcttacgtattagttataaggataactcctcaaagatcttttaaattacttgttttcttagcataaatctcaaaaagcttagatatatttaatctgcatattcatttagtttctttcataataatcgtctaatttttaggatttcataataatcgtctaatttttaggcaaagaatatgtgtagcatgtttggattttatgatcattttagccacttaagtggatctcaaaatgaaagaggatatattaaattaaaaaatatagaaagagagatggttcaagttctgattaattatatcctcctatttaaattgtatgttgaattaattactatttatatattatttattttatgaaatctaggtggcaagctctcatgtgctgatgtgtcaaattgtgggagagagttagccttctttcatatatatgattactgcacatagttgttacctagtgatattttttttattttttaaaaaactttaaatttccgttacccagtgatattttaaagatggtttgtataaatggttggtaattattaacgaaactagcgatgattgatatattcaatggttttatgaaacatgttttcaatatatgatatcggtatttcagtgacgaattgggctttcacaaatctgttgctaatccaatatcacattttcgtcgatttgtaatatgatcacgaatacatcgctaaaagtcatcactaggccatcccataatttgtacaaatctttgtaaataggtaaagggtggaaatgggagaaatatctcaacaacataaaatccttacaaattctttatgaatctataacgaaaaataaatttacaaatgtctttcaacaatgatatataaggatatcgacaatcgatacacatgcacaaagattcaaagagtggtgacgaagaaatttaaagatctatttcaagaactcatgtatcgcatcacgaaccaaccattgattcatgacacagttaaatttgtatgcccatgtacatgaatttaaagttatcaaaactattttgagacatatatatatagcatacggtattaacacaataattcatatttgatttttttatataaagaattttattataaatgtaggatagtagtagtactccaattattattaacatatatgtgagtcagagaatgttttccaccaatatatatatgagttcttttcatcaatttagctttggtcagagaatatgtttcaaccaacggatacttttgcatttcatgaaacaaacaacaatacattctagtgaactactacccaagaaaccaacgtagatgtcaatattttataagatatttgaacactgcaaacacctaactattttcaattctttgacttcatagaaagattcagccaatctagtacatataaatcatcaaaggtaatatgtttcaaaagagaaaaatttgataatataaaatatattaacaattatttaatatgtacacagtccgtataatttcatgtaaactctctatgattatatcacaatcataaaataataaaatataattaagtgggtgattggttcagttgtatttgtaaaattggggatgcatagatatattaaatatagcagtagattttattgttatatatttttagatgtaaaaatttaatttggtctttcagttttatttttttggtaggagtcttttaatttttgtttaaagtatgtaagaaaaaacatttacatatatcccatcctgtcaacccttaaggttaaatctaagtcttgaatgcatgcatatatttcaatgggttattacttatataattcaaaatgtgatttttttatcggcatcacattaaaaatgcagtctatgattataaataatagaggatatgaaatcaaaacatcttagtaacaaaaacctttgtatgcctagtgatctcattagtattcttagaaaagaaagagaatatatcctactatataagtcatttggatttttcattaaaacccatgtaatcatacaaattatcttcatatactcacacactaaatacaaaagagagagagagagagaaagagagatgaaatcaaacaaagcaaccttcttcttgggcttgttgcttgtatatgctttttgtaagttcttcgctcgtatacaaatatatgatttgttcattatacatatgtcaatatactgaaattgttttcctttttaattattttgtttggataccttttttttaaggtataatgttgatagagagtaggtgttacacaaacgacgattgcaaagacgggcaaccatgtccagtgcctcttgcttgtctatttggcagctgcatttgtccatggaaaagtcaatcaaaattaccaatttgtcaaatcatatgtgcgaatttggattaaaaaaactgtaaattcttatgatccttgtggttgcaactataagtaaaataaaaatataataaaataaaaataatataattatttaaaatattattctcatttcttttttaaatctcatggatattctcagttaaaaatattaaattctgattatttttttttgtaacatctacactcaaattagtttttattgaaattagataacggtttaaatatttcaatttggttcaatacccttatatgtttccggttagagtttttttgtcctcacctttttaactaattttaatgttacggtcttatgggaaggtcataatttaactatttataaatgatggggtgaaagtttaataatgagaatgttaatttctttatcagcatttctcacaagaatgatgaggttactatgtaacggtttcggacacgtggacgacagatagtggtggaaaaagtgattatgtcacgtctttgataccaaaaaaacgtaaagtatagaattactttaatcataatctttcccgacaaagaaatagctctaagcacgacctttttctcccttgaagtcgccgtctagaccaaaacaaacaaacaaaaaaacaatcccgacggttacacgtaccggagagttgtatttaaattgaatccggtttttattttcctcgcatccaaaaacatttacttatctggatttttttttgttatcttctgttttcgtttcaaattgtaaagagaaaaacttccgttacatacatgcaatgtcggtgagttttcattcatacccaattcttcgttctcgtctcgaatttgtagaatttcgatcacctgttgcgaaaatatatgttgaaattaaaccatgaagatcttagctttcttcattttcgtgttgctaattttttcatgtaaataatctcaaattaatcttatttctataaaatttcgatgaaacatgcatgtgaaggtatatatatatgaataggttcatcatcaatgataatgggagttcactatcatgagtaccgttgccatgactgggtagattgtgctatatggtgcaaacaatgggttcctcaaccaaaatgtattaaccgtgtttgcgattgtaagccaaaatctcttccgaccaacgaggaggttcctcaatcagcttattcttccaattcgaattactaaaatatgattatgattctatgtatctatgagatattctcgagttaaacttcaatatgaaaaggtattataatgacgtccatcaataaagttatatgtagttcttatgtgaataagccaatgaatgatggaacaatgatgacgttgtgatgattttttttcttttctttttgatatgtagttggtaacttgcgagaaaaaaaataaattatctgcacatcgtcgttacgtacctagcgatagttcaaagacccaatgagtggtgacgaagaaatttaaagatatattgcaataattaatgtattgtatcacgaatcaaccattgattatttattgacacatttacatatatgtacctgaattcaaaattttagtttagtcaaaattattttgagacatatatatatatatactgagcataaggtttaaagtttaaacacaagaatccatatttgattttcgtatataaagaattttattataaatattgattagtagtagtattctagttgtgaacatatgactactttggtttggagaatatgtttgaagacatgataacttctgcatgtcatgaaacaatatcattttgtgaactactatccaagaaccaacgtagatgccaaaattttaaccacgatgcggtgagttagtggttctagtctggtggtgtaggtcaatgaacaattctctctagacgcagaactgttcagctttacctctttgaccacatggatataggctcattgcttatggtccatttaaaaatttgggaaaccgtacctggagatagcctaactaatttagtatacatatatataatttatagtaaaaaaaattcaaaagagaaaatttaaataatacaaaatctattaatatgtacttagttcatatataatttcatgtaaactttctatgattatatcacaatcataaaccaatcaaatataagtaagtgggtgattggttcggttaattttggatgtagatgtgttggatgtacatgtacccgtagatcttattgctataaatatttggttgtaaaattataatttggtcttttgaaagttttttggtatgtagaaaatatttacgtatatcccaaccaatcaacccttaaaagttaaaatctaattcttgaatgcatgtatattaattggtaattacttatattactcaaattacttatataagacatttttttattggcaacacactaaaaatgcaatctatgataaaagaggatatgaaatcaaaacagtttaataacaaaaaccttttgtatgcctagtgatctaattagtattcttagaaaagaatgagactatatcctagtatataagtcatatggatttttcatttaaaacccatgtaatacaaattaccttcatatgtttttttaattggcaatacactaaaaatgcaatctatgataatgaataatagaggatatgaaatcaaaacaattttataagaaaaacatttgtatgcctagtgatctaattaatatttttagattcgaatgtgtgtaaagtgtgtaaaggaggaacaaagtctatcattcatattcttcgggactgcccgaccatagctagagtgtggaatagattaatccctgtgaggaagagacatgcgttcttctctaagtccctataagaatgaatgtatgagaatttaaccgagggagggatgattgatgagattccatggtctacactgtttactatgacagtctggtgaggatggaagtggagatgtggtaatgtttttggggaggataaaaaatatcgagacagactatggttcatcagagatttggctaaagaggtatcgttggctatttctgcgagtgaagaaccatgctctaagaggtctcatgtggaaaacatggtaggctgggagcctccacatgttggatggatgaagttgaatacagatagtgcttctcatggcaaccctgggcctaccatggcgggtggggttctacaagacagcaagggaagatggtgtgatggtttcgatgttcatataggtagatgttcggctcctttggcagaactatggggtgtatactatggtctatttgttgcctaggagtatagagtgtcacatgtaatgttggaggtggactcggaattggtaggtggttttcttaagacaaggactgatgattcacatatgatgtcctcctggtacgcttgtgtcatgactttattggaaaggactggtcagtccgtatttctcacgtgtatagggaagttaatcgtctcgtagatagattgagtaactatatatttttatttgtctttaggttttcattcttttagttttcttcctactactttagatttgattttgagggagaatatatacacccgagacaaattcttatgtagtttctgttagttttactttaataaattctgggagacattgtttctctgtcacccaccaaaaaaaagaaaaaaaaagaaaaaatctatactactatataagttctatggattttttcatttaaaacccatgtaatacaaattaccttcatatgttttttattggcaatacactaaaaatgcaatctatgatgataaagaatagaggatatgacatcaaaacattttaataacaaaaacctttgtatgcctagtgatctgattagtattcttagaaaagaaagagaaatatatcctactatataagtcatatggatttttcatttcaaatccatgtaatatttattaccttcatatgtttttttgtattggcaacacactaaaatgcaatctatgataatggataataaaggatatgaaatcaaaacattttaataacaaaaacctttgtatgcctagtaatctatttagtattcttagaaaagaaagagaaatatatcctactatataagtcatatgaatttttcatttcaaatccatataatacaaattaccttcataaatatattcttttgtattggcaacacactaaaattgcaatctatgataatggataatagatggtatgaaatcaaaatattttaataacaaaaacctttgtatgcctagtgatctgattagtattcttagaaaagaaagagaaatatatcctactatataagtcatgtggatttttcatttaaaatccatgtgatacaaattaatttcatactcacagacacaaaaatcaaggagagagagagagatgaaatcaaacaaagtaacatttttcttgggcttgttccttgtatctgccttttgtaagttcttcgctcgtatacaaatatatgatttgttcattatacatatgttaatatatactaaaatttgtttaccttttaaattattttgtttggatacttattttgaaggtgttaggttgacagagaatatgtgtttcaaagacgacgattgcataaaccagggggaatggtgtccagtgcttcgtgtttgttcatatgcagaatgcatttgtccatggggaactcgatcaaagttaccaagttgtcaaatcatatgtgcgcatttagataaaaaatctgtcaattcttataatccttgtggttgcaactataagtgaaataaaaaaaaatataataacaagaaaatgattcattaaattaaaagtttattttcgtgtctttttaaaaatttcatggacataaattttccttaatcttaatattttaaagtcagactattatattctaacgtttaaaatataagtacaaaatgggaaaaacggtctatttccccacgagaagtatcacatcatgccagatagaacacaaactttgacctcagtctatatatctatgaattgatagttatactcttatttccccctgaaaggaaagtttcatagctatatgtccccgaataaatagttcaagatccataaccccacggaactgggtttagtcggtttactctatatcttaccgattgataaaccaactaaacctaattataaccagacttaaccgtaattcagccgtttttaacccgatttcagttctataaccccataaaaaattcccaaattgaaaatattaaaaccccccaaaatcgacgaaccctagagagaaaagagatttggtggataatatgtcgttgatgttctgtaatggttagattgagtttggaaatgttgggttgcgaattgtttttatcgaacaaattgaagtatgagtggtggggttccttttcagccatggtgtgagaaagaagaagacgattttcaatatccaaaaaacacattaatacccactaaattgttacaggaaagaagagaagtgacgacttgttgcaggaaaaatgagtggtgatgtggcaaaactctcacgtgacaaaaaatcttgtgttttccttttttctaaatgctttccttttactataatggcaattgttgttagcttctcattcattcatgaacacgttaagagttttatctctcttttctcaattctgtgaaacttggtttttatatcaataatttgctagagctatttcttctttcaagctctttcgattgatatctgaattgttacttgcataaaacaatacacagttttataaagaagagacaaacgtcttaaaaaaaagtcgagcttactgtcacataagcatcatcaccaccattgaagcaaaaaacaaagcttggaaacagagaatttcacaatgattgaaacagagatatctaacactacccatcggatgaattgagtgcgtgtgtatgtccatgagtttatttatgattttcacgtaaatatatgggtggaattaacatgttttgtcttgttctctttggggattttgaattttagggtttaaacgcatattgggtcgggttcaataagcaatcagtttttttttggtttagttactatcaatagatggtttggtctcgggtttatgcatcaaaccgactaaatccagatttggggacatttagctatggaactttcgtttcaaggggaaataggaatataactatcatttcatggatatatacactgaggttaaagtttgagctctatctggcatgatatgatacttctcgtggagaaatagaccgtttaggcatagtaaacatttcttacaaagttagtgttttttctcaacaatactccattttgataagctatatggatgagattttccggtaagaagaaccaaacatagaccaatgaactttcatagatgtttccaaaggttgctttttctataaatagtcgaaacacctatacatattgaaacatcaaaaaattactactagagaataaaaaacggatctagagagtagagatcctaaggatagtgggttctaccgagggagtagaccacttaatatggcataaacttaacgatgacagaatgtcatccaccttgagatacattgtctcacgaaacgtataagatttcgtgtggttttgaagttccaaacttttggctaaagtgtcaaaacacttgtacctaaaacaggtggtcgcaaaaaacaggtggttgcaagtaggcagagaaaaatatctcgcgatccattagccgtagtcgagtcttttgtggaaaaactggtatcacaaatcttgaaaccgaaatccttaaagaaagcaaaggattcgagaatcatcgacgcccaactaaagtaaccttgaaactggattcattacctcaaatttccataaagaaaagacttctcaaaccttagcttaagggtttcttggataaggtcaattcatcatactaccattcttaaacatggtatagagcaaaagaaacgataaatttgaacaacggtttccgctccgatttccacggttcctagtgatcttggtgagatcaactttcaaaacaacatgcatcatcgcggaaaaagtccatataaattattttaactaataaaattgtacttgttctttttatttttctccccaaaaaattatgaatttttaggttatacttcccacggacggagatcaaagggagttagattagcttcctccctaatagcacaacttttgaatatgagattttaagatgcattctttttgtaaaatttcctataccgataaagttacataagtgtacttttagtaatacaattttattttcttgtatttatgtttgaggaaaaaaatcaaaaaatatgtagggatggacaatcagattgtaatgcctaaattatataagctttgaagtgactctaattttttttggatgtagtcactagtcacagtagacgtcacagacttacaatttttcttttccactattgtcggaatggaaattgtacaacacaacgacaagacaatcaaaagaatatggtaatatcggtgaaaccaaaaaaaaaagatgtttcttataattgtgatgtggaatggttaatttctggaagtcacatgtaatatatttcaacttatgccaggttataattgtgctgtggaatcgttaatttttgttttttggcgaatttggttatttaattggcttggctatctactcctctgccataaaatatctaagagaagtgttgagtgtcctcagttcaatgtttctccaaacacatcctcgtttttgttacggtaaaggctggaggttactctcttttctgatgaaatttggatacctatatcccatgcttgtgtaattatggttttagaaatctgtttggctaagcatgattttcgatgtagctacccaactgctagatcgatggtagtacatatagatccctatggctgtactgaaaagaggttttgggtgatgcccttctctgccccaagcttgtcttaccttgtggagagtttagttttcaatttcctctttgatcaaagagagactttcatgggttgtgtccctctggtgcaaggtggacctttattgagactactctgcctttcctcttccttggcatggctacatgtggtaatcaagacgataactcctttaatttggtgtttaacattaattaggcgtcaggacacgtcaatgcagtggctcttactgatcttcatcttgaccattaacctttcccggtgcttggttaaccctttcctggtgcttggagaagtacatacccgtttggatacttttctgtagttttgatacattttcctcctctgatctgaaaaattctgaaatgcctataaaattttggagactatattgtcacctttgttgtcaatccaaagttgagccactttctccccaaagaagtatctcgaacaaagagacgaagcattaaaattaaaacaataagcaaaacaaaacaaacaaaacattttattcaataaattttattcgatataaatttaaagtacataaataatataatgataggtttcaaaagaaaaaaaaagaaaaaaatgctatgtaagaaaaaatctaatatttatcaattcaataatgtattaaatattttgtttttgtttttaaatgtccaaactttttttataaattgattcaatttttttaattaaaatgactaagtgatatgtgtaaatactaaacaaaaaaaaatctaatagctattaatggtgtatcaaataaattattattacttttaaatctcaaatacttgttatgaagtggattaatttctttattaaagtgaaagagatagaattataggttttaaaataacaacaattgtttcttttcttttttttttttttggacaaaaaacaacaattgtttcttaagaaaagaaaaaaatgtaatatagacaaaggtatatgaaactttttcttacattttttttttaaaatgtccaacacaacttctttttcttaatgaagaacagattttgtttttctttggcaaacaaaataatgcaacacttgtgacaaaacagaataaaattgcagtgtaacgcaaacacgcggttaacgcgtggtgaataaaagtttgacttataagagtaaaaaagctttgacttatggaggggtcgcttgtttcgagggtaacgtacggactcccactaatattactccacgtggcaagacggtggaagttgacggaagagttagacgagcgttatttttcatacgttagacgccgttaattatcgccgttaaaactaaaaagtctgccgtttacccttctggtccggtaagtatttaatgagaaatttactcctccatttattgcgaaaggaaagaaaaaaaaaaacttagagagaagctcccaaaaaaaaaaaactcttagagattagagagagaatcaattcttgtgtttttttttctttctctctgaagctaaacaaggtaaagaaagtgagagaaaacaagagaaagtgaaagaaaatctctatatttttctagaaaaaatatcactagaaacagtgccattatctggtttgtgttgcgttcttttttatgttttgaaaaacttagacaaaccctaattttttttatatttttgtcatgagcgttttctttgaatattgtctccttaatccatatatattctcatgaattctcagatagtgtgtctttatatattttttattagttggacctgtttttcttaaatattttgaaaagatttcatgagcaataaatgtatttttatcaccagttacgtttttgtgtattaaatttaaaatattttctgaacaatgaaccgatctagctgtcgtctctggtaattaaatcgtttctttcatgctttgctcctctcatttttttttatgataaatgagattaaattcaattttcaagatttcagaaaatatttcttcatttccatgcacagattccttctgttgaatctttacttcttcaagatttcaaaataaaaccctaaactga

SEQ ID NO: 847 - DNA, 85661 bp, Arabidopsis thaliana
gatctttgttttcattaggtttttttaaatcttccaagtgatgttgacaatgggagaaggtaatgtgatgacttcaaacaacagatttgcttcgccgccgcagcagccgtcttcttcttctccgggaacaatccaaaaccctaatttcaatttcatacctttcaactcatattcatccattatcccggtttgttcctttttaaaactttcaaacatttatctcaaatccctctctctcttttcttattcttgaaatttttaaaatctttcatttacttttttttttttggttttggatcattttctagaaggaagagcatgggatgatgagtatgatgatgatgatgggagatggaacagtagaggaaatgatggaaaacgggtcggcgggtgggtcattcgggtcaggtagtgaacaagcagaagatccaaagtttggaaacgaatctgatgtcaatgagcttcatgacgatgaacaacctcctccggctaagaagaaacgttatcacagacacactaatcgtcagatccaagaaatggaagcgtatgtttttgccattattttcagtatatgttatattttattttaaccacactcggatgtgtttaatctggttttaagttcatcctcataagtttttggattttttggtttataaaatatattaactaaatttaacttgaaacggctaggtttagcatagttttggtttaggaatggatttttttatcttgattttaaggttagatactaattctatatttaaagaaattagaacaacaacaacaaaaagtgaaaattttctcttatctggttgcggtattttaagattaaaaaggcaaaataaaatttgatttggtttttctttgaatgtctttttgtttgttttaccaaactgaacactactttatacgttttatgtaaatctagatctcatgattggaattaaacttttgataaaattaaatctttgtaggttgtttaaagaaaaccctcatccagacgacaaacaaagaaagagattaagtgctgaacttggtcttaagcctcgacaagtcaagttttggttccaaaataggcgtacccaaatgaaggtaagctacaaattcactctatcacttcaatttgaacaattattagattatataatcttgatttctaaagtctcatctcaaattaaaatatatttcttatgaaagtttccacttatgacaatgaaatctccaatgttagtacgttcatataaaagattaaaagtattttcgacaatctaattaattactttcgtgagttgaatcaataggcacaacaagacagaaatgagaatgtgatgttaagggcagagaacgataatcttaagtcggagaattgtcatcttcaggcggagctacggtgcctctcttgtccttcttgcggcggccccaccgtccttggcgacattcctttcaacgagatccacattgagaactgtcgcctccgtgaagaggtacaccatttgcatttaacatttatgtttaaagaatcatttcttccaaattacatttatgtttcattgggtttgctatgttttgggaaaatatatcaaagaattatttataaaaatgacatttcgtattgccaaaagaaactaatcatttggtgttaatttatgtaatttggaacattggtgaaaatgcccatccctaatacattgattgttgattccacagcttgatcgtctgtgctgcattgcctcgagatacactggccgtccgatgcaatctatgccaccatctcagccattgatcaatccttctccgatgcttccacatcatcaaccttcattggagctagacatgagtgtatacgctgggaactttccagaacaatcttgtacagacatgatgatgcttcctccacaagatacagcttgtttcttcccagatcaaactgccaacaataacaacaacaacaacatgttacttgcggatgaagaaaaggttatcgctatggaattcgctgtctcttgtgttcaagaacttactaaaatgtgtgacacagaagagcctttgtggattaagaagaaatcagacaagattggcggcgaaattttgtgtcttaacgaggaagagtacatgaggttgttcccatggccgatggagaatcaaaacaacaaaggagattttcttagagaagcttcaaaggcgaatgcagtcgttatcatgaacagcataacactagttgacgcctttctaaacgctgtaagtagtaaacgttcaatagatgcctctgattggattgctttgattatcgattaatttcgcgcttttgatttgaaggataaatggtcagagatgttctgttcaatcgtggctagggcgaaaactgttcagataatttcatcaggagtttctggagctagtggttctctccttctggtaatttagtaattgatttgatttaagaaggaacaaatgcaatagcttcttgctaatggtatctatgtttgttatgttttacaagatgtttgcagagttacaggtactatctcctctggttccaactagagaagcttattttcttcggtatgtggaacaaaacgcagaaaccggaaattgggcaatcgtggatttcccgatcgatagcttccatgaccaaatgcagccaatgaatactattactcatgagtataagagaaaaccttcaggctgcatcattcaggacatgcctaatggatactcacaagtcaagtgggtggagcatgttgaagtagacgagaaacatgtgcacgagacttttgctgagtatgtgaaaagcggaatggcttttggagctaaccgttggctcgacgtgttgcagagacaatgcgagaggatcgctagtctaatggctagaaacataactgatcttggaggttagtagtctaaatcatccctaaattcttattaaaaccctaaactctttaaatctctgtttctctttgcagtaatttcatctgcagaagcaaggaggaacataatgaggttatcacagagacttgtgaaaacattctgtgtgaatataagcactgcatatggacagtcttggaccgctttgtctgagacaactaaggacaccgtgaggatcacgacaaggaaaatgtgtgaacctggtcagccaacaggagttgttctttgtgctgtctcaaccacttggcttccattttctcaccatcaagtctttgatcttatccgtgatcaacatcaccaatctctggtaaacaaaaactagagtcttctctctgttcttgatgccaaaaccctaagatttttcgattttttccctgcagctagaggttttgttcaatggtaattcacctcatgaagttgctcatatcgcaaatggttcacatcctggaaattgcatctctcttcttcgaatcaatgtaagtttcaaaccttcattaaaaccctaattcaaagatttcaattttttccgaataaattagggtttttgcaggtcgcaagcaactcatggcataatgttgagctgatgcttcaagaaagctgcattgataactccggtagcttaatcgtctactccaccgtcgacgttgactcaattcagcaggcgatgaacggtgaagattcttccaatattccgattttacccctcggattctccattgtccccgtgaatcctcccgagggtatttccgtcaattcgcattctccgccgtcgtgtcttctcaccgtcgggattcaggtcttggcgagtaacgtcccaacagcgaaaccaaatctctccaccgtcaccaccatcaataaccatctctgcgccaccgttaatcagatcacttctgccctcagcaacaccattacgccggtgattgcatcttccgctgacgtgtccaatcaagaagtcagctagttgaccgaattacccctaaacctccttttgctttttctatctcagagtcagagcagtcccatgtcaggggcaaaatagtaaatggaaaagagggaggttcataggtaattcgtttatggcttttaggttgaggtttggtaaataacgtagcatctaaatggataagccttttaggttattttcggtttattatggtaagggtaaaatgagaaactagtttatgttttttttgttgctgcttttgtgagggagggtcataatggtaattagaggaagtcaagagcgcaccaggttggtaagttgaccttttggttttctgaaccggattatcggtcttaaaccgattttcggtttgacagaaaagcgtagctggttcgggtattgactttctacttggtttgactcctttgaaatgttttggcttatttgcaattaatatgctaccttctttatgcttttggctttttgtatttattactttggtcttgcccttaaattaattctatataaaatatcgaaatgggacgattaatattaccatttttagctaaagataatgtttctcgtggggtttgaatatctgctggttgagtctcatttaaagattagtatcatgcacattagaattaacatatgttaaaatgctaatatctggcgattgcgacagactttattttaattgttatatcattattgcgatacaatgattaagttcgtgccaaaaaagtatttaattagacaaagattcctaggtttggaattatcttcatgttacttgtgtcaaatttaagttccaatgtatcatgcatatagcataaattcttttggttgtcccaaaaaaaacataaattcttttaaacacaagataattcagaaaaaaataagagaatatgattcttttttatttcgaaaaaggaaacactttatttcattgatatatgaaacatataacaaattacaacaatagataaagatatcatcaaacgcggaatttgaaaaacaagaatgaaatatggtatatagaacctcaatttaaaatgtgtaatctctaggcacatttgaaaccagatggaaccttcttaccacaatggtttaggacaacgttcaaagaaatgggaacattaaggttgataccaagaacattagcctttagggcagtgcaaagacagaccgcggcttcaagatcaactagacctttgataagagcgcaacagttggacgttggtggtagagaaaccttaaccacatccaacacgttagcacataccttaagtttaagagcgtctttacaagtgggtttaagagatggcgttgcgggcttcttgtggtagctcttgggcggtggtggtggacaagggaccgaagtcgagctgacgaaagtgaagaagatgacattgaagacgaggagaagggcaaccttagaataagccattgatgaagaagtaaagtttcagttagagtatttcttataataggtacaagaaaaccctaaaaactctctctttatcaagcttttgatgtgttgtgtgaagaatatgaagatagtgatagggtttttataggtgaagagtgagattggtttatgtgtttttaattacaaatcgacgagtggcaacgaaatgacaaaatttcaatgtactgttcatgtgagggattattttttaaatattatgtattatgatgaattggttgatcttacaaactgtcaagatattggatcgttgcatgtaacatgcaaaagtcattatgagtggttataaatatccctaaatataaataaataagccttatatctggatgatagagagctttgaactgatatatcttccaagaaagcagtgttgaattaaaccatattctaccataataaacttagaatattgtgttacattgaggttgataaatgttgagagatcaattttttttataagaaaaatattgtttttaaaattagtagccttgcttatgaatattttgtgtatacattatatattttttcctctttatctattatcgatcgaatcataacaattttgtggaaataattttattgtcttccaacatttggttagtcaactgaacatcactatattagatgttatatttccatgattaacaaaacttacaaaataacagtaagcacaaattaaacaattatgaatacaattcatcaaatctttgtattcataatagatatagtcagtcatataaatgaaaatatacttatatacatatataacctagtatttgtgtcaatgttatcgttgctagtcatcaaatgtgttcaaatccttagtgcacatattatttacaaaataaatatacacagataaatatatatacatacatacacagcaatattattttacaaaaaaaatatctcacaaatatatataaacctcgatatataaaattcatatatttgtgaaatatgaaatacggattgaccaatattagaataagccattgatgaagaagtaaagttgtaaagaattgtcttctaacttacagtgatacaaaaaaaaagaattgtgatctgtcttatagagataaaaaaaaaaaacctaaaaatctctgtttactatcatttatcaagcttgtgatctgttgtgtgaagaatggggatatgggtttagggtatttttgatgtgtgtttttaaattacaaaatgacaactaatgaatgaaataatgttcatgtgatgatgaattattattaaagtagaacgaaatcttacaaccagctgtcaagatttattgagttacatgcagtgcaacatgcaaaaaaaaaattaattgagtggacaaagataatgttataacttaatttaaactgtaaacaaattaagaacccattttgggattaataggagtactggaattcgatctttgttattttgttcctttgtggttatgcaaaacccatgatttggccattatataacaatttttatactattattaaggacactgaataatatatgaagtaatattagatattatataatttaggatgttataacaaaaacaaatacgaatcagggcaaaaagttacaaatcaggctaacggtgaaaatgttcagtgtaaatcgattaaagacttgatttatttaagcacaacagatagggttccagagttttgtgaaaacaacagttgtagttttaagcgttgttaaataatttacataactggtttagcggttgaaaataatgtcggtttgcttttatttttttggtccgtactacaacgaactctaatttatgatcattttttcgtctaacgttttgtcggtagatgactcttcgacaaaccatattattttttgtgccaataataactttgactcccaagttaccatggatcctttgttgattttttgtagctatcgttttgtagctgatgtttgtacttctttatgttatttatgctatattttcagccatattattcttatatttatgactattttgctccttattttgttttcatgaataaaacaagtctttgacacaaaaaatgtagtatttaaagaaattgttttcgaaaattacatcatatttgaagttacttgtccatcaaactttttttcttctttaccttaagatccatcttgtttagaaatttctcattagttatattttgcgcagtttcttttacagccattccgctcttttttatactgatttaacttgatttatttcaattttgtaattttttcaataagaaaactttagagattgaactccatcaaccttagatttcaaggaaaaactaacattagtagttaataatgagactttcttgtacatatattttggtttttttcttttcttaatgctttggccgtttataatgattttatatattatcgaaatgggacgactttataacacgtttagcttctccttcccccctctttatttttatttctcaaaatatcacttcagctatacatttcatgggatttaaattatttgcttcctaaagaatttgcatattttaatttgttaatatctgcctatcttggagacatcgacagactgccatatggttcgaataaaaacttaatcaaaaacagtcctaggttcggatttaattttatgtacttggtcaaatttaagttccatggtttgtttgatggtctggtataatgcatacaatacaacttaaatatcttctagacattatagcatatccaatccattattaagaagaagaaaaaaataaactgagaatattatttttgaacgatcaacaccttattccattgataacatgtaaacaaactacaacaatggataatgatagaatagattcaaacgaggaatgttaaaacaagaaacaaatgaagttataacataatatagaatctctatttaaaatgtgtaatctctaggcacatttcaaacaaagttgataagagaataagcaaaacactttttgatttatttcattgatgaagcataaaacaaattacaacaatataaagatatcatcaaacgaggaattttaaaaacaggaatgaaatgtgagatatagaaatctcaatttaaaatgtgtaatctctaggcacatttgaaaccagatggaaccttcttaccacaatggtttaggacaacgttcaaagaaatgggaacattaaggttgataccaagaacattagcctttagggcagtgcaaagacagaccgcggcttcaagatcaactagacctttgataagagcgcaacagttggacgttggtggcagagaaaccttaaccaaatccaacacgttagcacataccttaagtttaagagcgtctttacaagtgggtttaggagatggcgttgcgggtttcttgtggtggctcttgggcggtggtggtggacaagggactgaagtcgagctgactaaagtgaagaagatgacattgaagatgaggagaagagcaatcttagaataagccatggaggaggaagtaaaaagttataagagtttgttttagaagttataaagcttgaggtgtgttgtgtgaagaatgtggagatggtcttagggtttttatagggcaaagattgtgatattggtgttgtatgttttcattacaaactgacgagaggcaaccaaatgaattaaatattagatgaaataattcatgatgaatgattattattataattattatgtattgattgatcttacaacctgttaagaaacatcagtttgcacaacatgcaaaaaatattaattaagtggagaaagacaagcttatccctaacttaatttaaaccgtaagcaaataatgcatttttggactatacgtgtaatgcaattcgatttttgttcttttcttctttgtggtaatatgcaaagcccatgtgttcgtttggaacgtccatgtgatttgagtaacctgtgataacgtttattattttttgtgattaaagatatcggatgataaatctaaaagttgatactataatttacaaatggtggttacacaattaattcagtgtataccgatatgttaattgttaaatgtagttaacctttaatcaaaaaaaaagttcgatatgtattttcgaggaaataataaacaacactattaattatgagtactttgtattgaattacaataaattatttcgctaaactgaagttgcttatgatatatactccgcctgttttttcattttttatttatttatactactttgtgactataaacttgattattaatattttcgatttttaattaatttgattaggttataaagttttccataaaattattttgcctattttagaaggttgtggaatgttgtgatttgtgactatagctagtatatattatttaaaacatactttttagtttttattcaaaatactttatttatattgtgcgagacgaatttatgtgagacggttgaatttgtttgtcagtgaaaactgaaaacgatgatgttgttgggttgctgctaatgagtaatgattgttggttaagtgattcgaccgttgtggaccgaactcaacctaattaactcgatctatagtagtccttcggctaccgattgggaaagatccttcatgagacaaatgctttgtgactttaggtctccaatgtgtattatttttgttataggtgtattattgtatattaactaaactattcatgcgaactacaatatatcaattaactatattaactagtttcatttgcttttttgtgtgcctgcttttatgtatccagggcaagccaagcctgtctaataattgtagtagcgagtgggccagttaggcccaatatctgcaaattgatatattgttgtaaattttgggctctctcttaaatgccttttactacatacatattgaacatgatagaaaaaagtaataatacgacaaacatatcatcctaaatttgcgcattttatcatactgaaccatcaagattgacagattttttgaaaaaaagaaggcaaagattaaattttcttactcatttttctttttctctttatggtttgaggcgattgaaaaggtttggtttgtctttagcctaacaagtagagatatgtggccttccaagtgtcattggtcaatttctggccttggatgataagaattcatcataattttcttataaccgttttctcatatgatataaagacacgttagtaacattttgtctgttgattcaaagaccatggatttgatatttgtaataatgagttttgcttttgctaaaatgtgtgtgagttcagtgtttctgataattagcaacctaattagcatttatttgaaacttttaaaacaacaaatcttaatgtaaatatgtataacaaatgatatgacatgtcttattgtcttgtaaacaaaacactaggacatgattcccttttaagaaacgactaaaatatattaaaatcttgacgaaaaataacattaaacttcattagtttggtcagaaattttaacattaataaacggccgtcatgaacacagtgctattttcgtgacctctcgttctctgtattgtccaatattcaccatttatagtattaaattcttacttagattcaactttttgttttatttttcacattcttttgttggttagaaatagtgtgtaaacgcgggaaaagtgacggcagtttaacattaacattattcgacgtcggctgttctttcttttttttcacgtctaaacgtaaagcataagaatcgaatctacttgatggtttctatctaactacagtttacgaattttttaatagaactgagattctttttaaaaaaataagctgagaatcttaattcaaaatccatactgtttcttttcaaattttcccagtcgtaggaatcaatatatactacagctctataatatgacaaaatagaaagtaaatactactctaagttgcatcactttctcatttttttttttcgaatactaagaggtctgggccgaagtccgtaacttccccagatccgaaaccacaatatgtaatataagttttgtcataagcgtcatttgaaccggcgacctctaagtttcacctagaacctttaccaattgagctaacgacactttatttacatcactttctctcagttgtcattatactactttcagttaataatagactaatacttttcaatatagtttcgcaaatacttcatcaataaaaaaaagttacaaaatgataaacaaaacgtaaaaaatgcaaaaacaatacaaataagtgttctttcatattttctgtcatttcgtaaatttattttagtttattctatgtagtttacgtgtgtttctgtaactttaccagtcgaaatcactataaatcattgttaaatatagaaatggtcaaacactgatcagattttaaaacaacgtgatgaaaataaaatttggtcaaacaaatgtatttacgagaaaagtcggtcaactaaattagaaaaaagatacaatggtcattgtctctttaaattccgaaagcaacagacaaaaatgcggaaagatgcaaacacttgtaattaccatgttttgtttttattagtgagaagttagttagagtttttgacccgtaattaatttttattttgagtcagagatcaaagcacattcacattttaatgccatttattacaattacacactgtcgcgtgtatttcatctgaagttaaagtctagaataagttaaattggattgaatgattaaccattgtcagcatttaatttcttcaatactcttgtttttcttatgtaattttgactacctctctgactctctccattagtgtacacggaaaacaaaaattgtagtgatttgtgttttcttatttattgaagtaattgtacattagtatacacgtttagatagaatcttagagaggtcatgtttttatacttctggtgacttggtcgttatataaccattaacaacaacaaaaattggtcgtttgctaccactctgtctatgttgttggtccagttgtacatcttttcttagagatacaatatattacattcaatactaacgtaagttccatacttgcatgttattgtacatgttaaatatagggatattgttttctaaattatctaaaataatggcaaatggagtgattggtcaaatggttgacatgagagcagaatgtgcatgtctgagagcatataatccttgttagctgttaattaggatatttcttttgcttgaagacattattagtttcacgaccatcacattcgttaatatagcatataaacatgacacatggatacatcaataaacaaaacaaatctatgtatgatatataatagtttacggtccatctattggtcccattgactaattcacaacttatttgattcatattttatatatacatgtcacaacccatatcacaaaagattccagaaacacaaatatttttaattcttataaataatattatctaaattaccacttcctaactggataatgcatatctaataataatgatttctaaatggataatatatagttgcatacaaatatatattttcaagcactcttggcaggggaaataaataccagtatgtgcaagcttaattataccaaaatagtaggttattccttagtggattggtaaaactaaaacaacatgacatttattaacatatagctaggttagtccatatttaaccaaaaattcatagatgacaaaatatattagatttaaatattatgatgtgaacaagatatgtaatatattgatttgcaccagtttggtgagttatcatctaggttcaaactcgtataatacgaactttttgacccaaaaaaaaaaaactcgtataatacattttgatgaccaaagaaaataatctatatggcatataaaaatattttaggaaaatagtatgatagtatagacgtgtgatctctaaaacaaaagtgggataattaacaaagacttagaagagagtgacatacatttttatttttcaacattcaaatctatgatcttttcttttaaaaagggaataggagatttaagaaaatatagaaagaaggtcataaaagaaaattaaaatataactaaattatagtaaaatggacgtatctgttagaaaaatagacaaaatagtctttcatataatgtcaaatggaagttatgaaccaatggtttatataagaagagggatataaatgacacagaaataataaactagtaaaagaatggtttggacattattggatatgaacaagaagaacaaataaactaagagaaaataggcaaaaaaaaaacatcgaattttttgtctgtcattcaaataggtttaactacgacaacaagtgaatattttttgggtgggtctagtcgaatattctaaccactacatagattgggaaagctaaactaagaagcctaagaccaagcagaaccggttacagagtagctaaaccgcaaggactgaaaccggttaatgaagccgagccacattggtatggtacagctttcgttttcgctgacttcacaaaactaatcattatacctaactcatcacagtttatttatttataagaaaagagaaaccgaaattaagaatggaccaatggatttctgttgggataatggctttaaccgggaaccggaaaacccggtgagctcaccaccacccacagtaacagtaaccaagaaaaacaattgtcttcccaatgcacctgccacgtgtatagagacagtacagaagtgtcaccacgtttcgactttctgttgtttaaatgacttgaataccctccgttatgacactattttactgtttgaaggaaacgcaagattgatgaaacggcgttttaatgggttggcagcgtttggttgaaccacctaacaaccaccactttccttcacacttatagttcctttttttttatttttttattttattttctgttgggaatctattttttctttatttttttattaagcatttggtcttaaacaattataaaaataaagctgattggtacaagtattaaaaaggaaaaaaggctgactgataatggagttgattagctacagctatagattaataatagctgaaaccttttatttaatatttgtttactggaaaatagtggttgtaaatttcaaacaaataaaatgtacatctttttaaatttagaacaaatataacaaaagtaaacattagtttgttagaaatttttaaaaatataaaaatatttaatttttgattagactattcactttttctttaaataagatatattttaatatgattggattatactttgcttaaaatcttgggatgtttatgaaatgacttaaaaattcttaaaatagatcatgaccgcaccaatcgcagcaaaacggtaggagcgttcattagacacctaattggctaattgatatggcttgtgaagaatttgggaaccttcccgatattcaccaatatttaattataatttgttgttttctttagaattttaattaggaacggcttttgtgttaaaattacggtggccactaaagcatacacgttttggagtataaaactataaattatacattcataacaattttttccggttttccaagtttcttcctctctcggtcctcttttagcatctctacagtttctctctcctctaccgccggaaaaaaaaaacgatttctccggccggttttggtttctccgttccgttaatagccttcgttttctcgtccttggaatcgtcctctggttgatttctgaatgttcgtttgactcggctacgcggcgattcggatctccgtgtttgactcggtccctggctcgttacgcggcgttttcgtagaatgtggtttactttgtttgcatgccaggctttgtattgaattcgtggggcgagatcgtgatctagggtttcgtctctgttcttttggttcgttgcttgttgtggtcgctttttgtttcttaatccggctgaagaaaacgaaagtctacagagataatagattacggaatgatatggtgagatgatttcccctctctgattttagtcaattttgttgtttaacgattttggaattctcgtgaatttttgttgttaacgattttgttggatcagatctctaacattgctcgatttttttagagtttctgctattttttttcttgaattggttactcttttttttactctgcttcgttgtttgatccttctctatggagaatctcacgttttgttgctatttttgtgaacttgagatttgagctctgttgaaatggcggcgaatcttcacgtaggtcaaatgattgtgtgtatgagaggaagttgtcgatggtttctaagttgtgactcgcgttcttcgagggtgttgaaattagaaattgtcacattctttgactttgtagggtattggtcaaagagataaggctgtaccaggaagtgaaaatgcttatataccttttgaaacttctaggtgttgactgtttccgttttctgtgttcactttttatgtttcttagctttttgtggagttataatattttggagctatagtgggttaagtgtgaatggttgacctattgtgtatctatgactcctgtatatggtatttgtagtatgaacttttgatatgtatctagaggaatgtttgctgacacttggttttgtcaggcggaaaggaggatctgcttgtctaaagaggctaaggatgggttagaatttctgaaacgtaaaaagcttcaaaaaatgagatcagactctgtcaatgaaacagtaggcttcagcacaatggctagaagtggtggtgatgctttgagaccaacttcagcgtcatgtggaatgagattacgggtaacttctagtgatacagtatctaaagtgcatggtgcatctactgtgagaggtggcttgatgaaggaaaaagtggagaagcttgagacagatgatctaaaatggaccgagaggcttccagaatgtcctgtctacagaccaacaaaggaggagtttgaggatcctctgacttatttgcagaagattttcccagaagcttcaaaatatggtaaaacaaaaatctcaatatgcaagtagtagaattgtgcttcttaattttcatggcttcataagtttgttgaagccattgattggtgttgtctataaaatggaaagaaaaatgtgatgtaggcaatatagaagacttgtatcctttcatagacatttaactgtaattaatctcattatgtatttctatccaatctcatattctgcctctgtcgtttgtaggtatttgcaagattgtatctcctttgacagcaacagttcctgctggcgctgtgttgatgaaagagaaatcaaactttaagttcactaccagagtacaaccccttcgacttgctgagtgggattctgatgataaagttacattcttcatgagtgggaggtttgttattaaacctattaccatttagctctacatcttcactttatagtttgtatttaattatttgtaaactactcaggacctatacatttcgcgactatgagaaaatggcgaacaaggtatttgcacgcagatattgcagtggtggctctttgcccgactcattcttggagaaagaattctggaaggaaattgcgtgtggcaagactgaaacagttgagtatgcgtgtgatgtagatggtagcgcattttcatctgcaccaggtgacccactaggaagcagcaaatggaacttgaatgtattgatttactacaacttaagcttctcccttttctattcttttttggttaagcattaaagatatcatatgcttgcatatgcatcgttatttacatttggtagttatatggctttttatatctctactttcagaaagtttcaaggcttcctaagtctaccctgcgccttcttgaaacatccattccggtatgtgagaagtagtacagttatatttagtcacaagatcactttagaggtttctgctaattctcttctaacttggatttgcttgtttcagggagtcacagaacccatgctttacatcggaatgcttttcagtatgtttgcctggcatgttgaggaccattatttgtacaggtaacaagagtttaacgaattttggttaaaagtatatgggttactaaatgtggcaatccaaagaatgttaatctcctttttttctgaccttctttcccaacacagcattaattaccaacattgtggagcatcaaaaacttggtatgggattccaggttccgcagctctaaaatttgaaaaggtggttaaagagtgtgtgtacaatgatgatattctatcaactaatggagaagatggtgcctttgacgtgcttctggggaagacaactatattccccccaaagactctgttggatcataatgtgccagtgtataaagctgtgcaaaaacctggagaatttgttgtcacattccccagggcttatcatgctggtttcagccacggtaaaacaaaattgtctgaatctacttttttttgttggtcagagatgtggtatcatcttcaactgaaattgtggttgtgtgaaaaattgtaggttttaattgtggtgaggcagtgaactttgcgatgggtgattggtttccatttggagctattgccagttgccggtatgctcatcttaaccgagtaccgttgcttcctcatgaagaattgatttgtaaagaggcaatgctcttgaactcaagttccaaatccgagaatctggatcttacacctacagaattgtcaggacaacgaagcatcaagactgcatttgtacacctgattcgttttcttcatcttgctcgatggtctctaatgaagtcaggattatgcacaggccttgtttcgaatacatatggaaccatagtctgcagtttgtgtaaacgggattgctatttggcatttatcaactgcgagtgttactcacaccccgtttgtctacgtcatggtaaatttttttctctgtcatctctatccatacacatccttcattattgttttctaattgatggtgctaccgtgtattatctagatgttaaaaagcttgaccttccatgtgggacaacgcatactctttacttgagagacaacattgaagacatggaagctgctgcaatgaagtttgagaaggaagatggagtttcagatttgattacaactgatgaagatttatataagtatccatcatcgattacacttccagctgcgaaagaagacggatatacaccgtattccactatatactttgatttctatactgaggtagagatgacatctcatgaccagttgcaatcgggaaatcccgtcatgagttatgaggcaaacgcttcatgtatctcctcagttgctgatgattatgaatgctctgattacgtaagttttaccacgaatctgtgacaaactttatctgaccgtctctttcttcaaatatctgatttctgttttcttctaaaagcaggtaaatagacgagctaactgtagcagcagtagtgattcaaagctctcggaagaagtagcatgcagcagtagcaaaaaaactcggttcttccctgtggttcaagatgaacaactagttgcggatcaggaaagtgatggatctgattccgagtgttttagagtcaaacgccgttcttcattgaagtttgagaaccgaacagttgttctagacacaagagagtctgaccatcatcaggtactgaaagccatatacttataaatattaactctctattaaacagtgttcatagactgtaaaaccctgagatttttcgtgtttattaggaacttaagagactgaagaaatcgcatcatcacgaaggaagatatagtagtagcagtagtgttagtaggcaagaagaagaagaagatgagttagtaatttcaaacaggaaagaaactcagcaacaaagtgacgtgaagatgcagaagaagaggatcgagaatcattttggtggctttaaacgtctgaaagtgaaagggctaataaagccgtaacgtgacagcttcaagtttcctcctaactacaattcttttaaattggctgatctctaacaatacaggaaaagcaaaaaaaaaaaggaatcaaaagcaaaaaaaaatattcagtatctgattttattgtcattattttttttaatcatgggagaaagaagaagaagaagcaacagacaaaagaaggaaaaaagcatttaaccagccaagccaaccaaccaaccaaccaaccaacactattggtttctttttaggatttaccaaatctttgattctttgtgcacatctgtacacaccttttttaatctcttcttgttccttcttcttttcttacgatgtaaatctcttttttctcctttaagtggtatttgttgttgttcatgattatgcatagaaatcccaattctctctttaaaaagattatgaacaacttccacctactagaaccggaggaacacaattttctttccttgcatacaaaacttacagataaagccatcatgttagtacacgttcgaaagtttcttctcatgccaataaaagttaccattaggttaataataatcggtcccaactcccaacatattaagctacagagacacattcgacagacaagaagcaaagtacagatgccaacttaaaccaaactaaagtcttaagacaacatgaataaatagaaagatcttttcctcagtaatttcttctcaccctcacatccatcatcattagggtttggagacaactagaagtagctcctccggtttgatgaatgtaaacttgcaggtatatatccccaacaacaaggggatactctttaaccaaacattgccatccaccagagaaagctccataactccccagatacaccacattccaaaatttcttcccatttggatgatggactttgaatattgttttctcaaccggcatttgatccttaacagaacttcggatcctctacacactcaaaaaaagtttgattcacatatcagttttttttataaaaacaatcattgctcaatacagagattttgtttagagtgtttttatcttaccagattgtagagatatgctggctggaatacggccgtgaattctacagcagtagatgaagaggcacctgcctcatctcttcgggctctaaccactttctcggtccttttagattcttgggattcctcagctgccttcttcccaagtttgagcttccttccaacagattcagctgcggttgtccggccacgattacttgactcagacaccacctcttccttcttgtcatcttccccttgttctgttctgaatcttctaatacgacctgattcatcatcaatagtaaaaacgaatcagtttctttataatctgttcattgtttcataatcagaaaagcaaatcttacttgaagatgccaagaaggctctaggttgtggaggttgcatcatctccttcccatcaactcacgggttgcttaaagatgttgacagtaaagttcatctctcctttgtgagtgaaggtaataaactcacgggttcccaaagtgttgtccctcacaaacttctcccatccagacttctccatgtagtaaaatgtcgggtttttggagattcctacttcccaagagcgtccccattgcgttcttacttcatcttacaggaaagctctttgtccgtgaagcttctcacaaagtcataaggaagtgcccgcttttgtttatacaaataagatgcaagagacaataataataagaatgtagtatcttcaattacacacaaaagacaaacccaacaagatattgaaaaagaacagagcacaaatctcatccagaagaaacaaaggtgaaatataaagcatacacattcagacagagaaccgagagattcaacaaaaccatgttcgttaaagataaaaaaaaactgccgtgaggctattgagacccatattgaccaaaagattcaacctttaaaacacagctcacattcagacagagaagcaaaaacagtaacttatttgatacacataaagacaactgacgaaagatttaacctttccaaacaaagttaacaagattcaaacctttacggcaagacccattgtcatataacgacaagattcaacctttaagacaacacccatttgttacagaaaacaaaaagtctcaaactttccaaactattacaagaaatcgccaaaattagaaaaacagagttttgaacattgttaccaagttctctgaagaaacatcaacactttgaagcaccatgaagaagcttttgttattcctttcttctttgcaccgaagatatccagggttcgtagtagccatcgctttcgttgtaaatttctttctctcgtctctctctcacactctcttcttctctacttatctctctgatatgaatatgcaccaatctctctacttattattttctaacaaatgattcagtcaaaagtggtcaaagtgataaacttgtcctctcagacagaacttaagacaaaagtacaaacgtgagatcatctttttttagatcacatacacaatgacacaaacgtgagatcatcttttagattacagtatagttccatatgaacttgggctgaaaatattgggcctataactaaaagaccaattcattctttcctcacaactaaaaagcccaccaaaacgcaaaaatatcacaaagctttgatttggggtttaacaagggttactacagtttccaccatttccctgaagaagacgaagaagaggaagaagaggaagaagtcgaagctgttcatcaatcgtccgaaatgcgtagaagcttctctgttttgggtccttacaaatggctaaaaccttcttctacatataccaacgtttactgcttcgtcacaaatcctcctctcatttctaaccctaacaacggctctgcgattttccgatatctatcttacttcgcacctcaacaacgaagacaacaacaacaagcaccagatccagatgatccagcgaatctattgaaagaagatggagtatctctctgttctcagatgtggcttgagaatttcaaagaacctgacaaaaccgctactaatttaacctcgtatcttcgtagattcgagttatgggtattagcttatcagaaagtttgctgtgatgaattaggtgcttatgttcctcgtagctctattcaaagatcagctttagagaatttgttagctttaagaaactctgttctcgatgatcggtttaaatggggttctcggttggatttctatattaaatctcctagagataagaccgattacgagtcgttgtcgaagaggaagattaaagcgattttgactactacgcagcctactccgtttcaggataggatagttcaggaggttttgttgatgattttggaaccgatatacgaatctcggttttcgcaaaaatcgtttgcgtttcggcccgggaggaccgcgcatacggtgttgagagtgattcggaggaatttcgcgggttatttgtggtatgttaagggtgatttgagtgttgtgttggatggaatgaaagttggttttgtgattagttctttgatgagagatgttagagataagaaagtgattgatttgatcaaatctgcgcttgttacacctgttgtaacgagtaaagttgaagatggtgagaagaagaagactaagaagagaaaatatcagaaaaaacgggttttggctgaggatgagcccaagcctgatccttattggttagagacgttctttggttttgctcctgaggaagctgggaagtctccgcagtggggacattgcgggattcttagtcctcttttggttaatgtatgtcttgacgagcttgatcgttggatggaaacgaaagtgaaagacttttaccgtccttcgaaaagcgatgttatatggaataaccctgaaggagaagcggatcaaggaaacacttcttggccggaatttgttcccacgagtggtcctgacaaaacgaggaaaatggattacgttagatatggaggtcatatcttgattggtgtccgtggacctcgagctgatgctgcaacgttaaggaaagagcttattgagtttgttgatcagaagtatatgcttagactcgacaatgagaatctacccattgaacatataacaaaaggtataatgtttcttgatcatgttttgtgtcgccgagttgtttatccgactctgaggtatactgcgaccggtgggaagattataagcgaaaaaggcgtgggaacgcttttatccgttacagcgagtttgaagcaatgcatcaaacagtttcgaaagctgttatttataaaaggagatcgtgatccggatccacagccttgttttagaatgttccacgcaactcaagctcatacgaataatcagatgaataagtttttgactacgattgctgagtggtatcggtttgcagataacagaaagaaaattgtgaatttctgttcttatattatccgtggttcacttgctaagctttatgctgcaaagtataaacttagatcaagagcaaaagtgtataagttcgctaatcggaatctgagccttccgttgttgcagaagaaaggtcagtcaccagaatatcagaatctcttaagaatgggtcttgctgaatcggttgatggacttgtttatacaagaatgtctctagttccagaaactgattactcgcctttcccgggtaattggaggcccgagcacgagaagtttctgatcgagtacttaacactcgatgaaccgaaaaccttagaagagcaaaagagatttattagagagaaagggctcgtttcgcctcaggattacacatcgatgttggtttggaactataagagaaatgctattccaatggatcaagtttcaattctaaaggatcaacctttcttgttgggatcatcaagtacctacaaccgcgacaatgatgatcagaagaataaagaagaagatgaagatagtgaagatgggcttcgcattgcacgcatgtaagaaaccagaaaactgtttgacttttactcttatatcaagcttgtataatttgatgccatattagccattccctatccggtttgtttcggctattgtatgcaaaacaccaaatttattagcattggtattttcagaaatagttcagttatctaaagcttatgtgatctttaggcagatacaataaaacctctataaattaatattcgataaattaataatttttataaattaataaactattcaggttccgcgttgggaccaatgtaaaaattgatacaaatcgataaattaataagataatatttttttttaaaatttatataaatatacgatctcatcaatagtataaattaataatagtataaatttactaatatatattataaatatcatatgtaaaatatgactctagtaatgtttttcttcaattttaataattctttgtagttttcaattctagtttttacaacatcaaaaaaattttgtattgctttctaacttgtaattggtttcataaggactattgattataaagaacaaacttcattttatatcaaatttttgtaagaatttacaaaatttgtataatttttattaatttatcgataaattaatctctctctaaattaataaattttcttggtgccaatattattaatttatagaggttttattgtaactctctattcaagactttgaacgaccattgcttcttacagtgaataagcccgattactcttaaagtacattatcactattgtgttacctaacacttttggttatttcatatctaacatacttgtaaaagctataggaatcagaaccatgtaaaacaagacatcgttctctttcgtaaatggagatttcacagccttttttctttttgtgaatttagtttcgcaacttcccggtgcatccattgcagcactcataagcatggtagctgttttgtaatcacgcgacttaacagtgtctaaagattggtttaaggaatcaatagcttcggtataaagttcgaggcaatcaagtaacggcctctccacttcatatttatcctccttgagaatcttgtcaaccattcctttcaagctagtcgttttcgaaacagcgttcttggtcgatacgaagaccaaaccttcaagactctttgcggttttgctctgcggattctcttcgagagacttgacgcaaaaatcatatttgagtttcgggtctttagttgtagcttttttgcaagaatcccgaatcagagattgtgcggttgcgaaacagtttaagaggagaaagaacataacaaggtaaagcgagaatttcattttttcttttctgtgcggaagcagaaacaaagattattgagaatcgactgatgaataatttgaaactttgtgatcaaatttatagtaaaatgaaagtatggctttttatagaatgctcatgtcacgctttaccactccgcttagcttcatgtgtcctaatttttcgttttgacactctttcttatacgtcgtcgtttttgtttgtttgtttttcccaaagaaatagattatttcagtgttgaaagaactggatttgtccaaaaaaaaaaaaaaaaaaaaaagaactggatcaatgtctagtaaataaaaatatatgcattgatcaaattgtcaaagaaatggatcaatgtctagtttatcgttttgttgtagattaactcgaaatcttttccctctttgtgtcctcactcacatcacatggacatgatactgaaaaagtcactagctagatcattcatcctacaattgtttcaccacatttaccttcaactttggaattctctcacaatgaattacataaaagaaacatggttatgatatacgtagtcaaatcaaaaaatttagtttctcttcatgcaccaccatctttttagaaatcggaataaattgcaatgttcttctttcttgaacatataatattagacggccaccacatgaacggtcctaaggtcaaccaaaacttttgaacatccatcaatattctctatcattggcctctttgagttatcccatgaccatgagtggtgactggataaatactcatttggtttaagatattatgtacatacataattacttggtaacacataatgtaagtatacaatattgatggatgttcaaaagttttggtgggtgtaagtgtacgtatgtgaagaaataaatcagatagattttgatttatctaaactttctgtgatccttattcaagactttgaaaatgctacgaccattgcttctagtgagcaagaaagttactctaaggtacattatcagtactattatctttaatccgatgtgttaatacaatttttggtgatttcatttcaacatatttgtaaaagctagaggaatcagaatcatctgatacaaattatcgttctctttcgtaaccggagatggcgcttttctttctttgaatccagtttcacaagtacttggtgtatccattgcagcactcagaaccgttttaacggttgggtaattacgcgatttaacgcccgctaaagcttcgtttaaagaaccaatagcatcggtataaagctgaaggcaatcacgtaacggcattgcagtcatcttgttaactttcttccccttgataatcttgtcaacagttcctttcaaggtcgtcgctttggtcacggcgtttttcgtcgatgccatgactaatccggcgagatcttttgcggttttggcctgcggattggtttcgagagacgtgacacatagattgtatttgaacttcgggcttgtagctgtagctttcttgcaagaatttcgaatcaaagtttgtccgtttgccaaaccgtttgagagaacaaagaacgtaacaaggtaaagcaaaaatttcatttttcttttctttgaggaagcaagaaacaaaggttaatgagactcgatgatgaagaagtttagtaacttggtgatcaatttataatgaaacgaaacaaataatttaacggtttatgatttgtaactaacaaaacggctcttttaggaggctgatgtcacgctttaccactccgctcacgtcgagtggcctaattgttcgttttaacactctttcttatacgctgacgtttttttttggctattttttacttttctttttcaaacaaaagtgtcaaaagatatagagttctaaacgttttgtttttgggttagaccaggaatcattttgtcgtggattagaacgttttgtttttggggcatataatggtttaatagaaaaaaaatcatcacaatgattcgtagcaatatcttttccgcgttattgcatatcaaaattttatgataatgaataagttagagtggttttagtccatgccaatatttgcaaccattcaaaactatatgttccgacttatttttgttcaattggttgaaaattttgaacaaacttttaatcactgaatttcaaccaatttttatatacactttagttaacaaaaatcgcgtatttgctactttaataaagatagtttgttttcttgtaaggtttctaaattgtcaatattatatgtatatagtaccaaaaaattaaaagagatcatatatgtaaagcgaaattttatttccatcaattagattctttgctctcaactttctatagtaaacaaattaatcgatgttatatgaaccactttgataaatttattacaacatagtagtaaaagccaaaggaattacaatcgtcttatacaaaatattgttctcgttagtaatcggagacttcttttctgcttccttgaaatcatcctcgcaatcgcctggagcattcaaagcagcactcagattactgttagcgccgtcataatcacgcgatttaatgttcgctaaagcagtttttaaagaatcattagcatctttataaaatccgaggcaaagttttaagtcttccacaatatcctgatatctctggtccttgagatcctgtgcaacgattcctttcaggttcgtgatttttgccgcaacgttctttgtcgatgctagggccaaatcttcgagagtagttgcggctttgctttgtggatcttgcgtaagagattggacgcagaaatcgtatgacgattgcgggtctttcgcaaaagctttcttgcaagaatcttgaatgagagtttgagcggttgcgaaaccgttcaagaaaagagagaagatcaccaatgaaaccaagaacttcatttttttgtttttactttgagaagaagtaagttagaattgattgatgaaaaatattgtcactctgtgtttccctttaatttatagtaaaccagagaaaataattttatggtaagactcttaaatttggaaaagatcccaattcaaaaaatagatttcaatcaatattgagatatattctacatttacttaatactggtaagataatcctaaattcataatttatttgtttgaaattggtcaacatgcaataatagtcaacttgtttgaacttttaaggtatttccattttctaaaaatcatgcatactgtcaaaattaataactcttctaccattatgctatttcaacaacattttaaggaaaaaaaaatcaaagatattatcttttaacatttatttcttatatcatagattattagatttatttgttttccatatattcacgaatttagtcaaagattttgagtgtttccaaaatcatatataacacaaataaatgagaactcttctctcccattatgccattgtcatcatcattctgcattcatccacatttgattttaataacagaattaaagataatattttttaataattagattatttatttaattgtttatgctattggtcaacatgcaataatatttttcatagcaactctcctctctccattccattgtgcccactctgttcaaatgttagattatggatttatcattcgatcccaccttcgaaccaaatcaaagttttttttgctgttgtttctggatttggtgtaaagatttaattaaggttaataaaacttaacgtttataagaaaccatatcagaaagaaaaacacacaaaaagttacatttcttatctgttttatcatttattttgacaaatgtattcttacttttattgtatttattggtttttgtaatacggtagtgagtaaattagtccatgtcatttatatactattactacgttaaatattctcatttgagtcacgtaggattcctaaaaatacacttgcatatgttcataccaaaaaaaaaacatgcatgtagtttcatttcagcatatttgtaaaagcaaaaggaatcaaaatcatctgaaacaaaacatcgttatcttttgtaaatggagatttgagagatttttttccttctttgaatccaatttcgcaactaggtggtgcacccattgcggcacttataaccacgctaggagttttataatcacgcgatttaatgatcgttagagcttccgttaaagaatttgtagaatataaataaagttcgaggaaaccgtttaaaagaataaaaaacgtaacaaggtaacgcaaaattttcatttttcttttctttgaggaagcaagaaacaaaggttaatgagaatcaattgatgaagaagtttagtaacttggtgatcaaatttataataaaatgaaacaaataatttaacggtttatgatttgtaactaacaaaacggctcttttaggaggctgatgtcacgctttaccactccgctcacgtcgagtggcctaattgttcgttttaacactctttcttatacgctgacgtttttttggctattttttacttttcattttcaaacaaaagtgtcaaaagatatagagttctaaacgttttgtttttgggttagaccaggaatcattttgtcgtgaattagaacgttttgtttttgggttagaccatggtttaatagaaaaaaatcatcacaatgattcgtagcaatatcttttccgcgttattgcatatcaaaattttatgatgatgaataaagaatggttttgtccgctagctgattagtccatgccaatatttgcaaccattcaaaactatagattctgacttatttatgttctattggttgaaaattttgaacaaacttttaattactgaatttgaaccaatttttatatacactctaattaacaaaaatcgcgtatttgctactttaataaagatagtttgttttcttgtaaggtttctaaatagtaaatattatatgtatatagtaccaaaaaattaaaagagatcatatatgtaaagcgaaattttatttccatcaattagtaaacatatcaatcgatgttatatgaaacactttgataaatttattacaacatattagtaaaagccaaaggaatcaaaatcgtcttaaacaaaatactgttctcgttggtaatcggagacgtcttttttgcttccttgaaatcatcctcgcaattgcctggtacatccaaagcagcactcagattaatgttagcgccttgataatcacgcgatttaatgttcgctaaagcagttgttaaatcatcattagcatcgttataaaatccgaggcaaagttttaagtcttccacaatatcctgatatctctggtctttgagatcctgtgcaacgattcctttcaagttcgtgatttttgccgcagcggtcttcgtcgatgctaggaccaaactttcgagagtagtcgcggctttgctttgtggatcttgtgtaagagaattgacgcagaaatcgtatgacaattgcgggtctttcgcaaaagctttcttgcaagaatcttgaatgagagtttgagcggttgcgaaaccgtttaagaaaagagagaagataaccaatgaaaccaagaacttcattttttgttttcactttgagaagaagcagagaaagttagaattgattgatgaaatttttggtcaccctgtgtttcaatttatagtaaaacagaaaaaataattttatggtaattgttgaaaatttggaaaagttcccaatttgaaatagatatcattccatattgagatatattctacatttaatgaataatggtaagatagtcacttttcatgattctttcctaaattcataatttatttgtttggaattggtcaacatgcaatatttgctttccatatacgcacgttcaaagtaattccattttctaaaaatcattcatactttcaaaattgatatctcttctaccattatgctatttgaacaacattttaagaaaaatcaaagattatttgatttatttgttttccatatattcacaaatttagtcaacgattgtgagtgtttccaaaatcatacataacagaaataaatgagaactcttttctcccattatgccgttgtcatcatcattatgcattcatcaacatttgatttttataacagaattaaagataatattttttaacaatttgttcgtttatgtttagattatttatttaattgtttatgatattggccaacatgcaataacatttttttaacaatttgttcgtttatgtttagattatttatataattgtttatgatattgatcaacatgcaataatatttttcttagcaactctccattccattgtgcacactctgttcaaatgttagattatggatttatcgttcgatcccaccttcgaaccaaatcaaagttttttttcttgctgttgtttctggtctggatttggtgtaaagatttaattaaggttaataaaacttaacgtttataaaagaacatcagaaaaaaaaaaaaaaagttatatttcttatctcttttagcatttattttgacaaatgtattcttacttttattgtatttttttcggtctttgtaatacggaaggattgatacggtagtgagtaaattagtccatgtcatttatatacttttactacgttaaatgttctctttgagacgtaggattcctaaaaatacacttgcatatgttcataccaaaaaaacacttgcacatgtagtttcatttcagcatatttgtaaaagcaaaaggaatcaaaatcatttaaaacaaaacatcgttatcttttgtaaatggagatttgagaggtttttttccttctttgaatccaatttcgcaactaggtggtgcacccattgcagcacttataaccacgttagcggttttataatcacgcgacttaatgatcgttagagcttcctttaaggaatttgtagcatccgaataaagttcgaggcaatcacgtaatggtttctcactatacatttcaaatctattctccttgagaatcttgtccacaattcctttcatgcttgttgttttcgacactgcgtttttcgtggataacatgaccaacctgtcaagactacgtgcagttttgctctgtggattctcttcgagagacttgacacagaagttgtaatgaatcttcgggtttttatctgcagctttcttgcaaaaatcttggatcaaagattgtgcaattgtgaaagcgtttaagagcagaaagaacatagcaaaatagaacaagaacgtcatatttttttagggagtatagaaaatttgacgaagaggttttcactttcttactcaatttatatttaaaaaaactaataatgtttaaggtttttttaccagataagacttggtatctaacacaacggcttttttttagagtgctcatatcacgctttaccactccacttgttcgtatgaccaaattgtttgttttaactaataacactctttatttatatgttgtcgctaatttttggcctctatttttgttaaatgttaaaataaaaacattgcgcgatgtcaaaaaaagaaagaaagcattatgcaacatgttttccctcatgtcaactttttttttttttttttggtaaaaccctcatgtcaatttttaatgatattcataacgggaataagtctcccatgcatgatacaaaacatgatcttcttaatatcaatctccagaagaaacctataatcacttagaaaacaaaagatacgtacttcgacaaatgaagattttttttttttaaatgaagaaaattttgctaacatgtttatgatcttactgacttttctagaaaccgcgagtccatgcttcctttactatatagtctatattattgcttcattattcttggtctcaatttggtgttctagtaatgttttcgttgtttggatattttctgaacgatatatcaaagcttattctttacgctctcgtttttagcactggtaagctatattgtcacgtatgcaacgaatgagaattgagggcgttaatgtcaaaaaataaaaaagcattatgcaacatgttttcttttttcattggttcagaactttagatcttaaagatgacgtagatggcctcagagagagaggaaactcaagttttgtatagtagttaaataaataagattgggaaaaattgggggatggaggaaatagaccatttctacgttaacaaaaacacacacatgaaatagacacattcaaaaatattggactactagttctatgcatcaatatattcattaaacgttaaccaattgctcttctacaacctagccgttaatatgagcattgaaacaaaaataatacggaatgttgatcatgtcgaagagaacatcgttctctttcttcactggagatatctggtgattgtcatcattgaatttcatttcgcaagctcttggtttaccttttgccatatccatatttcctataaatttctcgtaatccagtgttttgaggtatttcaaagctgagtttaacaactcatagccctcagaataaagcttgaggcactcccgtaagaacgtatgactcaacttattcttatactttctttcattcaaaatgttctctacagttcctttcacttttgttaggtttgatatcgcgctattagtacataccacagtcaattcatcaatatttcttactttttggctctctggattctctttgatggatgtgatacaaaatttgtaaatgtatggttccgcatatcttgtattttccttgcaagatttttgaataagagaatccgccactctattggccatgaaaccattgaggtggagaaagagtacaacaaggtgaatcaagaatttcattgttatttgtttttgggaagcccaacactaaatgagactaaagaatattttttaatctaataaataagcaaacaaaaatcttctaacatgagactgctattcaaagacttgctttttttagattactcatgtcatgcgttaccactccgcttacttcgtggaaatggtacttcattgccttcttttttgtcaacttttcttctttatgttaacaatctcgcatgtttatttggaagttctagagggttaccacaaggttgttctctatctttgttattgtcacaaatttcctctctagtctcatgagtataagacatcagctgacgatagggtctagatcatgacatcgtccataaaaaggttaaatgagtgagattcacctctgaacattaaaaacagtttagcaaagaacaccatataaattaaacaatgactttacgaagaactatatataaacaacaaaattaatataaatcgtcaaaattgaaaacatactagaacttctagatattgatactaacatttaagatagagagcaaaaaaagaaaaagcctcaaaattgggttgtatgataagggacttattcattttccaatatagaaaatcaactatagttaaaggtgtagtataagcaatccaacaacaagaacaacaacaacaaaaacataagaaaaaaaagtaaagagtttattgtgctttcgaaaatatgaactacaattaatacatgaggcccttctccttaggtttttgtggaatatgacaaacacatgaaaattcatccacatgattgattgattgattgattgagatgatgactcttcttggattggctataaccgggtttactagttctaactcaacaccaattagcaataagtaaaaagactcaaatcttttatattatagtagctggtgttgagttatctccactttcaatttgggatactctaacatctataactaatgctaaagttgcttcaaatcagtagagtgaatagaaatggtaccaaggacaatgatctgcaaaagtacataaccatcgagttttgatcttcatatatgtcagaaactaaagaacatatagaaatatgtatactgaacagagacttaaccatcactagaaatgaaaaacaaggtatatgttcatctctattgatatatggcatgaaagttttattttatcaaatgaatatcaactagctaggtttactttctttttctctgaagaaataaattttcttttcatgtgaagcattttatgtggaaaagagacgatttaccttccactaattctctgtgtgaagtcatttcttaacacttaaatattaaagtctaaattatatcagggaagatataagctaatgaaacgtagtttaacatggccttctttcatgaattcacctctctcttcagaattattcttaagaagtactatatatatgtaaagaaattttttaaaattgagaagtgtggtaagaacaaaactttttattaaatatgtgttgtagcttgtcaaagaaatttagaaaaggtgaaaataggagacatgatttgaaatggtgcaacatagattcattcctatctcgatgaaagttgtacgtaaactctgaccttatattttttcattaattcattgttgtataacaaactaagaaacattaccgaggggctgttaggctagacactatacgatgtctggccttatatgagcatagtaattaaaagactgagcaatgtcgacggtgtcgaatagaacatcgttctctttcgtcaccggagatttctgtttattatcgtcattgaatcccatttcacactctctcggaacaactcttgcatgacgaatagtattgtggactttatcgaaatcccgcaatttaatgtactctaaacatttggttaacaagttagtgccctcagaataaagcttaacgcaaacgcgcaacatcttctcactcattttactcgtatactttctgtccttcagaatcctctccacaattcctttcacgttcgtcatgttcgaaatagcgtttttcactcctactccgatcaattcatcgatatttcttactttttgactctccgggttttcgctgatagatgcaatgcagaacttgtagtaatgtggttccgacatttttgaagctttcttgcaagaatctcgaatcagggaatttgcaactctgttggctgtgaaaccatttaaaaggagaaagaacacaacaaggtaaaacaagagcttcatttgtttgtttgggaagaacactagagagaatagattaaagaactatagagagttaacttgtgatccaatttataagcaaccaaaattttccaacatgaaagttattgaaacacatgctattcttagatggctcatgtcacgggtcgccactccccttaaacataaggctacaattaacgaaaattgcggtggaccgaaagccaacctcaaaaacatcacaacaacaacagttcaagttgaaacgttgtaatgatatcccaaattaaaaccaagtttgatcaatattgtaatttgtaatttccacgaaatattaaggctatatgtattaagattgccattcaaaccagtaattagcataatattaaaataactaggcatgcattataggcgtaactttttgtggtttaactgtaaaataactggaataaatagaatatacagctaaaatcttaccatttacaataaaattcatggaatacaatttttattcatccctctacaaaaaaaaaaaaaactaatttcaaagaaaattaaaggattaaatcactagtatattcatattgcagtggaaattaatgaaatgacaataatcctctctaattctgtgatttctgtcatttaactggaaacaaatgaattgattgttgtgtaacattatcaaatatcaactacaaaatgtatgttaactacaattgttcgatatataatatgttattttatctatatactttcaatacaacagtttgaattttcatggaaaaattaaacatcccaacttgaattgttacaagatcttgcttataataggtagttattaaacatatataccaaccaaacctttcttctcctcaactcctccgcaaataaaacagaaataatattatatttatatggttttgtgttttctttttcttcttaaacgttgagattgttgaagtggtcgcacctacgtctcacttctccatctttatcgcccttgacgccgaccgtgccaagtttctccatcgcacgagcgaaatcctcaaagaatgctgtctcgttagttgcgtatagatccacaaacggcttggtgctgttgtctttaataaggatgtggtcagacgctaaaagccctagccctcgctttaggttcttgaagtacatgttgtcgaactttcctggagtcatcacgtcgttaaacgcggcgattgtatcatccacggtgtggtttttgcaaagatctttgagagcggctgcgaatcgcgggttgatttctttatcagcacgggatccgtagagtctgtcggaaaactctttgcagtgagagaatccaatggtgtgagccccgcttaatgctaccatctcgcgaagactaaaaccgtttttcttgaatatcccgtggatgtcaggaacagtctggtttgccattgggacatttcctctgactttatgagctttggattcgaatccgtctttacgaccaagctttacgtcaaagtaaggtcctcctaccattgtgacaaggtcacgtgtagcctgcgctagaatatccgcgcatgatactacaccaggacaagacaactcgagagctgtcttgatgcgggtgacgatgtcaaaagcatctcccgggagggaatcattgagatcatcatcgcgttccgctttgttgaacgagttggtcgcgatcaagacagatgcatcacaaccttcaaggaaacaatcatggaaaaagagacggagggtcccggccgcagttgttggttgttggacttgtttggttgtaacggcttcacgcacaattttgtggaaatcaggacatgttttttggtaatagtccgttctcaagatagcgacatcagccgatataattggtgcaaccacggcgagacagaagaggataacaaagggattaaaaccacgagagaattgcatattcgacatcagataataacaaacaatggtaattgaattggatttgtgagagagatgtctacgaggtagacttctctacgatcgattgtcgtcgaaagcaattagaaacgaagacgaagaaagggcctttgcgactatttcatggcttaggaggttactaagaagaggctacgtaaaggatggttttcatttccttatatgtacgtgtggttgtttttcgtttattcttttctatttttgtaatttatctattttttgtatggttttggttgctttgaatttgttttggttctagaaattttcttatgttcgacaaatgtggtaatatgatagttgctttaataggatgcatacacacgtgaaattgataaatacgagagaatagaaactcatgtgaaggaaaaaactaatattaattaaaattattcatttcgcacaaacaaacaaacaaattaaaatcattcatagtttatcaactaaactttaaacttgacgttattttataattttgttgaatcaacaacctgtgaaggtgaaggtgccaatgattgtgacaacatgatgtttggtatgcttacgttaatttgatccaagaacagttttctagcaaatgtttgatgaactagactcaaataaaaatacctactcatgtagaaatcacgcaagctcaacattattagagatctgattgaatttgatattttcgtcagattcgtatcaatctcaattttgtattacatataacgagcctaactctcatatggggcagatctttttgtaagttcgaatgagagttatgcctttggtaacataaattgctagaccacaaaattacatattttcttatttaacctacgcaaaatcgcaaatatctaagagtgcaaatgatttcataaaggaatttaatggaataaatatatgaataaaaaaaaagaagatgaataatgttattcaatcaattccacctgcgacatagtaaaaaaaaagagttgaataattattattttttaattttcacccttttcaatgtaatcatttaaaaaaaaaaacttttttgtcatcccaaaagtatagaattggaagaatggtttattataccacttttattcttctagctgtaccatttgcataataagtttctctataccggaaccaaattcttgtattttctatattaaatattctaatatgagaagttgaatgttaagaatttttttttacttatcatgctatcttattatagaaaatttggtttctcaaaagtagttattaacataatctaatatgagaagttgaatgttaaaattaaatatttacttaacatgtgaacttatcatagaaaactttggtttccaaacttgttcataatttttttctaaaataaaatagtaaaaaagtaaatctaattcaaataaaaataagataatcaattatttaaagtgttagaaaaatagagtgataaaataagaaataaacatcattcaacaaacctaaatatttagaaatatgtagaaatttaattgaaaaccccaaaaaaatatgaagggaggctttggtgtctaaaaattagtaattgggcccaatatctcgtgcgcaaagcccatattacatagagcatggcgcgtataaataacatacatcttatgtatttatctctctcacgcgcccctcttttcttcttcattgacacggacattcgtttccaattctctctaatgtttcactaaagcgcatacataaccctaaccctaactctctcgtactgcacaaaaaaaaaaaaaaaattgaagaagagcgatacgatcgtaaccagggagcttgatttctcccctgatttttctaatggattctcaacagagcgatctctttgacaccgcatcgcagccggacacggtggccgacgagtatacctttttggaattcaatactcaaggcgattcagagttcgattaccaggattttggatcgccgacggcatggccgacaccgtctgattctatttccatcgctgacgttgccgatcgtggtgaaggaggagctgccgcggatcatcattctgaggcttcgtcaccttcgtccctctctgccggtgccgggaatggtgcgaaagtgggacgcggtggagttggtggaagtggtggtgttagtagtagtagtcaggttgatgcattggccgctggtgtgggaaatttgaactttgaagagactggtgatgatgatggttttgattatggtaaaaatgatttcacggagcacgcttgtaagtattgtggtatctcgaacccagcttgcgtcgttaggtgtaatgtggcttcttgtagaaagtggttctgcaattcaaggggaaacacctcaggctctcatattgtgaatcacctggttagtaatcatcactgtaatctgtttttttttttcatcttctggaagtgttgtagtttcttgtgttgttgttaagacatgtggtcataggtatctctggtttggtttgtttactctacaatttccatgagatagggttgcacgcaattgaacctttcttaatggatttccttctgttggttatttttaaggtgcgagcaaaacacaaggaagtttgtctccatagagacagtccactaggggaaacaattctcgaatgctacaactgtgggtgtcggaatgtctttcttctcggtttcatctcagcaaagacagatagtgttgtcgtccttctctgtagagatccttgtctaaatgtaaatgccctgaaggatatgaactgggacctaagtcagtggtgtcccttgattgacgacagatgtttcctcccctggcttgttaaggttagtttctgtccttgcattttttcttacgaagacattttcatgtgatagcttttattaattcttgttttacaggtcccatcagagcaagaacagctaagggcacgccaaattagcgcacagcaaataaacaagatagaggaattatggaagacaaatccggatgctactcttgaagaccttgaaaaacctggtgtagatgatgaacctcagcctgttcaacctaagtatgaagatgcgtaccaggtatagattttctcagccttttacttataaaataagtaactcaattgatatattagagaaacagtaaattcgtcatgccacttttggaagaggtcactgttagaattatgcttctatacttatcctttctggtggtttgcagtatcaaaatgtgtttgcacctctaatcaaactcgaagcagactatgacaaggtgtgtatttagtaattcattttatttggattgattttcatgtcccttttatatttgttctgttgggacttatcatcttaagtctgctgtagatgatgaaagagtctcaaagcaaggaaaacctcactgttcggtgggatattggtcttaacaagaagcgtgttgcatacttcgtcttcccaaaggtggttgaaatctagtggtcgctattaagccttgattagaacatttcccgatttaaacttttgatgcaggaggaaaatgaattgcgattggtaccgggtgatgaactacgtctgcggtactcgggagatgctgttcatccatcctggcagtcagttggacatgtggtatacatcgttcttggttttgttatgttagtagggtggagatcctgtatttgagagtgtttaggtctttaccataaaattttaataattctccagatcaagctaacggcgcaagaggaggttgctcttgaactccgagctaatcaggtgagtataattctgatgttagctttgcttttgacatcgacttgcggagatatgttcaacctcacttactctgtgtgtagggagttccgattgacgtaaatcatggattcagtgttgattttgtttggaaaagtacaagctttgatcgaatgcagggagcaatgaagaattttgctgtagatgaaacaagtgtgagtgggtaagtcagtcatcggaaagcctagctccttcttggtacgtgtccatttgttactgcatgctaatcaaccactgaatcactatgtttctattctttgaagttatatctaccatcagttattgggacatgaagttgaggcccagatggttcgtaacacactacctcgacgttttggggtacctggtcttccagaactgaatgcatctcaggtaatcattggctttcagcttatccagttcatgaataatgttcgtcgtaaatgtcttcacggaattttcagagtcgttttgatcccgtgttccttgttaacacgatgaataatatatgttatctatataacggatttataacaggctctattgtatccttgagcaggttaatgcggtgaaaagtgtccttcagaagcccatcagcttgatccaaggtccacctggcacaggcaaaactgtgacttctgcagcaattgtgtatcacatggcaaaacagggccagggacaggtaaagctgattgttattgattccctcaagattgctttttgtgagttgactatcagatatttattattattacctgacaggttctcgtttgtgccccaagtaatgttgctgtggaccaactagctgaaaaaattagtgctactgggttaaaggtaaacttttaaacctcctagtttttctattaaaattttgcgtaagacatggatacttcaatttattgttcatttttggaagtttctaccatcaaaatttatttaaagagtatatgacttctcttcaaactttctcttactctaatgtcaggttgttcgcctttgcgcaaaatcaagggaagctgtaagttctcctgtagagtatttgacccttcactaccaggttagttgacatggtagcacgctttggttcatttaactctctggttcatttagtcccctatctttctttgtttgaagataattcatatgaatggttgctttcaggtaagacatcttgacacatctgaaaagagcgaactgcataagttgcagcagttgaaagatgaacaaggtatcacatttcagtttgttatccattgttgacatttttgaattttcattttacatttctatgcctgtttcttgttgttgatctgctgaagtttcttattgtgcttgcaccctgtgacaattcaagtgaccatagcttttactctttttgctttttattgtcactaggtgagctgtcaagcagtgatgaaaagaaatacaaaaatttgaaaagagcgacagaacgcgagataacccagagtgctgatgtcatatgctgcacatgtgttggtgctgctgatcttcggttgtcaaactttagatttagacaggttaacaatatttacttattaattttgagcatctctaattgtacggaagtcgaaagctgacatgcccttcctctcttataggtacttattgatgagtctactcaagcaacagaacctgagtgccttatccctttggtccttggagtaaaacaggtattagggctctcagtgaactgacttgttttcgttatttgctattgattgcttacagaagtttttttgctctaggttgttcttgttggtgatcattgtcagcttggccccgtcattatgtgcaaaaaagcagctcgtgctggcttggcacagtctctctttgaacgacttgtgactcttggtattaaaccaatcagattgcaggtactacattaatcactcagggaataaggaagatatatcttatattccctttcactgtgtgtaggactgtccacttaatgttgtcatatcatattcttgattgcaggttcaatatcgtatgcatccagctttgtccgagtttccatccaacagcttctatgaaggaactctacagaatggagtcacaattattgaaaggcaaacaacagggattgatttcccgtggcctgttcctaaccggcccatgtttttctatgttcaggtatcaaacttcacattcgaattagtttagaccataatggatctggcacccaccatcacaaatccatttaaagcaagctcaatctgagttttaatttctattgtttttttttttaatttgtagctgggacaagaggagatcagtgctagtggaacatcatatcttaatagaactgaggctgctaatgtggagaaacttgtgactgctttcttaaagagtggagttgtccccagtcaggtgagagtcttgagattcttaactaatagctagtatactttcttttggcatctgttgacgttatcagattatgttatcagattggagttataactccatatgagggacagagggcatacattgttaattacatggcaagaaatggttctctccgacagcaactgtacaaggaaattgaggtactattatcaaggtctgttttaaaaggtttacttgatcctgtcaattatttaaaaaactctcgaacctacaggttgccagtgttgattcttttcaaggaagggaaaaagattacatcatattgtcctgtgtgagaagtaatgagcatcaggtatgtgtgatgctttttcttctgtaaaactctacagttcgtactctgtttaatgatttcctttttaatgtggtgctttttctcctgaaaatcaatgttggaattgacatgtaactactggttatttggttttcagggcattggattccttaatgatccacggaggcttaatgttgcacttacgcgagctcgttatggaattgttattcttggaaacccaaaagttcttagtaaacagcctctgtggaatggattgttgacacattacaaggtatatagtggaaatgagttcttttacctggaatgagttatttttcttgtgaagttttgggatgttatccgtttgagtccagaattgattgagtaatatgaatgattgtatgatactaaattttcttttcctttaactgacaggaacatgagtgcttggtcgagggacctcttaataatctaaagcagagcatggtacagtttcagaaaccaagaaaggtaccaaatgaacctctatgtctatcaatgtagattacagtgacaggcattatgaacattaatcctctttggtacttgttagatttacaatgatcggagactattttatggtggtggagctggcatgattggaaatgataattttggttcgggtaaccctaatgctgacagaagaggcagtcgaggaaggggtaaatgtccagtacccttttgtgtcttgtttggttttaatgtgctttagccatgcatgtttaaaccttttcttctattgattcagctggtggttcctatcttccttctggcccacctaatggtgctagacctggactacacccggcagggtacccgatacctagggttccactttcaccctttcctggtggtcctccttctcagccatacgctattccaactcgtggacctgttggtgctgttcctcatgctcctcaacctggaaaccatggttttggagctggtcgtggaacttcagttggggggcaccttccgcaccaacaagccacccaacataatgttggaactattggccctagtttaaactttccccttgatagtccgaatagccagccttcacctggtggtccgctatcccaacctggatatgtaaatactgcccgcgtctctttcaaatttttatctttacatctaatttttgaagcattagagctcgcttattttgttttattccggatcatgacgcgataggttaccttttcagggtagccaagcgttcagggatggattttctatgggtggaatatctcaggttgtcttcttgtttaatgttactgggtgattcggttgcagtgtatcctacctttcttaaatgtaatctaatcttcttattaccaataccatcaggatttcttggctgatgatatcaagagccagggatctcatgatccttacaacatggccgactttgctacacaggtgtagtttctcttcttagatatttgaaatgtcatactttggataggataataggataaatgtctatcttttttgtggcgatggctgtatttcaaaagttttggaccataattgttgttggtaggcctcaccgggtggatttgctgttgattatgccacacaaggagcacatggggcgtttcctggaaactttatgaatcagaattctcaaggcggttattctcgtttcagcggaattaatgatttcatgtctcaggtgtgtttcactggacttaccgttcctattaacacagtttttatactaacaccttcacctgagccgttttctttgcatatgtaggagtatatggcacatggaggtcaaggtcttttcacccaagctggctttatcgactcatcccaggatgatggacagcagaatccttatggtgtgaacaatccaaatcttcagtctcaggtttgtccttctgatgtgaacaatccttatccttgattcgttgtttgcgtcaacatattcaattaacaaacagttgaggatttacaagtattcactatctttatctatatatacacatgtttctggtcaaaagatgctaatgactcttgtctaaaattcggctcagggtctcccaaattcgctctactcgcagccattcgcacactacaacacacagccactaaacctttcaggcccacagcaatctcaacctaaccagagctcacaaaacccaaaacatccttacaatggctgagggtgagaaagacaaaacttggatgcaacgggtttataaactcttttgcaaattcaccggcttggttccatgctgttcacggctccaaacaaacatctggtgacttccgggtgcttgaaagatacacgcctttctggctcgcttaacgcagcaaacaggtaaatggttatgcaaagaaacgggtacctaagtagcctggggaaaaaagtcttcggtccgtaaatccttttggcttatatgttttgtttttgccttgtattattaatatacgctcatatgctctatattattatagtcagatatctgaagcctacccatatttaaaattggtggtggtgtttaatggtgatattgatatgatttacaagttcttttgctttatttggtttttatttttttcacggtctgaattcatgatttgtgtgcaagttttggtatcattggcttatgggcttgtccaatctgaaatttgttttggatttctaagtttcgttaaaactgattcgacttgaattttatgttctcaaaatatctctgagttgaagaatttcataaagattatatttcctaggtttagccgacatgattttgttgtccctatgatttgtttttgagtagatagaaatggttgggcagcattggctaatgaacacgaacatgttaaaaaaaaaattggacattagaatatcatattacattttggtgtcttagatgggttcttcgtgacctttgaacacatgtcatgaccatatgcgactgtgatgaatgagactcttagctatgtggacccacaagcccaaaaatctttttcgaagcgacacgaaacgctctatgtgtttctggtttgacctcaaacagacaaagaaactctcctagtttggctacgtcctctcgaggttttcgttttggctttaatttcaaatacaaaaactgaaagagataggaagtagaattatattatatattaagtggaagataaagtatcacgaaatgtgagatgccgtgaactttatacctgcttactagatttttatgatctagttggcccttctaaatcaatctcttaaattttccctaaatattggcttttgtcacgcctcaaatttcttcttttcaaaactactgaaacatgccataaaaggaaacaaaaaataaaaatatctacctaacatttttcaactctgttaagcacatatctcatctaatccttaactatgaaagatttcaatttcatttcttagtcttctcatctaatatttattcggaatatggactgacatgaatcaatagagtaaccgtctcgtatattttaaactacattagatatttttcccttaattttctgtcaacaacaaaatttagatattttgttttgaggcaatcttataattttggttttccaactattatctttgacccgcctcacatattttagtgtagatatagtacggacaaaataaaaatggtaacggttgcatcatacctgcaaaactcagaatggcagtctcgtaatttatggaaaaaaacaaagggtactgtagtaagacaagtcattaaaaataataatcttatcctatggaaacaaaacaatatttttcctactgaaatttgtgattatctttatatagttgtttagacataaatcaaacttaattaatgtgaaatcaaattacataactgctttctccctaatcttattatataaattatggttttcaaagttgctaattcgtaggattgtgccacgtgtcaagtcaaacgatcagatgtttacatgtgtcattccaaatttaacttttttattctctaaaaaaatagaaaatcttaaaaagtaaacaaatttacatatactaatttatatatctatatatttataaacaattaacatttattcaacaaaaggaaaattaacaaatttgtctttaactcatgtaatcataggtgaaaaataaaacattttgagaaaaatagcttagcttataggatttaacttttcaattattttcatttattaattttaactcatttaatattaatttgcatgatgtaaaattaacttacgagattacgacatatatacaaaatatattttcaacaatgtttggtttttaaatatttttatggattttttattattattaattattagccctaagcgtttgggtattcggatcgggtatttcgggttcggatttttgggtttagaagtttatgacccgttaaggtaatttaagattttaggtcgagttcgggttcgagtttatttatatattgaaatatcaaattttgtgtacaaatctattaaattacttgaaaatttcaaaaatttccaaaacaacacgagtagttttgcttgaatatatcttaaaatacacaaaataactaaaatatccaaaacatcctaatagtttctatatataagtataaatataactaatatatacttatatttgagatatgtttgaatacctattcgggttcgggttcaagtttttcgggttttgaagtttagacccgttcgaatatttgaaaatttcgggtacacccgcctaaataggcgggccttatctagtataaaataaaatgattataaagcaaagatttcaaaaacaaaaaataaatagtatttaattttgatgcagaggacagctgtacatttgatttaagcgtagcttcaactccataacagtcctctctctctctctctctcattctgaaaggaaaaaaaaaagaaaaaaggaaagctaagtgaaacagaaaaagaccatctctgactacactactcctgaagatcccaaacaaaaaagcttcatagtgaaaaattattccttcgttttctcgatttctgaatcaggtttaccatttttctcactctcttctctgcgctttcttcgtttgtgatgaaactctcctcgcgctgtgacattgttttttccgctttcttaggttttttcaaaatttccttatgcgatttttttctctctttgttgttgcagattttgtgaattcagattagtttcgattgtttgtggagtcgtatcggaattgaagttgatcgactgagaattgcgagttttttcttagatgtcgtcagtgttgttttggttctctgggatagtgtgtgactgatttttgcttttcattggtgatgcttggacttgtgttcttgtgtgtccttttggtctctacgccatgttttagcttatcacagtatggggtcactgaatttgagagctctgtgagattgttttcagatgaagcttctggaaattctactagttctccgatttctgtgacttgtcaagacctggatggtgttggatcgttgaataccacttgtacattgaactcgaatttgcgattcgattccgatgtttatgtatatggaactggtaatctgaacatacttgcacatgtcttagttgattgccctgttgaaggatgtatgatcaccttcaatgtatctggaactattcatttgggtcaatcagcaagaattgttgctggttctgtggttttttctgctatcaacttaacaatggatagcaattcgtctatctacacgacagcattggctggaccaccaccttctcagactagtggaacaccatatggtattgatggtgccggtggaggccatggtgggagaggtgcttcctgtgtgaagagtaataaaacgacttattggggtggtgatgtttatgcttggtcgtctttgcatgatccgtggagctatgggagtgagggaggggttaagttatccacaaagaatatcagaggcaaaggtggaggtcgtgttaaactcatattgacggacacagtacatgtgaatggaactgtttccgcagatggtggtgatgctggagaggaagggggtggaggatctggaggaagtatctgtattcgtgcggtaaagctgtaagtccatgcttccatttgactcctatgtcctatctcagtccttatagaaataattggaagttgatagtacttatctatttggagctgcgacctgactgtaacaaattcttggggatactttgaaatcaattttactacggatttgtcgtgggaatgtgttaaatcaatgttttacatgttaacttgttagttttgtttcgcttcaatctgtctcacctatcatttgaatatgtaggaagggttacggtaaaatatctgcatcgggtgggaggggatggggtggaggtggcggaggaaggatctctcttgactgttacagcatacaagaagatgtcaaagtttttgttcatggtttgtattttttttttgcttcctatcagcgctcatgcaagtgacctaggtcttctacaagctgtttttatcatccacataaatctcagtagttgtgctttcaagtagttttaaaacacttctgaattattgtttccctataatggaaaacttgatgtcctgtttcttgtttcctgtggaattacttctccattttatgctgtgttgaatatttcatcagttcatccttactaactatgtatttccattgtcttaactgcaggtggcgcaagtatcgggtgccccaaaaatgcaggagcagctggaacatactttaatgctgaattagtgagtttaagggttggaaatgataacatgactacagagacagaaactcctttgctcgattttcctacaaggcctctgtggtcaaacatctatgtagataataatgcaaaagttttggtcccgctgctgtggaccagaatgcaggtcagtaaatttccggaatgtctttttttgttcttcttttgatatagtcttgaatcgtattttctactctgattcttttgtgttccgtgtaaacctttataatatgaatggctttctatatttttctttttctttttaagagttgaccttgcaattttcagtactttttcttatcaaaggagcttctatgagcttaatagaagatccttggtctctcttcctttgaatacttagtatgttggcactaccccctatggttgttacttgttatttatttttctgattctgaaggtcggaggtcaaatcagtctttatcggggaagcagcattgttttcgggttatcaaaatatccaatttcagaatttgagcttgttgctgaagaacttttaatgagtaactccgttataaaggcaggttattgttcctaaccagtcagtaagaatcttgtttgtcttgtaccgtcctgtttttcctgtatgttatgttaagttatatgtcctttaatgaaggtttttggtgcattacgacttgttacgaagatgctgctcatgttgaattctgtgattcaaattgatggtgaaggaaaccctgcagtgccttcctctgttcttgaagttcgcaaccttgcagttctaaaggtatacttgaaaattttatcatgtctctttttcttaattggttggattggaagacagattttgactttttcttcttgtagggaaaatccgtcattacttctaatacgaacttgggtgtatatggtcaaggaatgttgacgctatctggtcctggggatgcaattaaaggccaaagactttccttatctcaattttacaacataactgtaagaagttattgtcttaaaatgttaataacttccaacttctgttgacttgtatacctctatgttattatgagatcatgtttccgtctgtttgttaacaaacatttacttagacatagtcatcggtggaatgcaaaactctctttaacagttcataaattttgcaggttggaccaggctctatacttcaagcaccacttgatgattatgaaagcaaaaacgcgtgagtaacacttcctatacgtttacataatttattttgtgaggatgattagtacttgactcaataattaaaaacgtttgacagggttactcagaccctttgtgagagcaaaacatgcccaatagatttaatcagtccgccggatgattgccatgtcaattatacactatccttttcccttcaggtatatttgatggtggttcaaaagtatctttctggcacgagttaacttttgtgatgtatagactttgtactacagactaggtagttacacgagtaaggagtctactatcaataaattattaggcaaattgaaactgtttgctaatataggccaaacaattgtgagttccaatatcctgtaaaacccagagttgtgtgtagtatccctacctgtgttactctcctggagtaaaagcagacttgagtgctacttaataatgattttctcttatatttagcgttgaacttttcatgattcttcaacatttatttttctagatatgtcgagttgaggacattcttgtgagaggacttgtgaaaggaagcataattcaaatccacagggcgagaacggtagtagttactgatgatggcttgataactgcatctggatttggtacattaattatgaaaactcacccttctattcccctttcagcatattcctatagctgtttgccttttcactacagtgggattctcgcttagtcattttgaggaccattctgtgtattcaggaagattaatgtggtttctgattctatacataaattcctttggcaggttgcagtgctgggttggggaagggactttattcaaatggggctggtagtggtgctgggcatggaggacgagggggatcaggcattttcaatgggagagtatgcaacggaggacatacctatggtgatcctgattttccctgtgagttaggaagcggagcagagagtccagataaatcatatgggaatgtgactggtggagggatgataggtcagtactattgtatttcacttttctgcttatatattttctattatttttagaaaatctggtggccaatactcttgaaatagctatctactcatctagcactgtcaagtgacatatacaaatttgttttccaccttttcagtaattggctccatccagtttcctcttttgactcttaatctgcggggatctctgagctctgatggtcaaagcctttggaagccaacagcgaatggtaacagatctttggtcggtggagttggtgggggatctggtgggacgattcttcttttccttcagatgcttgaactctcaaagaattcatctctatcagttcgagggggccggggtgggcctcttgggggtggtggaggtggaggagggagacttcactttcactgggacatgttacatactggggacgagtattctcctgttgcaattgtcaaggggtccattagtaataggtatgcaccattatcatgacaagtgtagtaatctcacttgtgtgcttgctactttctgggtcatttgttttactggggtaaagcatgcatatatacgttgatttagtactatgcagcgtcatggatatgagaggataatggtatcttagtgtgtgatggttgagactctgcctgtactattcccttatgaatattttggaacatttggaagtctgggcctgacagaaatttttttaacctgcaaaacctgtcttcatgaaattctaacacagacgttaaattgttttctttctggtgtcttcagaggaggtgcaggggacaatggaggtcgattcggggaagagggaacaatgactgggaaaaagtgtccaaagggactctacggtacattctgcttggtaagtcttctggtttattatgttgtagttacttcgacactgtccatttatggcttacccttggccaattctgctcatcttttattctagcaattaaatgggcgtaacaaaccacaaaattagacaggcccagtagcgttctgttagcataattgcaaatctctgtcttgtttgcttgtgcctgatacttctcgatatatctggattcatgtattcttccaggaatgccccattggcacttacaagaacgtcgaaggctctgacaaacgtctttgtactccctgcccgcctgagcatcttccaagtcgtgcaaaatttgtatacgtacgaggtattttttctaatagttctcttactcttctattccctgatcttttgtttcttcttaattgggatgtcttctgacggaaggtgctttgaatctgcaggaggagttagcgaacctgtttgtccctataaatgtgtatcagaaaaatacagattgccaaactgctatacacctctggaagagcttgtctatacatttggagggccattgccctttactcttcttctatcttgtgtggtggtagttttgggtctgttgctaagcacattaagtatcaaattgctcaggttgagtttctatggtgctaattccattgaacaccagagtgcacattgtttaccccatcttctgtcactctctgaggtatcgtgttgcgtaaatcatcttctttcaagtcttatcttttctctttaagacatatatatgtacacatattttcatgtcgaccaaacacatgcctgtttcttgtcattccaggttcgaggcgcaaaatctgaggacacgcaaacccatgcttaccgtatgtacttcatgggtccaaacaatttcagggaaccttggcatctgccctactctcctcctggtgcaatcatagagatagtgtaaggacattacttgactgggttgaattctgttgtgattattgtcgttatatgtttgaatgaagtgttgaactaaaaactattggcaagaataaaagagaatctatattgtgactatgtatgtcattaatcccgagtcccgttttcttatactctttgcttatcaatgtgacatcgtcctttggctcactttattccaaggcatgtccactcatagttctggacatttctgattcgcaggtacgaagatgcttttaacagctttattaatgaaataaactctaccgcagcatatgattggtgggaagggtctgtgcacagcattctttcagttcttgcaaatccttgtgcctggtcgtggaaacaatggcgtcgcaggagaaaaattcatcgccttcaagaatatgtcaaatctcaatatgaccattcttgcctccgctcatgcagatctagagctctctacaaagggatgaaggtttggattcttattaactaatataatcatgtagctctaagttctcattttgactgtctgtgtccaacgtcgaagtaggttggagccactccggatctgatggttgcatacatagatttcttccttggcggtgacgagaagcgtgtagatatggtctctattatacagaaaagattcccaatgtgcatactttttggaggagatggaagttatatgtcaccctatagtctccatagtgatacactgttaacaaatcttcttggccaggtaagctctctttgtctgcgtggtttttataccaaaatctccactctgaaatctcctaaacgctctccaaatgactattccagcacatcccaccgagtgtttggcaccggtttgttgctggtttaaatgctcagcttaggactgtgaggcacggatcaattcggtcagcattacttcctgtcattaggtggataaacagccatggaaatcctcaactcgaattccatggagtaagaattgaacttggatggtttcaagctacagcttctggatattaccaacttggtatcttggtttttgttggcgattttcctctgaacactgtaaacagatcactgtcgttcagcagaagtgacgacgagtcccctgggtgagccatgatagattgtgcttctctttgatctaaccttgctgttgtctctttcttagaaattaaaggcattcaacctgcttaatcataaatctatttctaggaacaactctgcatgtccaagcaaatctcttatcgagttgcagcaaaacttgatccaaccaggacatggattatctcggaagaggatcaatggtggaatcaatggaggcctcatcaatgagatttcactagaatctttggagtatcgaagggatttactttttccattttctctcttattgaacaacactcgacctgttgggcgtcaggttacattttaatctctcctaaataattcgtcttatgatttgtttttactattgtgttaacataagcaaaaacaattcttgtggtttatgcaggatactcttctccgttttatttccatccttctccttgctgatctttcagttacgctacttgcattacttcagttctattggcttgcccttgcagcctttcttgctatcctcctgattctccctctctcccttctttgcccattccctgccggccttaacgctttattaagtaaagaaatgagaagagcctcacttactcgtatctacggcctgtggaatgctacatctctaacaaacgtcgtaagtcaatacaaacggaattcaaaacaagtgaccttgttttttcactattgtatcttaatcgcaagtatactgcagattgtggctttcatttgcggtgtcattcattccgggtttttcactgacgagctaccaaacatctggaacgccataaggtattaaatagtgtttctgttctctcctaaatattcgcacacctatcgtaaatttgggaatgttgggttttgatcacatgatactaatctctagcatccatactataatcagtcttaaccttaaacgtaaaccctcacacgttgttggaactagagagacacatgtagagatcttcgccgttagatgattatagaacatcaaacttctttattgattacccgtatattgagtacaaaaattgtgagtaaatgattggtaatggtttggcagggatgatgataaatggtgggtattaccaacattcctcttgttactcaagtcaatacaagctcggttccttgattggcacgtcgcaaatctagaagtaccagacttttctcttctttgtccagatccagataccttctgggcatatgaatctggagcttgaccatcaacatgattataaagaaagaccagcaaaagatatatcttatttttcatgtaaatcttttaaaagtacaaagttcttctcggtgatagttgttaaaaacagttctctagaacatctggttatatatctggtgctgaattaggagttcgccagatcaatggtagttgtagaaactagagcgatagtatgtaatgcttaatgttttgcaacaacatacaaatctggaacacaatggtgactaatgctaaaacctaaccgaagttttaatttaatcaaatatatttcgtgtttatacattaaagattaaaaggtttcatatttccattacatgcaataatgcatgaaggtgataaatacaaataaagattggccacaaatgggctttaagtttaagccttacccaactaacaatagagaaactcacttcactcgccaccgatgcgcgtgaacttgagagtctgagaaacacttgagctacaacatttttaagagtattcggattctctctctcatctgcgacgtataatttccccaatttctcagagagactcaaaatcaccaccaccaccaaatcgccgccatgtttaaacaagcttctcgtctcctctcccgatctgtcgccgccgcatcttccaaatcggtgacgactcgtgccttttcaacggaacttccatcgacgctcgattccactttcgtcgaggcatggaagaaagtcgcaccgaatatggacccaccgcagactccttctgctttcatgaaacctcgtccttccactccttcttctatcccgacgaagctcaccgtcaattttgtcctcccttacacatctgagcttaccgggaaagaggttcgatcttttggtcacattttgttttcttagggtttgatctatgattttgttcattgtggtctttctgtggatacgtctggatattggattgtgtgtggaaatttggtttgtgattgatttgtagatttgtcaaaaatctcaagatttcggatttgatacgctttttatgattcatctcaacttatgcaaatgtgcataattaggtcttaggacgtttgattttggttagatctgacggcgctacattttagggttttgatagcggtacctgagtctagcagcaattgtttgcgttacaatgacgataattattttagtttcatgatttctctcaaaaacaatttgcagtgaaacttgtaaatacacgatcatcttagaatttacaggttaactatgtgtacagtatctgaaaatgttgcttgttacattctttttctcaggtgagttttttttgttagattcatcactgaaaaagttgagactagtcgattaatttactgcttctatattctctgttgatcaatcattgaaatgggatgtttgaattgggattcttaaaagaggtctgttattgaaattctattcatggaaatgatcccaattttagtgtttgtctggcttttttggtttcggttacaatggtattcacatataatgtctgtttcgtatatgacctattctccactattgttatatgatgtgctatatgcgtagactgaatgtcgattataacgccttaatttttatgagttaatctctgtagccagtagttatacatattcattgttatttcatgtagtattcagattcttgtagtacatatgaatatcagtacgcgtagatggtgcattcgctgtaggtagcttaaatcctgccagccttttttcttgatgcattttccaaccatcttgggctgcgctatcatcttcatattctatttatacaaaattaaaacgaaccgctgatcctagagtttcatatcttatatctttaatcataactgaaagctaattggtttctcttcatatacttgaaggtcgacatggtcatcattcccgcatcaacaggacaaatgggtgtcttgcccggacacgttccaacaattgctgagctaaaacctggcatcatgtccgtccatgaaggcactgacgtgaagaaatacttcttgagcagtggttttgcattcctccacgcaaattccgtcgctgacataatcgcggtggaagctgtgccgcttgaccacattgaccctagccaagtccaaaagggtttagctgagttccaacagaaacttgcttctgccacaacagatcttgagaaagcagaggcacagattggtgttgaagttcacagtgccatcaacgcagctctctcgggctaaaagaaggtttctttctttatttcttcgaagaaacaaaaaaaaaactaaatcatttggcttttcaagtgattagtgaagtccctttttactactgcaaaggatggaatattgattcttcttgtttaatcgtgttggacttttgtttgaataaatgattttgtttaacgggcacaaaaacccacaaaagtttcttgtgttcatatctctgcacctttgtttttgtgtatgactttgttgtgttgagaaactaagttggaatttctttaaggtttcgtttactaatatttcttgtaacacctgttttaacttgtctttaatcgcttactgtgttttcttcttctacagagccaaaaataataaagattgtcgggttttatgtgcgtttcaatttgggaaatatgagaccaaaaaaaaaaaaaaaaaaatctgttaagaaatagtgaaaaattgaagatggtcgaatccaacaaacggtagtgatgggatggatacaacaagttaacgatgaacgctgaatcctgaaaagattaaactataaatgggccactaagtaaaaaacaatatgggctagttgaaatcatgaggagttaacgatggtgatgggatacaacaagttaacgatgaacgctcctcaaattttccactcgcaaagttagcggttgataataactcgcctaattctcctcaaatttttttctcataagtgttgcctttcgctaaatcccaagagtaatcatcttttatgttgaaattcttatgtttaaagactatctgacgctcaaattaaatttgttcaacgactagacatgtagttggtttaacgggaaaataaatggtgataagtgttcaaagcttgatcgagaagtggtcaggaactcaacattattttttttgagataagatgacaatatgatgtttccattgtgggattgaaaccctctaaacagcaatgggacctcggaggatcgacgaaagaagaagagacaattgaacgatcgcgatcttcttcccaaaatgtaatatggaaaatgaattccatatgatatctatttagattacggattcaaattttaaataactcctatcatgattaataaatcaaatttcggcgggtattgagtttgtaaggagatggataaattaaattagatgataagatgataaatttaagcccattacatacacaaacatacaatataggaaaggtgagtggggagaagagaaaaaaaagggtatgcaaagattctgattccttaccatatgggccaacacagtccgagtctgacaatatggtcttaaagacggaagaagtaaggatttgtcataatttagagtagttgttccgccatggacaacctccttcgaatgcattttccaggacgtcttccattctctttgccaatatcacctgtttccaccattcacaccaattttaaaactactcaaaaacatttctagtgtttggtggttacccggcagactaatccgcaagaggtaaccagggtcaaattaaaaccgggtatcatatggactgaactaggccggagtagcatagcgcaacatttctacccccaatgcaataccgagaacaagactaaaggttgaagttaacaacttacctccagactggaaagtacagcggcgggtacttcaactaagtctttcgagttcctttgcggtagaatcactcttttgataccataccggtgtgcagccaatatctgttcatcgatttaacatatgttttgaattgtcccaaaaaccatgaatgatggtactcaattttggtttttatttttaaccacatgtgaagctccgggatgctagaactagaagcagcttaccttatctttgatgccaccaacaggcagaacgagacctctgagtgtcatctctccggtcatggctgtgtctgctctaactcgtttctgactgaacaacgaaaccaaagctgtcaccaaagtcactcccgcagaaggcccgtctttcggcactgcaccagcaggaaagtgaatgtggatgtctcgtccatcaagaacattcatatcccctgcaagtgccagcttaaaatccgacgcacgagctcttacctaaaaaacatcaatagattatcaactaaaaagttctcaagtattttacagtctgtaatgagcaaggtttcaagtgaagataatgttacccatgtaagagctaattgagcagattctttgataacatctccgagttggcccgtcaaatgcatttcgcctttgcccaccatagatgtagcctccacgaactggacttcaccaccaaaagtagtccaaacgagacccactgaaacgccagctgacgccactcgatcagcggcttcactgtcatcaaaccttggaggctgcattggacccaacaaaaagtatgcggttaagtttcacaaatttcacgtttgtaccacaatttataacagccatcaatgattttctactataagaactatttagaagtgaaaactgaacagagcagaggacagctttaccccgaggattttttcaagcatggtctcatccaccaccaaagctgagggactctggaaggtgcctccaatctcatgatcatttacacccattggaataacttccatttccacttcgcctccttcggccattctaccattaagcagaggagatgtaagtttctgcacatctttgctcaacggaagactttgttcatgctctgccaccatcacagcagctgcacgagctaaagcagccaagttcctctctagactacgaacaccggcttcccttgtatacctctgaattatattctttaccatagcctatggcgagcatacgaagaaactgcataagtgcaccacacgagagacaattattggcattacatcaaaaatttcaaagataaaaacctacctctggaatcttgaggaactcggaactaagcccatgctgatctagaactcgaggaatcagatggcgcatagctatcttaagtttttcctcttgcgtataaccaggcaactcaattagctccatcctgtctagaagaggaggtggaataggttgaaccctattagcagtggcaacaaaaaccacctttgataagtcatatggaacattcagatagctatttttccgttaagggtaacagtcaatacagacaaaagagtgaccaactaaatcaagcatcactggacatctatgaacgaatatagttgttgcctaagagtaggtgaaaagcacaatttcaagatttaaaactcatgcaagaaactttcagcaagcctaacaatgtctggacgctgaatctaatatttatattgaataaggaaacatgataggatactgatcattaaaagatttgttctgctctggatccaaaacctcgagcagtgcagaagctggatcaccccgaacgtctgagcctgttttgtcaatctcatccaacagcataactggattgcaaacaccaaccctctaaaatccaaaacataagagtgaaacccagtgataaaatatatcatataacaaaccatccaacatgactgtaatcaaactggacaatcacatatcataagagcttctactaggcagttttgccaattcctgttcagaaaagctaagtagcaatcattttgatgatctataacactttctgtcacttatacttgtcaaggacagacagaaacttatctgctacaacttagttcctgtcctaaaacaactccccaagttcctcatcagcataagctagttacgtattcttagaaaacaagactcacctttaggccatcaatgaggcgccctggcatgcttcctatataagttcttctgtgtcctctaatgtcagcttcatctttcacaccacccaaagataagcgaacaaattttctacctaatgcagctgcaatagatgatgccaaagacgtcttgcccacacctggtggaccaacaaagcacaatactgggcctctcgcatctggtttaagctgcaaacgtttcaatcaagataaaatcagaaaccagaaactgaagatgggtcactgtaaaataaaataagacaaacacaacaacctttcgaacagccagatattcaatgatccgttgcttgaccttggctaaaccatagtgatcactgtcaagacgttcttttgctgcttttagatccaactcatgttcttcgcttgccttatcccaaggaagatcagccaacagctccaggtaaactcgtgaactgttatagccaggttgctgaggttgcatcttttttagacgcctgcatcaggaaatgaaaaagaaaatcactaataaagaaattaactcttcaagttggtccacagtcacacaccatcagctattgtgctctagcaaagtatacctcaattccctttgagcatgcttccatatgtttgacggcattcccgcagcttgcatctttctttcaagtgcagctacatcatcttcatcatcatcgttgtcaccaagctcctctttaatagctctcatctgcaaaaaccagtttcattgctacacgtcataccgctgaaggaaaataagctctcaagactcaagttgacaaccagagccggaagaaaccaaacctgctggcgcaagagatactccttctgagactttgacaactggccctccaccttctgcgtaatcttctctgccacgcgaattgactgccataagagaacacaacatgactttataatgcctaggggtaaattaaggacagataccaaaatatgaatatcaagagccaacctgcagatgccgatcaactagttcagtagcctttgaaagtcttactttaaggtcaactgaatccagcatagatagttgctcttcaaaactcatctcaaagctagcaacaaatatgtctgctagtttatggataggaactgtctccaaaagcacttttgtccttccaccagttttttgtttctgaaacaagaatcaatgcatggttttactaattcaatcaagaatgatccagattccaccagatatagattatacaattgctcccatggaaagaaaaaatcccaaagaagaatcaatttcatgaaaacagacactaatagcttcagcgttgtcaatttgttatcttagaaactctaatgctgaagcaaaaacgaaacttgaaaaaggaggaaccaaaacagaaagccgtttactttcactagttacctgctcaagcacagagacaagctccatagctgtggttttaaactggcgtgacagtgctacaaaatctggatcttgttttacttgctccaactctgcagatggccagaaaggaaccagctaaagacattaatgaactaccatgtcgcgtaatgtaatagagaaataaaaggtcatgacccaacctgaaataagccagagagattatcattaccaaataagctctaagtcgaaactagtatcttagagaatctctaacccccaataattttcacaggcataaacttatctatctattaagcatacacagagctaaacatatattgagatcaaagtctcagaacatataggtccttaccatataatttacaagacaggaatttctaaactagagagcaaattgacagcaataaacagtagtcactaaaacctacaaatgaaaaaaatatatcttacctgcctttgtcatctcgagcgatgtaatccgagcaaccgaatatggtcctctctttccaagctcctgaacattaaacctgctcagaccttcaaggacaaccacatacgtaactcttccacttggtttttccacccctcttgaaagatgcagagcacgagctgctactcccctgaatattagaaaaaaaaaaaacatagctcagaatatactgcgaatcaaaccaaaatagaaatcagatcacacattattttgaggcaccttataaactaagtaatcaaagcattcatattatataagagtctagcaagtgcaaaaagaaaccgaacctggtgtgccattgaagatcctgctgatctttagcatcagacttctgagcatctgttgtaccaactagaaatttcaagcttctttctccagaatcacttccagcacctaggcaaaataaatcaaatcaaaacatgtactcctatcgaatcaaattcatctagtatcataatcatgattgccagtacctggattaatcatcgtcccaattgaagaaccctcggcatcatcacgaacaggtaaaatgccaattaaacctttctcttctttctgccatagctcttgctccactagtgtgacgctgaatttggaaaacaagtgaccaaaccaacaaagcataattcgatgattaggcttaccaaaatgttgtatatgaaaacgtctaaccaattaacgatcaatactacacaaaattattcctaattcatagattttttcgcactatttttgatttttggaactgactcgaaccagtacaagcatcaaattacctaaaacaaacgcaaattccagaggaagaagaagaaaatgatcgaagcgtaagaatgttaggaattgagaattcacctgctatgagaagtacaacggattcgaataatggcgccaggtaagagaaccttattcctgaaaggaagaatcgctaacctactcgggagctccactgtttccgccattaacgtcttcttcttcgagaaacaaattctcttgtaaataagatcgattttgatcgtcttttatattataataccgacgcatttcttcgtcgacattattatatacctttatctgttttttcttttgtttaatacatattgtaatgaaattcgtatttagtccttatattagtattttcattgaaacaattacccctactatttatatatttaaaataaaaccgcattcttgaaattaattgttacttcaatagttcggatttgattagttaattaaacaaaatgtaaaattattttacttttaacaaagcaaacttactattttttgtataaaaaatgtattttaggttcgatatctttatcaaatttgtaaaatatttttaattaatcggcataaacaacagttagacaaattgttatattcgatttatttacacacatgtaaatattattttctatatgttttataaatcctagtaaaataaattaatatttagaaaatcgacattcttctcattgaaataagatagttgcaaaacatggatttttttttattttttttttgctttacatcaaattattttttaatttttgtcaccaagatcttcctcacaaatccataaaagaccacaaaatattattttttcctctttaactagaacatgattttcaattcaacttttttattttgtggttttttaatcaaatttcatgagctaaacaaattctcttgtaaataagatcatgattttatcaaacattatgtttttaacaaaagttagaggaagaaaagtattgactgaaaagatgagggatgaaattgatattatggaaatatggatactgatatgaaaattcccaatgatgaattcatttatagccgttggatcgatcggataagatgggaaagacaaaaacgagtggcatcaggtagacaaaacataagaagaagaccgagagttcttgggacccatgcttgtaataatgccacgtgtcagataaagataaggtggaagctggggcttaaatgtctacgtgttatatccacagctactccctacggtattccgtatacatacgcgtccaggtattttttatactactattttcgcattttatcttttatatgcatgtacggttactgatttattttattttttaattcatggaattcagacttatacatgaataaaatgggtgacgaaaatcttattcctgtgattttcgtatgtcgaccacgagagaaaataaaagaaaaaacaaattgggcctttctgaaacaatgagactaaggcccattacattacccaatcaggtaatcatagagggaaatgcaatatatgtgttattaggctctagtgatttcactgcgtgaactgagttgatccattatcccatcttagcattcaataaacaaagcaactttttgaagatgcagcatctttctagattagagaagttcatatagaaacaaaacactaattagaaaatgtgtctataacagagcattagagagatatctcttctcaaaaagaccagtgacttgattagcaacacccacataattacttgtcctggaggaatcctcattaaaggaatagatgatcaaacaaaaatgagagggaatgaagattgcaagaaaaaacagattaacgatctctcttcacgtgtcacttataaccttttctttaccaaaaatcaaccataaaaaaaaaaaaaaaaaaaaaaaaaaaaaaaaaaagaggatgatattttacttattcattccacataacagtatatcgtgctataaccacatttagtggaattaatggtcattgacctaatattctctcaatttatagcgacacaccaaattatccttttttaatcttttagatttcttcatggtgctgatttttagttcacttttatccataagttactactaaatttttctgttctacgtacaaatgacacataagattgataagcttttagatttatagaaagatgatacttgcatcgtcaatatgggaggagcaatgactaatcgatgtaaatccgacatcttctaatttttcgtctaaataaattattgcattttgatgtttttttagattaggaaaaaaaaaaccaaacttttggtccctaattttctcgagatgtccataacaagttaaatcagccctcttcccaccgttgagattcaaactcacgtacgatattgaagaactttttctctaggcgatccccaattcagctacttgaggggttataattactttgacgtttcttgtttgattaacccataatttgttgttaaagcttgttggatttaaattattttggccataccctaaaatatggttggtccttggtccccctcataaaaggttacaagaatttaaagagaagtagaggatggattgatggttgagagaatctaacaataacaacaacaaatagtattcttatttaatggttttccttctttgccttatcaaaccccatcttcaaacttctccttttattttccaccaatatcacctttcgttttttgttgaagatttggtatagatatttcaaatcttacattatactttttatatggtacataacaaagtataaatgtattctagtggttttattgggtctattgatatggatgagcaacttcagtggacatattagttaaagatgctttatttatgatttgttttatgccaaatgcgataacacatgttatgaaatgttgtttttgttgttaaaatgaggaatttaaattagtgacaacgtttttacacccgaaacccaaatttaatacaaaagttgaacaaaatgaggaataaccataccaggcaaaaaaaacaaaaatgttagtgattttatatttatatatctatatatacatttttgcaaccattttgtgaaataaatcaagtagttcggacttatttacaatggctaccactggattttaatatttgtttttgataattaaaaaaaaaatattcgaaataaatatttgacatttaacaatcttccctaaatctctccacattagttactaaaataaaacttccaaaatatttactatcatttaattacttcaaaattatcatttttgatattgcttttctccatgactataacaattcgattataatcatcaaaccgcagaaatatttgatagcatgtaattactacaaaattacaaaatatttagacaataattcataaacatatcataaataagatcaatattaataaaataaatagttttttacgggacgggttggcgggacaggtttggcaggatgttacttaataacaattgtaaactataaaataaaaatattttatagatagatacaatttgcaaacttttatgtatactaactttaaaaaataaattgtttccgcggtgtaccgcgggttaaaatctagttgtcacataagaaagtagcaatgcatataatcaaaccttacaaaaaattagcaatgcatagatatttgttttggattcaagctatacatatacccaaaactaggatgcttcaaaactcaaaaatggatcaaaatgattctttagattaagtcgaatcttatctaagatatattgaacttgtgattgtagttttgttattgtttaggttttggtaattggtacactatacttttaaaaaagaaaattatgaaatatatatatttttgtctgatttgattttgttaagtaccaaacgaatatgaaaattgattcatatacacacaaaaaaaaaaaaagttggtattgtctttaaaattcaaccaaatggacgatgtaccttgtttgtctcgtctctgaccttcttgcggggaatcatttagtcttgaaaattcaaaaaaaaaaagtgggtccaaaaaataacattatcaaattaactgattggcatcactaatcccacatttaagtttatattcgtgatatatacaaaagataaacatattgtatagagtacgtaaagattatcaagattttcggatccattagatgatagtgaagatgagtaagaatccatacatatagaattgacttgatggtgatgatgatggtaatggatacaaggattcatagctatccatgttataaaaaataaaacaaaaattaaagaagagtattgattaattagtttggtttttcttgaaagctacaatttggctaacttccgaaaccttttgattaataaaatatatatagggagatagaagacacaaagtgtgtacaaaacgctaatttgtttttacaacaaaataaagtaaactttaatttacttgtttatttacatataacaaacaaattgtgtgttacacacactttacgtcaatgatctttattttggccaagtgaacaaattaaaattggtcttcatgatctaattttcatgtaaatgtccacaaagagattttattggtaatttgttaataaagaaaccaaatactaatcttaccatgcattcacatgttaccactcacatgtcaccattgtgcatgcatttaattggaccgttaatttatctttaagtattctaatattttcgtatttagttaggttcttacgtgagaccatgacccaaggcacaagccacaccttttggagaaagaagaaacaaacagccaaataagtttttttaaaaccaataatacaaaattgactcttcttttgtactacttctcatattttcaacaaacaaagatgggctcattaaacagtaaccaaaaaatgataaataatgaattgataggctcaacatccaaaagtaaacttcatatggtgtggtgctttaaataaataaataaaaattcacaattagtttcattaatccataaagaaatttgacttagaccaaatcatgtattggctcaagagatgccattcccttacatcaatgtttttgcctacctgtctagctcttgccaccacatttctacttctacaccttttgtctatatatacacaccaagaaaaaagaagagaatatatatacatatctatagtgtgtgtatggtccattctcatcttattatcttatttgtgtaacagtctaatattctaacatctaccattccttcttactataattttcaaaataaataagtatagttttcgctgcaaaataaatgtcatttttaccacatgatacacttttatgtttgttaaagatctatgatatacacgtatgtatatgtttatatatatccttcgttttgaagaagacggaaacgacttttttggttgagaatgtgaaaaattggatagtgtgaagcattattattgttactcatgaggaaacgtgaaggtggcctaaagggataatttttaaaaccctaattaatgaaaatcaatgatgtccaattgtgtattttgcatctaatcaaatctacccctttgaatattgactcttccacttttttatttatttcttaatttttatttaatattatatagtttccatctttctatttttaagtaagtcaccattttttcatcatggccaacacacaaatccaactaaggctaaaaatgcacctatatatacatgtacaagataaacattaaacataaagtcttttaagtaactaataacatatcttaacatcatgtataacttgttgttttacattcaccaagttattactcccaccctagacatacacccattgtttaaagatgccttgtcacatgcaccacccataaagacacaaaaatttcttttaaaaagaaaattgacaccatgtaagtttcgctgaaacgttcgactacgaacatgtctcatggtaaagattaaagaatgtccggaaagttcaccgtctttgtatattttgttatatatttgttatatatgtatagtaaaaaaagaatatgaaggaagtatgaaaaatgagattgttgggtgaggactaagagagaaagtgaggctaacatgttttaggaagagaagaattgaatgttcaagaagttttgcccaagaattcacaatttggtgtggtgggctcctttaaagggcaaagaacaaaagtgtgttatgtctccattactattttcaataatatttagtcttttaacaatcactactatttctctgttttggtccaatactccaatcatatataaaaatagtccgaacagtcgatcatcgttatacattaattcataatagaaattgattttgcattaaccattttgttatatcagcatcacaagttttatatggatatatataaaaaaatgtctatggcagaattaagtttgaaaacaaaatttctcctatcatcatatatatatgtttcttcctcgcctaatgttcaaaactaattaaactttggaacttattaggttaagccaagagcaacgacccacctaatatctatataatatattacatgctcataacttagctggttaatttgataaaacttgttgattatctttgtttagttgttagatttctgttccatcatgatactttactaaaccgaataaatatttctccatctattattatatacacagttcgcgcgcaaatgtatatcatgtctttatcatggaaaaagtcagttacctgcaataacataatttctaaaattcaatcagatgtaacagtcaatttaatttgaatctacctaatttattatcgtgaataaatatgaagtgtattgggtataaaatttttaaaatattgacaagaaaatttcaagaatagtaggaggagcagtgaataataaatttacacgaacgttctactcttttcggagaattacatcattttttttcttatagtggattaaacaaatcttaacatagtaatttttgaaatagatcacctaaaccaaagaaaagaagaatagtaaaaaggagacggtgccgttcgatagcatcaatcaaagcagcaatgaggaaacacgacagagagtcttctcgtgagaaaaagtaagaaaacaccaaaaaagattgagaagataagtttttagtgttttggaaaaaaattactaatttaaaaaaaattgatttggtatatgcatgcataagtgattaaggactatatgattatattaatttaagaggaaccaaaaaaaaaacatgccgaaattaaataccttttaaatttcaatgatgtgtactctacaagatatctcatatgaatcaccgaatatgtagattttatacgaaaataacaaaatattagttacgcatataacatatttatattcaatagaactataagtattttcgttaaagcttcaaaaatttatagagaaattacctagcaaattttatattacttatatttatataatatatatatatatatacggatatttttctattgatattgaattaggttttcactgaaaaataaaattttctattttccaactcaaacacatatatagcatatatataaattgaatagatacattgcaactagttaccttcctcattttcataaattagtaaaacaaaatacaagaaactgctaagattgacgaatcaatacgcgtatcaaaaaaaacgaaatatacgtttccattaaaaaagaagaaaggtaaaaataaataaatgtagatgcgattcaaatattcaaacatagagttatgtaataaatgagaatcatgcttactatgtgcatataatagagagacttattaaaagcccttcccttaaaaacttcccaattccattcctcttcctcttccttctccttcttcttcttcttcaccatttatttctcatcatcatacttataaaaagtaaatcagaatcccgaagcaaactttcaatcttccatcatcatcatcatgtccgatacacatacatacatacatatctttcgtgtgatttatacttattaaagagagattctctcattaagaagaagcttccttctttcttttctttttcttctctctgttcatggcggttcaagctcatcaccatccttctactctcttcttcctcaacaacggacaagaagggaatgatcagccgcataaatctcagtttcattcaatcaacgccggtttgttttctaaattctcgtttttgttgagaaatcaatcggtttattaatatctaaccggtgaatcggtttatctttttgggcgggtaaaaaaaacaggggttgatacaagaaagcgagcgagagaagtttcttcggtgattgatttagatatcacggcggctccgatgaaccctccgccgcaaactccaccgcaagttataggacgtcgacaaaatccgaatgttgtatcaaccggtctacgtttgtctcgtgaacagtcgcagaatcaagaacaacggtttttgtcttttccgataaccggagatgtcgccggagaaatcaaaagccaaacggacgaattaaatagatttcttcaaatccaggtaactattttcatttttttcattttgttaaaagttttatttattgaaaatgatctacacagaaaaacaagttttaaattcactggaaaaaaaactcgtataagattcataaatggtatagtgacaagtttttagaaattttttgtgataatttggttagtcaaaacataaaatgtagtattaatttcaaaataagattaaaaccattatatttttttgtcgaattaatttttgttttttgctgaagggagagcagcttaagcgcatgttagctgaaaacagtgagaggaactatcgtgagcttctgagaacaacggaagaatcagtaaggcggagattaagagagaaagaagcggagatcgagaaagccacacgtcgtcatgtcgagctagaagcacgtgcgactcagatcgaaacagaggcacgtgcttggcaaatgagagcagctgctagagaagccgaagcgacgtcgttacaagctcaattacaccaagccgtagtagtagctcacggtggcggagttattacgacggtggagccacaatcgggaagcgtagacggtgtggatgaagctgaagacgccgaatcggcttatgtggatcccgaccgggtcgaaatgattggaccgggatgtaggatttgccggcggcgatcggcgacggtgttggctttgccgtgtcgtcatttggttatgtgtacagaatgcgacggctccgtgagaatttgtccgctttgccttagcacgaagaattcaagcgtggaggttttctattcttgatgggccattctataatgggcttatcaggcccaatcaaatggaatttaataataataataaaaatataaattaaatttatcatttatataaactatatatgtagtatactgttgagctcattattgaatagcttgagaggtttgatgtacatagccaccacatgcagtgagcttcttctttttttggtctttaggaattcttttgatttcgtaataaatcaaccttgattgtttaatttttaattactttacatatatagcatttgatacgatatgatttatttatgatgttttagtagaggatgagacatgatttagtattattttcaaatgttttgtattgttataatatttgtattctaattaagaatattctagggtttttgtgtttttaaatatctatttgtataaagcatgttcattatttcttgtttttggttgagctcaatgtatttttatggaattttaaactaagcgaacaattatcttaattttggatattttttcataatcaagagatcctcgaaccggtctaaaccgggctcgttcgattttgttttgtaagagataattacaattaaattagattttatgtcaccaatataatactttcttatggagttgtgtctcctatgtggttatgtcaccactggagctcgaattggtgcctactctgaggaattctttcaccctgacaaagtaatctaaattactttttttttttctcattcaggctaaacatttatttaatatatagagaaaaaaggagaatctaataggtttatataaaccatatgagaataaatgataaataattctttttaaaaacaatagtttctgaattcctttctccaaagccactgagtatattctcttttagtccctttcatgatatgtaaaattcaatttgaaagaaaaaggaataaatattgtgagaaactcgtgagttccacatagttgtcataagccaaattagccatgcacgacctacttcgagtctatacgctcatttcatgccttttttcaaactaataatagtccatccatgccaattccaccttcaattatctgaaagtgttatataggttgctcgtattgttttctagataagttttcatattttctgcgatatatatctaacctatgcaatcacaattgaacaaaaaagaaaaaaaaaaagaaaaaaaaaaagacaatagcaagtagattttgtcttttttaagaatattaaattgataaacctgcgtgaccaaaattataaattgataaacatgcttgtaaatttagatagacatagactttaatgaattcacaagtagattttgttcacattttaaaatggcaaaacaaatgggccattaagtcagtaaacatgagactgcttttgtcttaaatcaaggaaagtggaaaaccaactcatacctacagaaataaaatcaaagatgattatatattccatttcatgtctctctagtctatacccaaagtactcaatgctatttcattaaattagtttatatatgagtacaaatataagctccatgttgtgatatagaacactatatataaattagagggtccatgagatagacaatgatgcaaagacatggaggaacagtttgtgaggtttgtatatatatagatgatggctataagttgctaaatgagaactgaaatacaaataacttgaaaacttgaaattctggtttgataaaagaaatgaagcatttctcacgaatgaagttgatgatatcatcatagcagcccctaaaatcgttgtagtaaatgaggccgtaaagcccaacaaacgagagagaaatgacgaaagtatttcaaattagcaacaactcataaagcccataacattttgggttaggagcaacagttttttaataacataagttattgcaatttactaatctacattagcaacagcccataaagttgtgaaatttgagggaaagttgagtggtttgatcatgtgctttgcttacagtccctatatcacataaattagtgaaggctgttgctgtgactgtttgatgaaacaggaagacgacaaaagtcaatagaccacaggctaaagactgagacagtcacggtgcttccacttccggttaggactgatcttcagatagttgaccctagcttatttactcaagctcctccctctgtacaacttgtctcatacacttggaaagagcaaagcagagctgcttcctatgactcatagcctatgagtaaagagaacagtaaaaacaggaaactttgatcaataaatttattgataccaatgggaaattttgttacattttctcacgctcattcaaaatgttgacatatgtttcattgcatgtatatttgtagatataaatctattcaaattgtgttgttggctttgatttaataatgcaagaccaagttctccactttccttaggaatacaaattgaatcccagctgtaatttaaccatagaaaaagattttaccaatttgaacaatacttcaaagttcaaactagaagaatctattcatagttcattatccgtgatatgaagtatgaagaagtaaatgctagattggtaaacattatatgatattttatttaaaacattcataatattttttataaaaaattgttgtcacatatgtactttgtttattgatcaaacgaagataagttggaaacccagtccataaattagattgtccaaatatgtgcggtgtttagctaatgctcaaaagtcttatttaagacttaaagagtaaatcgtcatggttgatccaaaaccaaaagttgttaaatagggatagctttagccaacctaattttatggaatgtcaaatagagcaagcgtgttcttggatttatcaattttgacaaaaatattcactcaatttataattgtaaagatctgtattaggttaattgtttttgtgtgatgtatttggtacatatacctcaatatggagagtgtagatcaataatggcccgtggtgcgccacaattgtttctcttctttttctttgtaaaacacatcacatgtaacgaactcagcaacgcaaaagcaattataagtttaattatgtttcatgcattattataaataaatatctagaaactatcataagaatgaatacatgtgcctagattttttacagggattgtctcattatattcgttcgttaatatgcgtaattatatctaattttaatcaacaacatccttttctattattaatttcctttcttattttatagttttgcaaagacaaaataatataattctgttggcgagattcgtatcaacttgaacgggcccgattcggtgaatgtggagataggagaatcagtttttaatcggacggtccaaaatagatccaaaagcttatagactagattcattgtgaagcaggcaatttctggtcggtcaggtcttacgtgtcacgatttgtcaagccttggttttacacgtgtactatagacatccaatatctgaggacaacgaatgtaaaataccatatattttttgtgtaataaaaatcgatttgttacgtcggtctaactatttcaaagatattatatagtaggtttctagagacattaggtatttaatatcttgacaaattgtctggtgaacttttttttgctaaattggtgaattatttacttactatgttcgtcgatcgtcactagaataatgggattatataaaatcgtaagcaaagttattcgtttactgtatgcatatttttaggatttcatgcatatgtttaggtatgcaaatatgtttttttaatatacataaacaaactattatttatttataagtttaccactaaatatgtgacatatattttgacactctataagatcatctagcaaagattatggtacctatatatttattgaagaacatttaaagtcaatatatttttctatatttgctattagtatgttcgaacagttgagaaaaagtaggttcaaccacacaaaaatgttcttcttcttggcaacaagtctagccacactttctaatatttaatttgaaaagaagaaagtttcataaatgacaactgagtctagtctaggggcgatggatttccgggaaatgcccggcaaagaggagtggttgataaaaaaaacctcattaaaaaaagagtacttttgctattttaaaactctacttccttattttagtttcttaggtgaagtctagaagcattcattattggaaatgacatcaccatgttgaattttgttgtcagactgatacacacaagttactcacgagtccatttaaaagttttgtatgattcaaactggagagaaaagtacttgcaactttgcaagcactttagcttttcgtgttacgaatgtaagtttgaataactgaaattcaagtaaaacacttaagcgtataagtgtaagtacacacacgagatcaattaacttttgttatttacacatcaataatgattggacatttggactctgtaatacaactaatttatagtgttaataatctcacgaaaaattgattatcatcgacactagtaatcatatatcagagtggttctgcggaatagcaaacaattcgaggcaatcaatggcagagaaaggaagagtcactaggtacttcagaaaaatgggacctatactcatgagtttggacggtgagtccatgtcatgtagactgtagtgaataagaattaaatattttaccacaattttttaaaaaagaaaattagaagagattagaccattttgattgagaatttttcacgaaagtttttaacaattaaaaaaatataaataatataaatgaaaaagagaatgttaaattcttttagatattttctataattcatcatgatttcttactattgatttaatttgttaagcaaaacaaaaattaaatcatataatcaaattataatattaattatttttttgtttgaattttttttttattgatggagatgttcttaaaataaaaaatgaattttatgaaaaagatagaaaaaccgatgtaaagaagcgatattttgtttttttcttaggattatgttgttttgagttcgaatagtgtgacacactattaccatcataaacaatattttgacacatcattaaaattattttataaaagaactaatgtataagtaaaagaaagatatataaattggatttgtatactaataaattatatttgatgaatttgtcgaaattaataattataagagtcatatgtcaaaacaatatatgaggaggcaaataagtaattttatttttaaaaaattaattttataaatatttggaaatagatattttatgtacacaaacataattaggtaggtttttttttgttttttttttgaaaaagaattaggtaggttttagttcggagattgaaacacaaacaagtgggtttcggtatcatcggagccttacgcaagtatgcgacgtcaacttgttaaaatatttgcttgcacgtattcctttgctcgtgtaaggtgtatcacactccaaacccctcttattgcattcccatcaatcaataaattattatactgttttatatagtttaacgaatttgagtatgcaaactcttttatttttttggcaattgctagtctaccgaaacttgtaaagtattcattcataggtaatttacaccgcaagtttaaaaaagttggctaatcaatatttcaaaatctctgtctacaaatatttacttgaatgattaacacacacccacgcatataactatatataagtataacatatttgtttgacaaaaatgaaataaatgacagttttgcggtgtaaccgtataaccaacaattgggacggtgatggtgactcggtggtgttaatggtgtggactttaaagttcgtttgaggacgttgtaacgtaccaaatatatcactattttaagaagcgtatttctaaaacttaaaaatgcaaacttttcaaatatcctaatgaaaggatatttacaaaaagtatacataaaagaacagaaaattaactgacacaatatattaatacttatgcagtacattagtaaaaaaaattacatcattattcttatgccttttcattttttatctttcatcttaaaattggttaacaattaaattaccgagttaaataaaactttatctagaggtagtgataatattaatcttattggaagagattcatattttgcacgttatagtaacttgttaatttttttatatgatataataaataagttaagacggtaactataaatatatcacataaattataacttatgacgatacaaaataacttagcatgatataattataaacttattgatataaatattttgttatcatgttaacctaataagtattaccgagatatttgttatcatgttattctgataatacgttatctgctaactattctgattcatgtattttttacatgattattaagtcgcaagtcaacttttttgctttatatgctaaatattttgttactttttaataataatgttatcgtcttcgcatatatatccgtataataaccatattgtaactatgacaattttgtaattaatccaaatatgaaagatacttttggtttatattttttttctctttcatatttacctaatttttaaattatctcttctacttttttaatttcaacttcttctaagtatataaatttaattcacccactagattttaacccgcggtataccgcagagacaatttattttttaaattagtatatataaaaatttacaaattaaatctatttatttttattttatagtttacaattgttattaaataacatcctgccaaacccgtctcgccaaatccgtcccgtaaaaaaaacccgccgtacaccactaatttaaatatataattaaaataaatattttatgggattgcaattgtattttagtttgtcaaacaaatatttgttttaaatagttgccaaaatctagttcaaattttggagaaaaaagatttattggatagataaagaatgtatttaggtgtgttttgttcattttaagggattgcaattatatttttgtttgtcaaatatttattgttttaaatagttgctgaatactatgtgcgtgacatatgagattggaatatatttggaatatttttagtttgttaatcaaattatttctggaaaaaaatcaataattaaaatggcagtcattgtaaataagtctaaacttcataatttatttaacaaaatagctgcattatatagacaataaaatgactttttttttcctttgtttctcatatattgatagatcacataatttattgaattaatatatacaaacaagagttccactaattcttatttgttatttcgattccactattcaacaaggtccacactattattagaaattcaaactatacttaccataaatatcgaaatcacaactagtcagtcacacacctattctaacattagaaaaacaccgacctcattgcaccactattatttgtagttgtacctcacaaagcacctccctcaaagtcttcgcaaaaacgtcacccaccaccacgaaaattcataaccaaataaaacgacaattttgtaattcttgatttaataaaaaaattaagtaaaaaacaatattcttaccattttgtcgccatataataagaagaagagagacacaacacaacacaagtagtagaagtggtgtagtgattacggtgtaacgcttattccaaaaaccccacgcgcgtagggcccacctctcccccgaatccccatgattttctttaacgtctctcgagtgctggtgggacccttgttttatggaaccctgatgtagttttatgtactttcatttgtgacccttatacttctgttaattacaatcttgccgctattttgttgcttccttcttgtttttgttaccttaaaacttttgtttgaatgccttcagaaaaagtttacttctctttagacggatgtgatcacttgttcaatgtaacaccaccgtaagttacagtggttaaaatgtctggtagaattatagctgtatatatttattgatctctaaaaaattagcttgtagaaattattgtctttaaattgttagtaggatccatccaactactacttaaaaaaatctgattagtataagatatatttatgattaatagaaaaataatttttgtacaagagattaataactaagatagtaaaattctatcatttcatttctaaaaccaaaatagatgaaattaataaataaataattattgatttcatgtgtgtttaaacaatttttttttgtatcacattatgtaaagtaacaagttatcaatttcataaaaaaatatttacgataattacattgttttcttaatttttttgtcgactatatatcttaaaaataatgttaaaaatgcaacaattttgacagtaattcctaatcatacgaaaattttcaaactttgcaacttcttcatgtattattgcattgacaatcagttaataattttactttaataatgttgtctaagtaaaaaagaaaattaaaagttaataattgaactaaaaagtgaatgtcgaaaaaaaacatttaacttttttacttagctctctcgaaagttcctcaaaaaccgaaggacgagtaagtcacgaaaaagaccattttgtaacgcctctctatcaattattcctctatgtgtcaataaagtatatttctcaaaaggaaaacaacaaaaatggttttcgatttcttgtactttcaaaaatagcataaaagccaatagattctcctctctcaaagtttcgccccttgtttttactttctctctcttaaaccccaaaaaaaaaaaaaagatcttttgctataaaatcccacttcacactttcttcacatcaacaacaaaacctctctctctttcactttctctctaaaaaccagaaaaaaaaaaaatggagctttcatcgagaaagccttatttcattgaggaagaagaagaagagaatttggcttcttctttatcagaaatggaagctgggttttctggtaacaataataatagtaataaccatggaaatccccaaaacggtgtcgtttcttcaagccgtttctcttacggtagattaaacagtcttaggaacagtcagagttattattacaatcaatactctgtttcgtctccgagatctgttgtgtctggaagatttcatgatttcagattcgatattcaacaacctcatttcttggactcgtgtttcctctgtaagaaa

SEQ ID NO: 848 - DNA, 34498 bp, Arabidopsis thaliana
cctcttggtgataacagagacatctacatgtacaggtaacatctaagatctataacatcagatctgttttttttttgttttctatcaatttctctcatttttagtcgaaattattacgaaaggattgatttttttcgaatacccatttcttcaatcttctgattaatcaattaaacgattcatgggtctgatttcaaattcctctgtttttggtacaaattctagaacagaacatatttttaattttgttgtttcatgggtctgatttgaagtttttgattttgtgaattttttgcagaggagatacaccgttttgcagtgaagagtgtagacaagaacagatagagagagatgaagcaaaagagaagaaacagaatctgtctcattcggtgaaatcagctatgcggaggaaagaacaatcttcaccaactagatctcgtgattatgcttttcacaatggaactgttgctgctgcttaattaaaaatatctgggaactttgagaattattataattaattaggttaagaaaaaaataagctatattgtatctaacgctatgaagctggttttggatcctctctctttctctcgagatcttaaggatcttttaaaactttagcttcaagtcttgggaaaaagatgaagaagctaaagatcctttaattttcttttctttttttgtaagaaaaaaatagtttcttgacatgaaattttgggagtatgagaagagaaaatgtaaatgcctatgtgaattataatagtccatggcatgtttgagttatattttttcttttgtttttagatttcggtatcaatgtctttcgagggatatacagatgttaaatcaaattttaatatgttgaaatatgagaatattatacgagaaaacaagagtaagcatttttttttaacttgctatatagttttttttttggtaagtacttgctatatagtttaaatgacgtatttgtgatttgatataagattgagcaatagtttgaaattgattctttttgtggtaagatttggtgacttgcgaaaagtgggaaataaaggtataaaatatctttttccttcaaatgcttttgatagtacagttttctttttcttcacgaaatcggtagtacaatattttctgaaacaaataattagatatcttttttgattatcagtggaccagaaactcaaataaattgaagtataaatatatatatatatatattaaaataagatttgtagaatgtaataatgcttaaaacgtataaagttttcatgataaattccaaacaacaacattgcatttgcattcgtacatagaaaactttggctaaaacgttacgctatcaacatcaaaacactctcataaaacttgatctcaatgattctcattcaccgtattgaattttatttacaaaacacacaataagatacattttctctactaatctcacaataaaccaacaaattgcataaacttatttataatatataaacttgcaaaaaaacttctaaactcaaaatcatcctctgacactaacccctctcaaactttgtttctcaggttttgcaacttgtctcctccttacctgactactttccttggtcgtagtcgtagccatcggataatcttcactatccgattcttcgataatctttttcaatctttccactacaatttccatcgtaggtcgctctttatcgttctttttcaggcaaagatcagccaatttagccaaactcctagctccagcagctggataattgttgcgtaaccgagggtcaacgatcatgctgaaacgttgactatcagcaggatactctttgacccaatccaatagccttcgttcagccactggcttgttcctctcaatggttctgcgtccggttatgatctcgtagagcacaacaccgaagctatagacgtcgctctttaaccgaagatgacctgtttgcacgtattccggagccgcatagccgtgtgttccaactctctatacatagaaagaagaagaactgttaaaactttgtaacagattcatcactttaaagtacgagtgagcttataaaatgcacatttatatatcaaaccaaacttactgcggtagtgacatgagtattgtcgccatcaggtccttctctggcaagcccaaagtccgataattttggacagaattgatcgtctaaaagcacattagaggatttgaaatctctatatatcacctgtcaaccaaataaataggaaattatcttccaatctaaacactaaacacacatccccggttcacagaagtctcgatcctaaactactaatcatgtctctatgaccacatttaatataacttaatgtttaacattgtgcctgtccgaaaatatcaagaacaataaaaagggtctgtctaaaaccagatttcctctaatgggtttcgaaattttaccttaagatcatgtaaataagtcaatccttcagcagcaccaagcatgatctcgagtctttttttccacggtaatgtgtgtgatcgacgagggaagagatggtcttctaaacttcgattcgacatgtactcataaaccaaaagcctctcgatcccggtctcgccgtcttccgagcaataacctatgagcttcacaacgttcggatgattcactactccaagaaactgaacctctgctagccattgcttgtgaccctaatacaccattcaaacacagagaaaggaatattactaaagcaacaaagttgacttaataaatgcatccattgactcatacttacttttccatttgaccattccactaaatctttatatcaagattacgaaatttcttcaactttacttcaaacaagtgacaaaatttgattttgcttcataattgcatcaatctaatcttctatttcaacttcttagcttcaattaattggttaatttatcttctaatgattatattagcaacaaagcagagagaagattaactttttacctgtaaaccttgtcgattgagtttcttgatggcaacgacaagtggaggatcagaagaatctccattgctgagaatctttcctttataaacaataccaaatccaccttcaccgatcacaagctttctgctaaacacataagtggctttactgagttcttcgtaagaaaaaaccctaagattttgttctctctctgtatacaaatctttgatacttcttggagaaggcaacgatcttggtgtctggagattaaacgaagacgtttcactccgattcgtcagttctggagctgagttttgtaacaactctttaccttttcttttgttcttgttgttgtctttctgttgctttctgggtttctttgatttgaacaagaacagacagttcatgtcttaaagagagataaaaaaattctaaagaaaaccagtggaattttgatggaaaacacaaaaattaattactttagttaaaccagaaaatgtactaaaaatttgctttttgggtttcttaagttctaaaattgagaaaatggaacaaatgaaatttgtagagagaaataaagtttttttttttttgggttagattgtggaagaagagtatgaacacagatctatataacagcttaatgagaaagagattttttcctggaaactgaaggagagagacaacaaaactaaaagccagagattgagtttagtataacaagtctctctttctctgcttttctttgtcgagaaagcagattaagatggaaaaagacacaaaacgttacgccattccttaaaagataaggagaaagaagagaagaaatcgtgtttcaacacaaaagaaaacagaagaaatcgcgtccgtacggattacacgttgaaaagtatgtgtgaaagactcatacatttctagactctgtattaataattgtaggtataaataacttatattgtggaatttttaaaatgaatttacagcctaagactatgtatattagtttgttttttaagcactcttatttatttgcttttaacactccatattattttttattttttttcccagctaattattcaacatctgtttaatttttaacatttacaatggtttgtttaataatattcaacattttaacccactatttttatctcatattttttatgtttcaaattacatattaataacacttatcaaataaatttaagttaaaataattataaaatacaaacaaattatgtttgttgaaatccatttttctaaatgtataaaaatttaaacaaaaatgtatgtgaagataattaaaagagttatagtaaaataaacttcttttttttatgtgcaaatcaaatgaaacaaggatctttttataaagaaatttttttgattaattttgattttaaattcataaaaaaataaattagttctaatcttaaatatttagggtgaaatataaaaattttcagaatttaatatctagtgaaaagaagacacgtgtcgcaagtgacgcccatttatttgtgttcaacatgttgaatcttttcaactatagttaatccacaaatttttttttactttttcaacaccctcattgtaagagtttcaacggttgaataaacccccgatgcacatagtctaatataaacgtaaaattcgtttcattttattattttatcatattccacatttttatgtgatagattatgaaaaattgcacaatatcataaaataaatacgaaaatatggcaatttttacctctaatcccacccgagcagagaaccgtcaacactcttctccataccgatgagcaattccagctcgccctttttgccccgaggagaacttcggacatggaatcctttttaacgtcacctcgtcttttgaccgtgaccaacttgtcgtcctgattcgctcgtagaaaatctttcgactaaccgtgctttcacatgcgccataatgtttttagcttttgtctcaaagctctcatgaaatctatctcgttttactttatctatcattttatggtattggagaatgtctctcttatttatgttttaaactttgtaatatttaaatcactcatccttgtacttgatttgatttaaatctttaactttatatacagagattttggttttaaaaattttctgacctattaaatatgtaatacctaaaagttaattattaaataatatatatgtaactaattcttatgagatttttctttttgaacaaacaatttcttgtaagttgtaacatatcttaagtagttttatatggtacgatgataatttgctacaatgattattttatggattaaaattattattttattgatgatgatttatagatctcaaaataaagtgaacaaaaaaaatcaaactatgcactcatatttgcagaggcataataatttatgatcatctgttttaatacatttgccaattcctttccataactgcaagcacaacgcggtacacgagccagcaccacaatcagtttccgataaaaacttttgacatattgcgttttgtccttgaatctcattcaccattgatcctgtaaaagtaatatttaaaacacaaacacaaagttagttttcatggtagtaaaactacatgattttataactgaattagagatggttaaaaaaacctagaataaggatgatgtagacaaaaagaaaggtggatttagtcattgtatgataattggagtttacaaaaataatgagaataacggtactatataatgaaatatcacatagaaagacacacacacagatatatatatatatatatatatatatatatatgcatatattatcatttttgatttttttctctttgtgtatatatgttactaaaaaaatatggatagtttttagtaacatatatatttttgatagtatccatatgttttttagtaacatatatacataagtggaatgatacttaaaagataaaggataagtacaaaattaaaattgattaatacgaaagtaggtcaataattcagatggttaaccacaacaacataatattaatgatgatgataaagttgaatatggatgatgatgtaaatttatgaaaaaaaaaataaacttttatatatatagactttggtttaaaaattttccggcctattgaatatcaaatacctaaaagtcaattaaacgaataaaagatttaaagtaatatatatctaactaattcttctgaattttttctttttgaataaacaatttcttataagttgtaacaaatctttaatagttttatgtagtacgatgataatgtattacaatgattattttatggattataattattttagttgatgatgatttatagatgtcaaaataaagtgaacaaaagaaatcaaacaatgcactcaaaattgcagagacatattaatttctgatcatttgttctaacacatttgccggttcctctccataactgtaagcataaagcggtacacgaaccagcaccacaatcagtttccggtaaaatctcatgacacattgcatgttgtccttgaatctcattcaccatcgatcctgtaaaagtaatatttgaaatacaaacacaaagttaaaaaaaaacctagaataaggatgatgtagacaaaaagaaaggtggatttactcattttatgataatttgagattacaaaatagtgagagtagtagtactgtataatgcaatatcacacagagagagacacacatatatatatctacgtatgtatattatcatttttgatataatggtagtaaaaaaatatggatagtttttagtaacaaatatattttttatagtatccatatgttttcttagtaacatatatatatatacaagtggaaagtatcaatttgatataaagctagtcaagtttagacaacaaaaactagtcaaacaagataatagaatttgtttttagatatttattatgagttttaaaaatattagtgactgctttacaaacaagtaaagataaatattattatattttgttcttgatcaaattaatattttgtgccggtaggaaaaaaatcaaattaatattttgttgtttttcattttaaatatcatatgctctctttttcgtataatagtttcgattctctttttattatcatggaacactgaaaaaaatagatatagagaggtaaaatccgattaaatatgaaagttgctatgtaggcaattgtatagtttacctaagattataaaataatcctacgctttgaatcgttgaaaatgttttgacacatatatggtctcgtctcgtctttctaaagctccaaaataattttattaaaagcgtgtgacttttagtcaatatttacatttattggattgagtcatattggtctataagtacaatattaaaattgattaatacgaaagtaggtcaataattcagacggtcaaccacaacaacataattttaatgattccaaatcaaccctttaaacttccttcacaaattgaaatctttgataaattttaatggatacttttttaaatgataaatgactaaatcagacactgagaaaagaaacaaaataaaaaagtttacagaaggtagaaaaatacatgttcaagtttaacaaactcattaaaagattttcgtgttttttttctttctaaccatgcttttgctttcttctaatgtgtatgtacctgaagacaaatagagacatgaatgctctcttcaccattcgtgtgattacagtgcgttttattttccgtttctgttcacacacgtctcttcttttctcagttccattccaacgccatgatcttgatccttgggttttgtcgtcaaacttccttcacggtttgtgtaatttgaacccaaacactctttgaacatagttttgtgttgccttcgctggcttgagatgcccataagtcatcaggaacagatgtggaaacgttgtcccaaagtaagctccatcaatgtctgttcattcttttaaggaaaaccgcaaaaaaaggtaacaccaaagatcactagaaactcaaaagaaaaatcatttcttcatgcaataagaatcaaacatcaaagtttttcagaactgcatttatataactctatatcagcagaagtgaaactgtagaaaaaaggatactgccttgatactttgatcgtgggtaataaatgtcttcgcatttcgggcaatatatcttcacagtgctagatcgcggtaagtctgattgaccaaccggaagacaaggttggccacagcaataaactcttggacatcttccaaagtcatagtttttgtatttgtctaactgcaaataaacagaatcaatctgtgaatcttttatagaatgtgaaagacatgcaaatgagtgtttaaggattttgtttaccattgctgccaatcctttgctagtcaatatgtaacgagcatgaatcagtccatacaacatctcagctgctgactcgatcaattcattctgttcctctgtaaacatctctcctgttaccgaccaatccaaatcaaacattcaagagacacaatcgtaaaagcgaacccatatcggtttccctactatccctaaatgcagatgctgtgcctgtacctagctaaaccgcaaaaactaataaaaggataacaacttaccttgagaagattcaacatccaaaatcaaatcaagagcgtactcgtagtagggaactagactgctgagtccacacaagttgaagtcatcttgaatgtaatcatcatcaacttcacaaaagaactcgtttcctcttagattacaaaaccaagatatccatgaagtgtcctctccatcagaaccactcacatctgattcttcactatctgtgtctgattcatctattcacatcaaaaattccataggctaataaaggaatttgcttaattcagctcatggagataagatactaaacataaagatcaaaacttgattcccaaatcaggaaactctagggttaagtatctgtttctaaatgtagattcgatttcaatagagcaagagagactaaccatcagaaaccgtattgttcttcgagagagaagcagaacgagaatctctatggttgatgttattcgactgctgcttcccaatcaagttcgccgtcgtcgtcgccgccgtaacggttcctttgcctttgccgttaacttgacgagaggttgaaggagaaggacgttcaagagcgtcgttgatccgtttacgatccacaacttcaggtctcgaattcaccgttcctctgtctctatacatgattctaaaaatacctgataaatctctctcttacagcagctattgtacaactttcatcggcatgtaatcgccggtgagagattgagaaatcgacggcgattaccttgagctctagggttttgcttcttcttttattttatttttagcttttgtcgaatcttgttctttcgcgtttcgcaactagtctgtttcgtacagagaaagattattattttattttttggtcaccgtttaatttttgatttgaaaaaaaattataggggtaaaatgggaaatagagaaataaagagctcccggagacgagggagtgaatcggtagctaagctagccactagagagaaagtagtgggagagatgggtcgaatcgaactaaccactaacttctggttcaacacgtagcatttcactgcacagcaacgaccgctcttgtttctttaattgccattttgccaatgttgcccacatttgtttttagaaatatgctcacttaacaagatagacataaattacttacataaaagaataaaaaattttgtattatttcttttgtctttttaataacatagttggcacatacattattacaatattttaagatttttttttacagtttactaatgataatctttcatgtcacgtatattattagatttttttttgataatctttcagtttttcttgctgtaatttgttttaaaaatgaccgatttgtcttttaaccaattcatcatccaaaacatcaattagtggtttaaatggcccaagaaagcccaacaggtgatgaacaccggcaaagtcttgtcacgtgaccagcacatgaacgagacgatttacatctttctttagtcagtcggtcgagtccgagagaggagaacaatggaagagaagaagaagacgatggagatggaagcaacaacaatgaaaggcacggcggcggaagatataacggagagactctcttctctcgacaatctctattttccacgcgccgtccaattaaccgctgcatcttccgaccaacgcaaatccatcctcctcgacctcctccgtcgtgatcccgccgtttttctaggtactttccattattctgctccaattcctcgattctaatttcaattttgtctaagtatgattggatgtgttactgagtttttagtccttaattaagtacttggtgaaactattgattcattaggttaagtttttagtccttaggttagttcataggttagtagatagatgagttttggcttcataatcatctaagtattgagtgtgtaatgttattagaatgaaacttttttattaaatatgatttgggaactgaagcattagttgtttttgctttgatgatttcagagagatatggatcggagctactagtagatgaattgcttgagtttgatgctatgaaacatgactacgaggttgattggcatttgaaaaacctgcggaagaagataagtccgacttcagaagagattaaatcgaggtctgtagctgtgaggaataggagattggcttatttgaataagcttgtatccgagggacagtatttctcagaggatgctatgagagatagagagccgtatctacatcatgagtatgttgggaagtttcaggatgtgatgggaaggaacatggctaggcctggagaacgttggtctgagactttgatgagacgggctgaggaagcggtgttggttactcgtattagagaggagcagcagaggttaggtgtttcagagagtgattgggttggtaatgagaagatggaggaatcagaagaagaggaagaggaggaatcagaagaggaggaagaagaagaagatgaagaagcgaagaatcctacagaagctagctcttcaagtctgaatggtaaagaacagaaagagaaggcaacaacagtcttaccgccagaggagatgcaagatatgatggatcagttcacatcaatcatggaacagaagttcttatcgggagaagatcatcaacatttggattacgcaaagatagacaatgacgagactcttgatgatcattggcttcgagagattggccgtgacgctgaagataagtactttgatgaagactaattggatatgtaagatatgatctctcctctctctctctctcgttacctgcagagttatatatatcatatgatagagagtgctatcatcggattacaagtccaaacaccaacacaacgtcatgttaagttttggttgagagattattcatcaaatctctatgtacactaatagaattggttcaaattatatggcccagaatagtaaagcggtgcgatgataagaattgttttttgggcaaatataatcatgaaatagtaaagggaaaaccaaaattccaatattcttttttggaagtttgaacatagacatgaactaagtttttcttccattataatacacaaatttttaaggtgtaccattaacataaacgtatgtggctaggtgtagaagatagatcacttgtgcaagcatatataactcatggtaactcatgttaccaatcacacccatagtatggaggataagtgcacacacagagttaaaaggaaaaaaaaaaccatgaacataaacttgcgagttaagcgcaattatagagtacaatacagtactaatccgaggtcgaatctgcggttatacaacagattaacctcttctccgtatttccgggattctctataccatgccatttttctttttttagatatggacaacgtcccactatcacgctcatctagattgtgccaggggaagtgtcatcttccgtgagaaatttctttttggtatcaactcttgagtttcatacaaatgattcttgtctgaactcttgagtttcaactaaatgatcctcaaacttggcttttgtagtcaaagaacatggaggatatgtaaaagcgtcgccgtacagggggattagagagaatcactccacagcatggaatgtctgaatccgcttgagttctttagctactgggatcatcattggtctgtcttcatctcaaagccggcaccacacacgtcaattcggatttatcggttacaataaattcaggtctggtttgattataattttagtttcattttggtatttttgaagttttcaattcccttaataataataaattgatttatatggctaatttcttctgtctaagcatatttgactttgatttctcgttacataaaacataaagtgttggaataatttatgagcaaaatcaaatctttaatcagaaattgtggttttatattaatcttttcgtagaactacaacttgagtattcaaaactgttaaagaaagagagccaaaagtaatcgcaatacatgaaattgaaatccaatagactaaaaattccaaaggaaatagagctcgatcctgctatataacattgttggaatcaatcttctttttattcttggtccagcctacgacttggtctctataaaccagcttgtcttgtctctttcacgtcgcaatctcgtccacctccgagttaaatacgaaactcggaaatgtcgtcgttatatccctaaaattgagtttttaagtcctcaaacttggaaaatggcaccaaaactggccaaatagatggaagtatcatagtaaggagacatacctgagatacggaagagtcatgattttaagcaaagatgggtttttgataacgaaattgctccattctgtcttatcaatctttccatcccgatccacatctgcgtcctcaaatgtctgttcacgaaaagaaaaaaaaactcgagtttcataaaacagtctttcttttgacagaaaacaaacttgtaatagacaacaagtaaacctgatcaagtatcatctctattgtatcatcagccagtttcatttcagattcgcagagaagtgcaatcaacatctgcttcacctgccaaaaacgcatacacaattatgattacttatagatgatgcagaatccataatactgaaagtctttgaaacatagattgtttgggaatggaatgtgaagatataggaccattgtttacctcttggcgctcaatgaagcctgtgcagtccatgtcgtaaagcctaaaggtaactgatatatgaaatacagaataacatgaataaaagtacagcaaggctttagagaaacgacgatggatataaactcgtttatgggtcaacttacagtctgttttctcctctagggaagcattaggatggaaaacattgagtgatctcacaaagtctccaaaatcaattacgccttttcgtttaacatcaaataaatcaaatatctggaaaaaagagcattaccattaactacttataatagaactaatcgttacgactaactacaaagttactaaggccaaagaaacttagaatttaccctattggcaaacaaattttctttctttctgttcttgaacaaagcaagttgaaactcttcctgcataacaagttggtcgagaaaataagtaacaatatccaagagtgggccaagaaaacatcaatttttataagcaaaccaatataaaaaatggaattaaaattcaagtcaactatcatcaacacagagacttggtgagcaataaggagcccacagctcagcatggagattcaataataaatttgtgaaagtcaagaaagttgacaaataatacggaatatggataatggtgcaatgaatattattatgtcactgtacatcacgcattcaagattctcccatgaggtgcgaaataatcaaagggctatgagatttatcattaccttgtttatcaagccatcgtcaacaaccgagctgcttatgctcttgaacaattcatacaatgcttcaacttcactaacactaactagaaaaacaaacaaataattagccacactgcgagatttctcatcaacatcatgtatatcaccaaaacaaaaatcgaaagtgatggttcttgaaaactttctctgattaagattccatttgaaagtagaagtaaactacactaatgatccaagaaactattgaaataggtttatgtgatgacttaagtaacaacaagcatcatttaacaaagttgtagatcaaatagattatgaatgaaagaaccatttttcggattcaataaatggcgaaaacagattctcatatcagttaacaattgataaaagagagatctttatgctcatgctctttgagaataaagcaaagaagagaaaacgaaacgtatagtgcaagtaaacttacaagcagtctcagaagcaagcttcacagggttttcgtgatcgggaaattctctggcagccgtggaatggaaacaacccatttacggatgacaagagtaaaacgaagaagaagaagcttgttccggaggttgataaaatcgccaaactctactacaatttctgagattgtgaaaaagcttgatttctgatattactcactccccatcatcatcataagcatctttaaaaactacaatgattcaatcaaaaacaaaacccaacaaaaattgaattaaaagacgaacacgataattgaataagtataaaccctagaaaaaataagcagcagctatgtggcaatcgaattcagattaacaaaattttgaatattaaatcggaaattaaacaggtaatgtaggagcggctcgagaatctccgaacccagaaactgaatggtgaaatcgaaaaattgagcacttaccaccgagagaacgggctcgccggctcggtgagagagagagaggaagggattttgatttttgagaaacgagagagagacgaagaagaagatctctgaccacgatggtagatgaattgatcggacggctgagattaacttcagactttgctgggctttttttgttcgtcagaggcctccgattggggaaattatgagagagtttgtttataacatgatcgtcgcacgtgtgagggtctgaacgcgtgtgaaacacatccttgtcatttttacctctttttttctaccaaccccatttttattttatttttattacagtgtgggaagaaaacaaagccattattgttgtttgacattttagtttcgaaatttcaactttcaactttccttttttattggttaagaaagttaatcatttttacaagttttcttacaattctgcaatgattttgttttgtttttgtttttttattaaaagaaaaatatttagactcgaattttgtttttatgtaagtttataactgtaagaaaaaaaaagtgtagagaggtaactagtacttgtagagtcaagatttaacatactcaaaagatactaagaatgatatttatttgtataagatataattttcaaattggatctttcattttcataatccatacagatgtcaagatctcatagtcttcaagatcttgcaataaataaatattaatatgataacccaactagcaaggggactaattactgtatttatctatatattcaagattcatgtagagtgtgtttgataataatttcaatatgggtcatataccttttgggataaacgaagaattataataattctggtcacattttagtagtctaatcaatcacgtaggacaaacaaaaatccaatagtataaaggcggtctaaataagaattatggattaacataattacttttatataaaccataagacatgatctaatcatgtatattatcaaattttgaaactaattaagtacgtacgccatccaacaatccaataatgtaaactatataatgttcgcctaaaaaaaagaaatggattagcatatccataagacatggccaaatcatgcatgttacgtatattaaatttgaaactgggatcctggctctagtaagagtggtttataattttatattgggtttagaattccaaattaaatggtcaaattctttcattccaatacaagcagaaacttttatgatagtaaaaagattatgagaagacttatgaggtgttaagaaagtgggagatgtattatgaggaggagagattatgagtatagtaaaaagattatgagaaaaaagattatgacaatagtaaacaagaaggtccatacagtatccatgtttttcaagaaagtgggagatgccaaagtcctggacctaatatttttgttttaagttttgataactaactaattttttttaaatcagacacaaaaataaacatagactgttgatattttagaaaattaagatctattaaaaaaatattgtattttcttatagataaacaaaaaaaactttttttttactaaaagactaatatcaaactgtcctaaggtccctactaattttgggccggtggtcctgacaagtgacaacagtttaatggtccattttgtacttaaaattgagtcaaattagttgcggcaataagagcagagcagtaatgtgttacacccttaaaggacgttagtactgaagcccaaattctttggaggttggttggttggttgatgaagtgcggttttgattaattcacaaatatgacttacttgatgacttttcacaaacatccatctggaaacgctactatttgatgatgtattaacagtagaaagcatattaaaaaaaataaaatctcttattgattaaattatcaagcgtcaaaacgaaataggtctgctttacaagtcaaagaccttcgatacattatctttgagactacttcatagagatttttaaagcagaaagattacaaaatctgaagatcagtagttcagtagagataaactttcactgattcacagattattgcataacaaaaaaaggaaaatgaaagattgtaagaacttgttcacttctttgaagaaactgttgatgaatctggctctttccatgcagcttgccattgtttgtcatataacgtagtctcatcgaacagatccttaagtttgtctaaatcttcattcttacggatgaagagaactccagctacagccacaaacaagagtgttttgcagaagaaatttcccatttgatcaacaagtcctactccggtaagactatcaacaaagtaagccatgaagaaccctatcatcgcagcacgacctacaccaccaagacaacaacttagatgcacaaaatgttaagtgtactatatctaagtgttagatcataagtgttttgaaaatcaccattgagaagttcagcttcaggtagatggtatctcttcatccatgcccaccatggaataatcgaagtatcgaagacaacaagctcgtcgttactcgttgtttccgggttatcttcaagccattttctcctctttgcctctataaaaatacataatcaacacatttacacaacaaacactcctcttcttacacaccactataagaaaccaaagcagaatcttcctaataacaaagcatagacatatatcaagtattcaaagaatctgtactgaactgaagttttaaaaggatctaaccagaaacgataacagaatcccaatcagttttgccatctttctcgaactgtttcagatcccaagttccattaacccacttcgcattctgatatttgattaccgtctcagtactcgaatcagtcgcttcacctccaacggcgccgttttcagaagcggaggagctttcggctggagatttaactggaacttcctctacagccacagaagcaggcttcggaatctccacgacgggggaagtcgtaccattgtcggaggaagctctagggacggagattagagagaaacgcttggtggagagaagagaggttgagatcttggggatgagattagggttctgaagtgaggaagagatcggcggagagaataacgccatggatatagacatttttttgttaagatctctctctctctctctctctctctttgtctctctcgatctcctctgctctgagttttttttttttttgcagagttagtttgaatgtgtggtttgaaatgagctatgaaggaagtgaaagagatgttgttatcgttagaaacttggattgtatgtcgttttccttttttaattcagtttaaggaagaaactacgtgatgttttctgtaagcaaaaatagaaagataaacgagactgttaatgggctttgcgatcagcccatatagaactagaattcaaaacctgacatttaaccatactctcgacccatgatttacgaattgactagacgatatgaaaatgtccttggtcttttctttattagtttgttaaacttttgatgcaactgaaaataatagagaaagattatagaaaagtctttgtaaattaataaatactgttatccaaaatactttatcacaaaactaaaacaaatttattcctaagcttaaacaataatatgtaaactaagtgaaaaatccacgtggatgattcttattggttagatgacgatttagatatttcatttgcttcgcggcaaagtttcaactcattacgacgacgacgatctcaacgttcaagaagtttccagaactacccttctccgtgtttaatgcccctacacgtgtagcgaatgcgtaataactacacataagcagtaagggtattattgtcaatttagtccccaatcataaggcccattataaataacgaaagtctttattttctaactaatattttcattaatcgattctcaaagtcaagcaaaaaaaacgaaacaatggatgcgttctcttccttcttcgattctcaacctggtagcagaagctggagctatgattctcttaaaaacttccgtcagatttctccagccgttcagaatcatcttaaacgggtaagtttcttcgccgccgatgtctattcatatcacacaccaaaccgcgatgtctagattagagtcgatagattgagattcgtttcgttttcgtgctattgatcgctctatgtttctatatttcatctaatttctatgatttggtttccgttgaacgaatcgttgcgatcgtactttatctagggtttctaattgggtctttccatgatttagtttgttgatacttacttgattatgattctgtggagatctttcgttatactttactctgcttattattgttaagatcctcttgttcatttgtcatgttccatttgcagaagggaatgtgatttgtatactcactcatgttacaaatgctcattggttcttattatttgtggtggaatctttgtaggtttatttgaccttatgttgtgctcttgtggcgtctgcctttggagcttacctccatgtgctctggaatatcggcggtattcttacaacgattggatgtattggaactatgatttggctcctttcatgtcctccttatgaacacgtacgtgggctcgatttacccaacccaatagtgaattggctgctttcttattgtactaaagtttcgttttcctgacattgttgtttgttttgatgcagcaaaaaaggctttctcttctgtttgtgtctgctgttcttgaaggtgcttctgttggccccttgatcaaagtggcaattgatgttgacccaaggtgtgttatggttatgcaatttgattcttgttgttcaatgttaattttctgttagactattctaggagctgacctttatatctttcttttggttctccagcatccttatcactgcatttgttggaactgcgatagcgtttgtctgtttctcagcagcagcaatgttagcaagacgcagggagtatctctaccttggaggactgctttcatctggcttgtctatgctaatgtggctccagtttgcctcttcaatctttggtggctctgcatctatctttaagtttgaggtaaaccgaatgcctctgttttagaatgatctgttctttgtcttactttctcagacatctcaccattgttatgaatacgtctctggttgcagttgtactttggacttttgatctttgtgggatacatggtggtggacacacaagagattatagaaaaggcacacctcggtgacatggactatgtaaaacattcgttgacccttttcactgactttgtagctgtgtttgttcggattctcatcataatggtaagttcatttgtcgctggtataagaaaatggtacactttatttgttagtaaaccgtcattgacggactcttttgttatgcagttgaagaactcagcagataaagaagagaagaagaagaaaaggagaaactgaggggatgtaaagtaaatttaactttatggttgttatcgtgtgtggccactttgaagatattacttgttagcactctctattggtgaccagacatgtttccactaaaaaggatctgcttgtttcacttctgcacaagtaccatcttcagattgtaaatgactcgagtgttgttcttcttttcataaacttttgttctttaagagtttggttctactgattgcatcttaccaagctaagaataatgtaggaaaatgataatcctgtttaaattttctaaaatgtgtgcatttcagattctcacagttgcaacatttgctattgcttggaagttgtaatcgaaaaataacttgcaatttccatgataagtgtgtaaaaacctgcattctcgtgaaacgtggatttgaaaattgcaaataaatggcgtttagccttttgtcaaacgtctggttggagctttttgtcaaaatttgttcccaatagaatgttgtggtacggcaaatggcaaggaatatacatcagattttccttctcactttaaaaacgacgttatgttttgcatagagtctagacctcggagctcatgacccgatcttaagtttgaatccatccgacaaaccgacgatggagacaatactagttatatacttgcatatgttctgacttctggtccaaggcaatctaggattagcacattaacgtgtgtagcattttcaattgggtttttgatacactccttttgcaatccatgataacatgattgcaacttgcaaaaggatctaaaagaaaagaaaattaaaaatcactggccagaaatgcaaaacatgaaccaacccctagaagttctgttaatacttaatagatgtaacagaaggaaatgaagccaaaaacgagaacaaaatatttgaataaaacaattacatctctgttttttctttgtttgattttttaaaagaactagggaaattggaaccgtaaattcttgcattagttcctttttttttctaggaaacagcaaggaactactctggtcaagagatatttgatcatatgacattggatttgggttcttcattccggtttgctcgttaaccaacgttggtttgcaatttgaccagttgctgactcatctctttcaagatatttcatttgcttctcgacaaaacaactccaacaataaccttgaaaaatcttgaagtggatggctcttaaaggttcgtttcgtggaaaatcaaatttgctttttttgcggccaaatttcaactcatgcaatgcgacatcgacataggtcacaaagggtattattgtctaacaaaagactcgttactctctcaaacaaagaaaacacttgtttttcttcgttctccattatacttgtttcactattatacttgtttcactccataaaaatcttaccattaaaagaaacagatcatggacgggcttaaagacttcagtcggatctctccggcgattcagagtcatcttatgcgggtaatctcttcgttaatacttcctctagcacgaacagtggtttcgtggttcgagacgtgagatccgtttcgttttctttagttgttgtttcgattacatttctgttctttaaggtttgttttgctttgttcttttttttttctttttgtggagaaggaaacttagaaagatagtgaagagggaattagagagtttttttataatcttgtgattagtttttcatattcttgtaaagtatctcaaacaatttctatcttttgataatatttttcatgacttttatgactttattttgtcatgaaaaaaaatgtagaaagttataaaccaataacataataatttaattcattacaatgagagattcttttattttaattgaataacataaaagatttactcactttataaaagtatgcatctaatagctccagatttatgaagattttagattattttttacaaatcttaaataaataacacaaaattttaacaaactttaaaattttttaattgaatagcaacatattctacatgacattttaagtcactaaaactcttttgaaatcataaaccaataacaccctattagtttagtttcttatttatttaagctttctttatacgtttatatgaaaaaattattattcaaatctttacttctctctgtttgaatatggattctcaaaaacctgagagctagaattacgctaagagagtgttgtcagtattatgactatacaattaaatgtagttttcaaaaagaaaattataaaaaatgtatctatatttttctctttttgtgattaacgactattaattaagaattctatatttatcctaaatacagatccttaatctcaaagttaaatggtaaaaggtaacttcccaattccataattaaagtaaacacatgaaacaatagattatacaataattttaacggtaggtttttctattccaaaagatgaatcacagattgttagatgcttttcaagagtaaaatctatttcttttttgaccactttataaatcaagggatctagaacatattttcgagaaaatgtttctcaatttgcaatctcattgcctcctgaaccacacttttgaattttctacgcttatcctttgatgagccgccttcaaatcaagatttcccttcttcaaactccctcttctgtgacatctttcagatacacacaagagccgttgaaataccatttacataaacttttatgtgttgggttgtttttgtacaccaaatgaaccatgaagagatttttagcaaaaatagagtctatctcaaactattgtattatatttttataagatgaacttgttgatagaaatagaggttgcattttttggcaatcctacgtaaaactctaatccaaccgaaggtgaagttaaacctctaaccgttagttgagaaatgactctcttcttacctattttcacctttagcctagaaataaaggttacatttttcttcattttcacctattttcacctttaagctctgataattaagtttgcgaaaacgaataaagattactgataaaatattactacaaaaattaattcaagtggtctagtgattttaaagatttaatgtgtgatttaagaactatggtgggaatcttttaatcattgcgatatcagtgattgttggctagctagtatgaatgttcaaatgacaagaatatccactctttgcaaatcttagaatggtccaaggctctcgatccacttgttgtcaatgaaaaaacaaaaatacattattcaagaaatgcataagaattaaaaacgagacacgtaaaagtactagtagtgatgtgtattcattaatctgctttctcttttcgatcttggtggaattttgtaggtttatttcagcttattctgtattcttgctgcgtctgcgtttggagcttaccttcacatgcgcttgaatatcggtggaaccattactaagcttggatgggttttaagtttattggagcatgtggtttcttgtcctccatataaacatgtacgtgtgggtttaatttagtcacttttaccttaagttattgttttgtttctttgacgctaattctttcgattcagaaaataaggttttcacttctgcttctctttggtgttcttcatggggcttcagttggtccatgtatcaagtccacaatcgatattgattcaaggtgcaatttcacacgagacattgatctctatatgttttttatattttgcttttaggtttcaacttgttatcctaacgtacgtacgtatctaaaacgaacatgatagttatatcttttttcttggaactaaaattttgactctccggattttcacggtctaacatttttctcatgtctccagcatccttatcaccgcgttcttaggaactgcggtgatatttttctgtttctcggcagtggcaatgctggcaagacgcagggagtatatctacctcggaggactgctttcgtctggcttttccttgctaacgtggctcaagaattctgatcagtttgcctctgcgacagttgagattcaggttactaacgatctaatattacaagtagatttattcttcttgtagttactttggtttctcaacgtttctatgaatctttttggttgtagatgtaccttggactcctgctcttcgtgggatgtatagtggtgaacacacaggagataatagagaaagcacactgtggtgacatggactacgcggtacattcgctgatcctttacattggctttgtacgtgtgttccttcaaattctcagtataatggtaagttcactaagatattcttcttaactaatattagtaaatggtgctttcgttaacctcattgatggacccttttgttatgcagtggaatacctctgccgatagaataagaagaaataatgaagaaacttaggcaaagagtggcaaagaaaataaaacaagacatttgtggtgacaacagtactgttttttttttcttggtgatattgaccacatttctgatccttaattatttgataaacagtttatagcgattaagtggtccaaagtttcatcatgtgaattgaaaaactagggtgcgaactcctctagccacaattgcaacttgtgtttatagttgttatagccacaattgatgccttaaattgtaaaagtatatggttttatatgaatatgattttgtaaatatggcttaagtaggatttgttcttttcctattctaaagctttcacaattagatgttaagagctggttttgtttttagctgcttaaatcgcattaggctaagaataaaaggcacacaaaaagtgaagattctagaactgattccttagtttgttatagatagtaagtattgttcaaacgagaatccaattttaatgtagaggacttgcatataggatgaaactaatatattcgtgaatgaaattccagaatcactatggttggagtcttggagaagaactacatgaaaatacaaaaactgtagaacttctttttcttggtaaacattattcggataaaaaggaataaaagagcttggacctattattttagctatttatttatttatttagtgttgtcattttgtgttgtagtggttgtgttttattagcatgaatgtatgaattttaagcagatcatcatatgatatactttgttcttatttaagccacactactcgtgcattaccttttcttttatttaaccttatctcatccattagttccatcgcattgtctccaccgtccgattctatcatcattacataattgataattctatcaaaaactttgttaagaaattagcacatagtccactttacggtcacgagtttttcaccgtttctgttaatttttcactctgtaattccgacacggtggatatatagttacatagatattgtataacagagatgatgacaatttttaaaaatatacaaatagataaattttgtttttggtaatttaacaaaagttttgttatgtaactaaatttgttttattggtcatctacaagcagtccaatggaaggttcaaaattttatatatataaacattacaaaattatttgacgttgtaataatagaaaaataatgatatttctatcttgcgaaagtgctattatttgattgagactccacattatatttggagttacgtaacaataatcaccgttttctacaatttgcttttttcctctaaataaaaaaaaaacctaatttttttgttacatcacatcgtgagtaacatgctttaatttcaccaaacctcaaaattatgtggatcttagtcgtggatgattgaatattttaatatctatagttaaaagagacttggaatataaaaatacgtgtagacaccgagaaatgtaccaaaaattagttcactaatcacattcacaaaccacaaaggtgggggcccatcacgacaaatactttaaccaaatcaaaagagttgtgtccatgatcgtcgtcgtcattacggccggtgacttcataaaccatttcattttgtattgtttctttcatatacaaaaatttatattaatttaccaacgtcatactttttttttacgtcatactttagaataagttaaacctaatcggctaatcttattaacctagtcttatctttttatcaaaagacaatcaattattcactacatcaaatatttaaacttggaactttaaaaagtggacaaaaactaattttggcctttttcaaatatttatttcttggtttaacactttaaataaaattttaatacaaaaatccttgtgatacagtaaacattaaaaataaagtacatttagtcatttacctaatgtaaaacagataaatgagattgaccaatagaataagttgtacataggtaagtaacataatacttacattttattttcaatatagatgttgcaaaagaaagtgtttttagttagaataggttaaaatttcagtcattagtatttttattttattctactattgcactattttatcataatattttcaaccacatttatcttcttataataaatatatccattgtcacaattaaaagtaaatgatcttctttggaatatgaaaagaaaaaacaaacaaggaagaaaaagtctatagtcaacaggaaggaaccataaggcacaagcaataatattcctccagccatcatcgtcactttctaaccattagaagtttttctctaaattaaattattgagatatcatttcaattaattaaaaatgtataataatatttttaaaaatggaaataaattatgctcaaagcatttggggaggtttagacacatggaaacacaattaaaatagaatagctaatattagttaacttaatatattatgtgtaatagtgttattaatttcctacatcaaccagattgaaaaataaacattttaggtaactaagtaatttgaaaaatctaaatctaagtaatcatacaaaaattaatatgaaaaagcaaagtaaaggagaggaagctgaaacatattaactttccattgtatacaaatacaaaaccatttttacattaacacaaaaacaatcagtctctttctctaaaccttcaccaatttctctctctctctctcttgcccttttacacagccatttgttagattcctctctcaataagcctctcttctcttttctattggagtttttgcattagactgattagctcaaagcaaaacccataaaccaaaatcttctctttgtgttcttgtttttttcatttctccaatttttctttgtggaggaggtttttcactttttgtttttctgggtttttattggctttcttctgcaaaaaccataactttattttttctgggtttttcttcgtaaagaagcttcccaaaacccagttttttgtataagctcaattagtagcaaacaagaaaaaacaatcttaaactcaatttcacaaaatctctgattcttgtgaaaatttgtatattgcaaaactttggaaaaaaaagagaaaaaagatggggaagcaaggtccttgctatcactgtggagttacaagtgagttcttgtttctttgatttggtttttgagaaatttgactattcaagaactgcttcaattcaataatgcaaacgtttcttagagacatgaacaagaaaatgattcggtttggtttgtgtctgtgtttgtgatcacaagaacacgttgtagggtccttttgatcactcttattgagagctttgaatgttatcaaatgaatactgaactcatagttttgtgtcagaattgctcacttatgttgaatcaagactctgctttgctttgatgttaaaaacttcacatgattgttttggttttcaaagaacattgttcttcattttgagtgtttgatcattgtgaaaatgttgcaaacaggtacacctctatggagaaacgggccaccagagaagccggtgttgtgcaatgcgtgtggttcgaggtggagaactaaaggatcattagtaaactacacacctcttcatgctcgtgctgaaggtgatgagactgagattgaggatcatagaactcaaacggtgatgattaagggaatgtctttgaacaaaaagattcccaagaggaaaccatatcaagaaaacttcacagtgaaaagagctaacttggaattccataccggtttcaagaggaaggctctggatgaagaagctagcaatagatcgagttcaggatcggttgtatcaaactccgagagctgtgcacaatctaatgcgtgggactcgacttttccttgtaagagaaggacatgtgtgggacgtccaaaggcagcttcttctgttgaaaagctcacaaaggatctttatactattctacaagaacagcaatcttcttgtctctctggtacttcagaggaagatttgctttttgagaatgaaacaccaatgctgttaggacatggtagtgttcttatgagagatcctcactcaggtgctcgagaagaggaatctgaagctagctcactcttagttgagagcagcaagtcttcatcagttcattctgttaaatttggtggaaaagcaatgaagcaggagcaagtgaagaggtaaataacttgtgtaatcctcttgacaagaaagagtgctttgcttggggagattctaataatgttgttgttgcaggagcaaatctcaagtcttaggaagacatagttcactactctgtagcatagatttgaaggtactatactactatttgcagttcccaacaattgtgtttctttaaaaatcatttgaatgccttaagttgacttgggaatgtctttctgcaggatgttttcaactttgatgagttcatagaaaatttcacagaggaagaacagcaaaaactgatgaaattacttcctcaagttgactctgttgatcgtcctgataggtatcttaactcaatgaaactttagtatgttttactgatttcagcggcttcttcgagttcttatacttgatgttttctcttttgccagcctcagaagcatgtttgagagttctcaattcaaagagaacttatccttgtttcagcaacttgtggcagatggtgtttttgagacaaattcgtcttatgcaaaacttgaagacattaagacacttgcaaagcttgctttatcagatcctaacaaatcccatttgttggaaagctattacatgctcaaggttttcatcatatactcttcttgaaaaaatggtttctataccttttgcttttgttcacttaactctttgcttcatgagcagagaagagagattgaagactgtgttactacaacatcaagggtctcaagcttgagtccatcgaataataatagtcttgtaaccattgaaagaccttgtgaaagcttaaaccaaaacttctcaggtcacttaagattcttgaatcatgtcaattcataactttctgctataatatctatctgtttctgattatattgagttttgcattctccagagacaagaggtgtgatgagaagcccgaaagaagtgatgaagattagatcaaagcacaccgaagagaatttagagaatagtgtatcttcctttaaacctgtgagctgtggtggacctctggtgtttagctatgaagataatgatatttctgatcaggatcttcttcttgatgtgccgtcgaacggctcattccctcaagcagagcttctaaacatgatatgaaagaagataaagtttctcaaactcattggttaaactcattgtgtttctcagaacaaagacagactttttaagattatatatatatatatatatctctgttgaagagaaaactcttttgctctttaggcttttctgagaaaatgtggccaaatgagatttttatgcattagaaattgcaatttgcagatataaaaaaaaaggaatgatttttatgtaagggctctctttggtggtcttactatatatgtcttcttgttcttactaaactcgacgaacaagaaaatttcgttttcttggaagtttaattttgtgcttttttattttgtataagaggagaaaatatttagtaatgcaaaaataaagcaataaatctaagtatatagatttttattgtattatttatacgcacttatatacttgcataggaaatgaatatgactgacaatacggagaggaaaaaataatagaagaagaattgaacaaaatgttataataaatgataaagcaaaaaaaattgaacaattattaaaaatcaatttgacagaaagtttttgaaattaaaattgaagtcttaaaaatttacaatactaatttcatttctaatttaaaggttcttttattgatttaatttataagttttatgtaaaatatataattatttctattaatttaaataatattttagtatatgttaatctgagcactttattttaaatggtacatttaatatgattatcatatgtaaatatatctttaattatttaactatcaatattagtttaaaataaagtcataacataaatttaacttgatttttatataaaagtaagttttctatgagaaaataaaaaagttctattgatataaattgtaattcttatcatgaatatcaaatttccaatttatgttcctaattgtacatcttcaatgaaatcgtcgtttatttatttatacaaagatcctctttatcatgagatgatcttctccacattccctagaccttcgggagaaatgttattaaaatgattttttttttcagcttagtcaaaacaaatattattcttatcaaaatgtaatttctaaaaatatacttggctatttttaagagaaacttattataaatataatgtaatatttagcctattttaataatccaaattaaaaatgtcagaataatatgtatcttaagaccgaaaatattttacattttgatacgaaatgcaacagtggagaaaagacttctaactcctaagaatgtagtttaaaattgtgattagttttttttattttacatgttaaaaaggctgagagaactaattttgtaaattatcttgttgtctttcctcatgtaacggagaagaaagaggttttttggcaagtctttgatccatcttttgcatacaatttgagtttttattttgaaggaaattgaagttaagggcatagaagactaattagtagttacctttttttttttttgtgggcaaacaattagtagttacctagttaacaaagaattatgttcgttggagcatcaatgtctattgggttacacatagtataatgaatctctaacgatgctaacacaaggattagggacgtggaggaatactggagccgctaaagtcaaaatttcatcgaaggatgtaacattatagcgattgatacaacaacaaaaaaaaactagcaattgttactgtcgtagttgttataagagaaccatcgacttatagcacacataagacatttaaagaagcaggcggaattcatgccctctcaaagttcatgacttaaactgtgattgcagttgggcttaacaacataaaaatagttgcgaagagataaatgaaaatagttgagaagaatgttcgaaagggaagataacttttgaaaaatctatgtaatgagatagatggcaaaagcagatcacaaatacaatcgtcaagtcaaagaaagaaatggagaaaatggaaaatggtttgagaacctaaaggagatgacaaactttagacttgcgttgatgacacaatgagtctaaagttttaaatcatggaaaaacattctaaagctttgactagtggtgtagtgctaatgctcaattggctcttgcttggcaaacttacctttcatataaatattttgtaaccggaagcgtattacactttcttatggaggtttgtttgtttgctaccttatcaatctcatcaattagaacaacacgatttgcttttttaaaaaataagtatattttgtatgttaggtataagcatttagccatttacatacttgcatacgaaataaaaagtttgtgacttattctcctaaaaataagtgtgaaagaaacttctctattttttccaacttctaatagtaaaacactctttttatattatgtctttacgtatacgtatatatagtaagatgtaataacttctttttttcttttcatttccaatgaaaccagcaaaagcatgagcgtgtttgcattatttatttactaattaaagtaagattactcttttcttactttgatataacaattttggtttttatctaaaagttacataaaacaatcacacgacttaatggtgtaggcccttaataacagaaagctatgtgtaaattacatttctataaaacagagaacatttaataggaacagactaaccaataaaataataaaaactcaaaaatctctgctaattcttgtttcgccggagccggagagagtgagagagagagaggggtactaactaagctaactgttcgtttcaccggcgacggagagaaaaaacgcaggcgaggttgaagaagaactcaacatcgcagattctcaggtatacactaaaattcttcgtcggtctcaatcagtcaacattttcttctctccttgtgtttccgttcaccgattttgagattttttctgagtttctgagttcattgctctcgatttcatctaaatttatcttctgttttctcgagaaaatgaaatctgaatgcttttgatctccatgttctgattttgcttgggtttcatctacttttctccaaacaatcgagtgaaaaaactcattttcgtcttttgattttggattgtttatgcgaattttctcaaaatctatggagtttggtttgaaatcaggtggaaaaatcggatttttatcaccatctgaagaagctcatagagaaagaacatcatcagagtgtagtgtttcttcttttacactcttcaatgatagatctcaccacacaagttcatatcatattcaatactctgtttgataccatctctgtttagatctgtcaaattcgagtctcagattcaatctctgtgctaaatttcaaggctttttgtgtggacatttgtgaaacgtttcttcattttttgctttatggtgtgtgtttgatagttttaggaattggaatcgtagaactgtattgtgtgattttattactcaaagaattgatttttgtgcactttgtgatgtttctctataggaagaatgagtcagaagcgatctttagtcttcgccattcgagactttccaccaggctgtggaactcacatcgatgtttcgtcgagtttgaatcatccagctgagaaggccttcaagcatccaagaactggtgatgtctctggcgagaatctgagttttgctgaggctaaacctgaaggaacttgtctcaaacgagaatcagctgatcaagatcatatctttgcagctcctgaacataatgccaagcgagaaccagctggtcaggatcatgttgttgcagctactacagtagcttatgcaacttcatctcacagacaaaaagtggagatcggaaactctgattgtgatcctactcctcgtgagaaagtgctcgaggtattgagtcttttcaaacaagtttacaaccagttggatcgagataaaaaagcaagacgtggtggagattttttggatgcaacaagcagaatcgacctcaaaacactaactgtgttggagaagatgggaaaacaagtgaacacggagaagagaatcggatcggttcctggaatcaacatcggagatgtgtttcagtacaaaaccgaacttcgggtcgtcgggcttcactccaagccgatgtgcggtatcgactacattaaactcggagatgatagaatcacgacaagcatcgtggcatcagaagggtatggatacaatgatacatacaactctggtgtgatggtttatacgggtgaaggaggtaacgtgatcaacaagcaaaagaaaactgaagatcagaaattggtaaaagggaatttggcattggctactagtatgaggcagaagagtcaagtgagagtgattcgtggagaagagagattg

SEQ ID NO: 849 - DNA, 88398 bp, Arabidopsis thaliana
gatcgtaaagggaaacgatatgtctacgatggtttgtatatggttgaagaatattgggttgagagagatgttagaggtaagagtgtgtataagttcaagctttgtagaattcctggtcaacttccattgacttgatattagtataaaataaaaactgatgatgatggtataataagatttgagggaaaaaaaaatattattgaattgtagagcgtttttgttaaataaaaatagaggactaaagcttcttttttattttattttattattgtaatatattcatcaaaagaaaagtgaaaggtattaataagtggaagtcctaacaataactaataagtgaaaggttataaatcagacttttaagtgtagagctaactggtttttttttttgtaattatcaaattaccttaaagttaatatatataaatttaaaatatcaatactttcttacactattagaaacagatggagaaagattctggtaaggtgtcagatttctatttactgtgtttttggacaaaaaaacaaaggttcgagtcaatttactgtcgtgaaaaaatgtctatttattactatattgtaatctctttttttttttttccttcgactatattgtaatctctttgatatatatgtggtagccattcaaaagaataagaaaaaaatttaattgctatattgtgattttggattctagattttccgatagctaaatataaaacatgtattctcagaatctcgctgcaatattatattaagactagattttaacccgcagtacaccgtggggctataatttttagaaaaaatcaaaatgtaatatacttaattgattaacattattatataacctattattttgtattttttgaatttaatatgtggtacaacgggcaaattgtttttattagtataggcaataatgttaacttttacgatcttttttgtattaaagttaataattttatataagtacaataaaaaaactaatgctgataaaatattaaaataagatttaaaccgtgttattacttttggttgatgatattataaatatgtattaatatcgatccaaacccgtcccaccatataactctcatcaaatattactttttataagtttaaatattattaatgtttataaagttaaaatatttcaataatatatttcaaaaattaatacttttttgccttttatgtaatgacattttttgtaattcttactaaaacaaaataagtctacaaaatgtaattcaatattttaaatgcagataatgttataaataactatttagtttaatcataatttgtaattgatatgtacttgagtttttggattacctgtatttcacgtcatttaatagcctaaattgggtagttttgtaacattatttgaaacaataatattatcttaatacatgtacattttactaactgaaaaatatgagattgattatttttataacacggaaaatatgagatagattttttatattacactgaaaatgaatgattcaaaactaaaaatcatagtgtaatatagtttagcgtagaaaataattaaaaggattttatttatttattttgtttcctaaattttagtttagactcagaaaacaattgtttaacttccttagaagatgataaacatatatggaagatttgaatctctattcatatatatttaaaaatcagtaatgtcaatataattaaaggatagattagaagaaattctcttgaatgctaaataattcatttgttatttataaacgaaatattaaatgctgtaaaaaatgaaatattaaataaatatggaaagaaaatcctaccttaaaagattgtgtattattgaaatcaatttttattacagcaaattaaaaccaaaaattaataaatacttaagagaaattttaggaatgatttcgtttgaaataatggtggagttaatatagagagattttaggcaatatttttgttaggtaaatatttgatttaaaatttctgcataaattcagtggcattgagtcgtaaataagtccaagtccaagatttatttgttaaaatggctgcaaaaatgtatatatagatttgcctcataatcaaaacctttttactgcttaaaaacaaaacaaaaaaaatccttttaaaaacaaatgtaaaagtcctttttattctaattaaatctaccgagtataaaagtttttttttccaaaaatgtaaatatttcctaaaagtgaaaacgatttagctttacaatctatgattataaacctataaagatggaaatatactttactttacatatatccattatggaagtttgtttacttacaaaaaatatgaatccctttgggaaatgtttttacacaacatattattttccccacataaatgcacattatgaatggaaataaaaagtaaattttatattatttttcttatcaattaagtaatttccaaatttgaatttaaagcatgatttatatggaaagccaataactttaacaaaaacaatatttggaaaaataatatttcattaattaagattatcttcttccactataaaaagagttttaattgcatagaatcattcacttcataaatatttagagcagtcacatttgaaatctctcctctcttattcttattcttattcttattcttattctcctaaacgtgtatctatctatggagctaatcagtcatacaagttgatacatattttcttaataacgtcgagtcgggtaagtaacttttgttttttttcttaatatcatagaatgaaagattctaaactatcgctagagttttctataaattttttagattattttttttcataatctcttaaaagttttcaaacaatctctttattttaatgatattttcatgattttattttgtgaagaaaagtctataaaatcatataccaataatataatattttaattcatcaacaatcaattttttttttaataacacaaaacttttattgatttatgaatccttttattgtgcactcattgatgtagatgattatttttcttttcaacttattttcaaacaaatccttaatagtttttagatttaggccgtgaatggttgcggtttttaaaatggttttacttagtttttttcatattctattttacaatcattcataaattagaaaaagtggttccctaaaatagagaatttagattttgagagtttttatagatttggaagcactcttcaaaaaacttttaagagattttcagtgtttgtcatgaatgtgactatatttctcttttgactaacttctaattttgtttagttaattatttagtttcttgcaaaatccaaaagctgaaatttaaaaaccaaaatctaacgtcaacaaaaaaaatctcaaaaccaaaaactaaaatcttaaaaccataaacattcatagctttaaaccagtgttctagaaagagacataaacttagacgacaaccgcctaaacttgcatatgactcgttttggtgtattttactaattttcaactaaatttgtctacatatatatatacattgttataaacgtttataaatcgttggatataaattaaataaatattttatctaaattgtgtttacaaattaaaacttttctattataatagatatttttacataattttatgtataatatcatatttataaatatgttataaatgcttaaaccaagtaaaattgtctaggcctctattagatgttttaggtacatgaactaggtaaacgcctgtgtagcgtttaacgcttttttaaacatgttttcactttttttaattcttttgtacatattcgttttctggtttctattagatgttttaggtggatgcactaggtcaccgtcgacttagcttcttagaacaaatttttctatttgtttttaacatattacttttgtggtttctatttattatacctaaataatatagtaaataaataaacattaaaacctaaaaactattgcccaatagttgaataaaaataggaaaacccaccacatagtataatactaaatgcaaataactatttatagcaaaagaaatttgaaatttctataactataactagtaataaagtagatgagaacaaaacttaaatgctatggaaaaaacttacaccaccactactaacgctccacgtaatcattaaagttaattagtcgctaatcattcgttttgggtatttaatattttaaagttataagttataaccgaaacaattaacgtagttaatggctccattgaaaaacagatttaaaactcaaacacacacaattaaccaacttaagtactgttcagtgactcatcgtttttcgagcctcagagattatcacaagaagaagaatccagagtccgccgggaaaaaaaaaaaaaaaaacaataagaagattacaaaaacaaagaattactccgttcatcttcgctaggttctgtttcaggttcagtgaattttttttggttcttctcttcttccagtgtatactttgttccctgctctgtatttcatagttttcttcatttctgttccttgttttttttttttttgcgaattcttcgtttaaagttcgctttttctgacaaatttatacacctttttcgtttttttctgagactcaagcattctttgatctttcgttttcttgaattttgtgttttgtagttgaaattgcttcgaactctctggaactttagggtttgagatcgattttcctaataacggttcgtgttttttcaatctcgatgcttttacagaaaataacggttcgaatttcaaaattcaaaattttcactctccgtcatcttcgtcttttaccatttgtgttatccctaattgttacagttttaagatttagccctagttttactgtgttcacacttgcgccgtataaatgctcttactttaattgtcattttcagccataatcttggaattacattgtgggatctttctagattatgtgtgagaacatagaagattaagatagtttctgaatttggatagattagtgattttgtgaaacaattgtatatatgcaggatgatgatgactcaaaggatctctccttctaataagcgtcggagagtctcttttgttagagattttcctcaatttagtgttaaagatgaaagtgacattggtggtgatgatgttgcaaccataaaagagaacttggatggtaaagaagatagtaactgtgttggtgtcgcttatcgcgatcaccataggcctaaagaagaatcgtttgattcgataatgaagaaagctggctttaatgtagctaatggtaatcttgggaatggaaagtttcctccatctaagaggaatgttcctttaccttgtgaaggtaaagtgcaacctcttagcgtggaggaaggtattaaactaatggcttatgaaagccaaagaagacgttgttttggtaagcctttggtatcaaccaaagttgtgcagaaacatagatactcacctgcgaagaagaagttgagtaatgcaactgcgttaagagtaagacactcaccgatgaagaagttgagtaatgcatcaagactaagagcaaatgctcatagaccgactcaacataaagatgaaagacggtctggagtcctctcggttatacaacgaaaccggctttcgaaagatcttaccccacgccagaaggttcaagaagtgttgcgtattttcacacttgtgtttgatgagctagatcgtaacaaggcagcaagaagaggtggatcagagactgccaagagcaggatagattaccaaacttggactattctgagggaaatggggatgcaagttaactctcaaaagaggattggatcagtccccgggatcaaggttggagataaaattcagttcaaagcagcactcagtgtaatcggtcttcattttggcatcatgagtgggattgactacatgtataaaggaaacaaggaagtagctacaagcattgtttcatcagaaggtaatgattacggggatagattcatcaacgatgtgatgatctattgtggtcaaggaggtaatatgaggagcaaggatcataaagcaatcaaagatcagaagcttgttggtggaaatttggctttagctaatagcattaaggaaaagactccggtgcgagtgatccgtggcgaaagacgattggacaacagaggaaaggattatgtgtatgatggtttatacagggtggagaagtattgggaagagaggggacctcaaggtaacattttgttcaagtttaagcttagaagaacttgtcaaccttatgtggacttttgaaagggatagtgtgagataatgaaactttagtttttggttttttggtaagatagtacttacttaggtccgtgacctgtaatatcaaaccaactatagtgtggtttaggataacttttctttctgacagtagtaggttcaggatcttgtgttgtacaaattgaatgatccttctgatgtcttcataactaatgatccttctgtttctaaacttcataaatgttacacctttttgttaatattatattctaatgatgtaaagttacttcgcaaatcttggatttcttagtttcataatccggtaaagcagaagaacttcaataagttccttaaacttgttttttcagatatggtaatatgggtggaaacatgactttgaaacgtttatatagaatcctttccaacattttaatctaatcagaaaaaggcaaaatatctaattggtgagaatccacagcaaaatgagaaacctacaaggtttagtcacagacagctaaaaaccaaaccaaattaaagaaaaaagcgccaaagtttacgaaggaaacttaaagcccattgacttcaatatctcaacacagctctgacttttatcaaccttgtccttgtcttccttaaccttgtcaccggagtttcgaagcagagcttcaatgatttctttaaaaggtataatctcttctttctctttctctttcttcttctttcttccatcttctttccatttcccaccaccccattcgtacgacggctccatccacggcggcaacactctcctcgctgctgcttcaccggcgactgttgatgtggaacctaatttcttgtccgaaaccctagtttcaatctcttttggtggattcaatctcgcatcgtcagactctggtgaagtgggaacagaaaccattacgattccttcttccggattcacgggaggagataaatgccaatcttctaaaatctctgaactctctgtatctgaacgtttctccattctaaaaagcttcggaattcgaaatcggcgaaactgttaaaaaggaagagactttctgcttttctgtttgatttgacacaattcagtaaacttgtttagtatcggacctttttgggctttatgagctctaaaattaaaatgccttatggactgttttgatttgaaagattagagacaattcagagaacttgtttattgttggacctttttgggctttaaaggaaaatatgttatgggctttaacggaatatactttatgggaaagattaaagacaatccagagcatttgtttgatattggacctttttgggcttttaagttggatcttttggacccaattcagatttgttttataatttgggcattcacttcattcacttaatgatattgattatttttttgttaagtacagatttatcatttttttttctcagatttatcatttttaatgactcttgaaatcttgtacccaaatttttttaatagaatcttaaaatacatgaccttatatcagtattagatttaaattttctttgaaaagttgagaaaccaatgacggtattaatctattttgaaaacacatggatttttttctatatatttatatatataattcattgacggtattatatatatatatatatatggtaatttgattcattcattcatttgaagtatgataaaaaaaagttgatacacccaaattacactaattaatatcatcaatacacaacacatataataaataaatatagaaaagatttacgctttcaaaaacgagaaccatattcactattattatttttcttcaaaataaatctcattagagattgtcatttttgcctatcatattcatatattggatgaaactccaaagttatctaatcttgacaatgatactagatatcctctctaggagtatgaatgatgatgtgatttcatgagaagagagaaaataaaaatcaatacaaagatttgtttctggactagtttgagataattgagatcgactcatcacatttcatatcagaatggattgcaaataaatatctattttattaattagttaatgataattaatagataggaaaagaaaattttaaattcaagaactacaaggataataacacatgcattttaatttatcgcaaggtgttctttggacgcatcggcccaatcccttccgtttctgtaggcatagagcattacaattgccagcaccacaatctatttcggttaaagcctcctcacaacgttgttgttgttgttgcccttcaatttcattcaccatcatccctacaaaaaaatttgtttcaatagcataaaatatcaattatattttttttaaacataaaatacatgattttataatagattaagagcatgctaaatatataaaaagaaacctagaataagaatgatgaagaaagcagaaatgatggatttagtcatttttgtgtgataattggagtttctgaattacaattataatgacaatagttgtagtgtacactgaaatatcacaaacaagattatatatatatatatatatatatatatatataataaagatatatttttacaaatttgattgatgaattttggtaggtaaattatttaaaaatcttgtcatctatagttaataatctctatatctcttttttaaaaacaaatccaatttttccctaacaattgatattctagtgtttcctcaaattaaaaattcatgatttcaataaaatataatcattactaaaatatatcttacttacttagcaaagtaataaaatataatcattactaaaatatatcttaaaaattctgcagttactgctctctgagagtttcgattctgttttcttaccgtaatctttcttcaattgttgttaacttgctattactaatattttttgtttacgactttgagactcttcacataaagccttagtgattttctgatgaagtaatcttatgcatatattcatgagaagacactaccatattcataaatttaaacaaaagctcatatgctcaagttttcatttaaagacctggtggctaattatacctttcatttaagtgatgcaatgatcgataaaataattgtaacagaattccttcacaaacgggtaaacaatacaaaggattagccatcttcaataaagcacaaagaggattgaaaaagtggacaagtaaaaccaatgatgaaagggtctcttgggtcaaaaatgtacataatttataactgaaaaaaagaagaaaatttgatggaagaaacgtgtggaacattaggagaaagaaagagagggatataaataacccaaatttagaagatttaaaatacccgaaaatatgtgaatctgttttgattcggctgttacatatattgagatgataggcgatgtgttgaagctcaagagttgttatgtgggagaagctaaggtaagttttaggatgaaaccgatgatgagtccgatgagtccaaccatagctgccaacttcaaggatagcccatttccgctgttcctctggtttctccgcctccttaccgtttcctgcaatgtcgttcaaaaacattttaggcagtatcctttgttattaagcactgttatgttcacatgattttgtctgaatggtaatatgattgcaagcattaaccaatgctaaactatcaaggaaaaggttcatggaagcgtaccaattcatgttgcagctgttgtgtttgcttaacggctgcatctcgctcttccttcagccgctgtatagtctgttcatacatattgatggtataaacgtccagaaagaggattaaaacaagacacgaattaatctttcttaaattatgatatgaatgtggccacttgtgaggttctgtgagatacatttgttcaccttatgaagaaaggtataataataacccaaacaaaaaattaaagctttgaaaaccagcgtatgtctcactgtcccaaccaatcaactcagtctgtcattacagtatctatagcttgaaaaccaaaagtgcgaatactagaaagtctaaaatttgattgaaactttgaataataattcttgcagacaggtatcacaaaaaagggactattcataaggtgtctgtctatgcaagaggtccatggtacgtcaacatactaagtaaatcattaccacatgcagattaaataatataggtgggtactcacagagatggtttccgagctttgtccatcaccatttgttgctccggattcagaggatctttgggttgtagacggggtaatataagagactttgagcttacattctgttaatgtctttccactgtccttggtgaactagacacacaagtattgcatatataatgtcaatttgttttccaaaaactgcagaaacaagaagaatcttaataaaaaaagttttaaacttggatttcttacagtgtcttgaggaagttcatccacatcagtgtgtggaggtacaatggtactttgcaggagaaatttgtctttgcactgcatatctggaggatactctcgttgcgcttgtagagtaactataattaagaagatcttaatcatctccatgttcaagttttaaactgctaatgaaagaagttagagtatgaggaattactatacctctaatgatgcaagagtcccatggctgaatgacaccagtgttaggtcttacaaaatacttctttggagatgttgttttcacctgattgatgaagccaaaaacacaaaagaaagaagccattgtaacaaacgaaataacttgatcacaagacaaagcatatgaagttggtggtttgatgcagaaattaccttgaaagcaacatagttctctgttttattggcaactttaagatcacagtagctttgcttctcaagttcaactgaaacaaaatcaaaaattccaaatgtcatccaaaggaagaccctccaaaaagtttcaaacagcaattttcttaataaccaagagaatcagccttatctaaagtcagaacctcaaaagctcaaagaagttaacaaaaacttgatgctggtgtatgtaaacaagaggaaaacaagcattgatgatacacacaatttcgaaatctctagagaacaaaaagatggtaaattcgagagaagccttttctcattcacatttcacaaattaagaatagatatccctagaattaaccaagtatagatgagacaaatgcatgccattgattaacgaagagagtgtagaagaatgcttacagagaaatttgagttcatcaggttgaatggagataagctgattctcgccaacgccggtcatcttttttttttgtttgcttaaagctacgacgacaaaagtttcacaatcaaatctctattgaaaaaagtatacaacaacatcaaaaaatcgaagccctaatccaaacaattccgattttatctaacttttttccagaaaaggtaaaaagaggggaaaaactgagaaatgaagagaggaaaaaaagacggatcaaacctgaagaaaacaaaagtcacggtcccaacgatgagggaggaagaagctgcttatttttttctctggctctcccgataatcgctctccaccaatatcccaaaactctcctcctatctctctcctctcgttctattcgtggtaacaaaggcaaaagaagagagagaaagagaaacggggaagacgaaacccaaaggcgcttcgtggagcggccacgtgaagtcgaagcaaagtttccgtacgattttcctccggcgtcgtctccgggaactgcggggaagaagaaagagcgaaagagagagaagagagggaaaaatgtgacacgtgtgaaaacagttgtgcattgtaagagacgaaaaaacaaaggttaaaagcgacaggctggaaaaaagaggatgatgacgtggcagatattgattggtgtttgattttatatagtggctaaaaaggctataatgagctttcagggtggtaggccatttttcgtctctcacgattgatgatattttaaatttatttctccgtgtccattaatgattgattgttagcaagtaattaattatcggacataaaagtcatcatacagaggaaagagacaagaaaaatactcaatcattcgtttcttttttcctgctttagctggaaaattcatttacatgaatgaattacatgattttacatgtaaaaaatctattttgaaaagcaatttcaatgattcaaaagttttattttaatgattaaatcagtcatatttctgaaaaagaatactaaagggtccagattctacatactcaagatcaaaacaatcaacattgatttacttttcttaaattactgttactgtaaattacatgaaaagaaatgaaatccaaaagacgaaacaaacaaacaattattacaagagaaaagagagtagctagctacctttggagattgaagacaacacaagacaagactggtgttgggtttggtgatcatttaaaagttgagagacgaggaagtttgtccctcagatagtaaagtcttgctcttctcactttcctgtgacttaccacttttatctcctttatgttgggagagtatctgttaaattcaaaacacacatcacatcagatacatattctaaaccaagatcaaaacatattacttgattgtgtagattagtatctgttcaagatcaaaacatatcagttacatattacttcattgtagaatcagccaatagtactggaaagttcatagggactagtatgttatgataacggctagactctagagtgattaagattaaaggttggtgcgcgtttctgtagtaaataagcacaaagcttggtgacctataatgctaagacttccagcatttatgtactagttcctatagtatcatacttggagtagcaattatttccttttttcgtgaagaaagctaatacatatgatcagatatagaattgtaaatctcttaagttctcaagaagcgaagactatgactgttcacgataaaagaagctaattccggtttgttttagagttcctaaaatctctctcaaagccaaaagactccttaacaaggtcaaagacccttaactctgactatctaatactatttacatttatacttatcaatatacccgagtaagtgtgtgataataggatagttaaggaagaataaacttacatgggaaagacgatttcaacaccaatgcctgcaataatcctccggatacggatagtagtgtggatgcctgcattttgtctagacatcacaatacctttgtagatagatagcctacgtttgttctcaggaacttcctgtaaaatcaaacccaccatgtcgtatcaaaatcttgcagttaaatgcataaattgcataagattatacggggacaatgagttttaccagtttgatttctacaatatccccagtcctaagtccaggaaccggtcttacagtctctgcaacctcaatagctttcttgttcagtagctacagaaacaaaaagcaaatcaacatttcatttctccaatgcctaaaagataactgatgatttaagaacaggagccaaaacaactacagtatcagacatgtataatcagattcagagccaaaacaaaacactagacaatctcatagaatcacattggataatgaactaacccccatgatatctccgagcttgactctcgtcttccacggaggtttagcttcctccgccgcaacagtggcttctccttctccttccgcttcagtttcaacagcattctccacaacagcctcagtttcaccttcagtactctcttcagctttagcgataaactcttttctcttcttggaatcgatggcgaaaccaaaattggagctcgaatgattgagaaaaaccctagaaactgatagtcttgagttcactgatgatgctcgtggtagaattgaagaaacccctaaattcttcgacgagaaagaaggggttctcggtatcatatgcaatgcctggttccataaatggtagataaatacagaattcaaagaagcataagtatgaaaatgtgattgagcgtgagagagtgaagaagaagaacctgaggaagaagatgagagctcgtcgccatgtttgcacaacccaaactcgaaaccagagtaaagaagagccttatcgcttatccgctccgtgtatttcaatttatgggccatttactaattttatgggcctagacatttaggcccatattcaattgatataacaagaaacccattaccaaagctggttctaccagtctaccaccacgaaccaaggcttgtccaagtacactaatgtagaaccaaaaatggtttaaataaagagtttctgttacaaacaaatgtatgtttatgtgtccttaaattgatagctctaaataatctactttgggccttttaaaagttatgattgacgaataaatttctgctggagttgaaatattattctatgtgactatgttgtatattcaagtcgtctacatgttcacgttacattgacttacaccgcaagcgatgaaaagctattatatgttagtttaatcagaataccaaaaagataataatcaaaatattccatcttctttctttgtgaaacgaatatatattctcttacaggtggtttaattaaaagcttgacaacagtacgtaatattagcatacatataaaaagttacattaattggatacgaaattttaatctcctaaagatagttattctccgattgtatagaatcaaaaaagaaaagaacaaaaatcgacaaagaagaagaaaaaagattgattgattcttttgtcctccacgcatctctctgagttggctcggccacgtcagcattcaaacatcaaaaccaaaacgcatttaaatgtcgaaaagagtgggtccctttttttcttttttcttaaccgtgtcattgacaaaaagagcacttaataagccaaagccacatagaagaaaaaaaaaagaacattcacgtctctctcgtttttttggccgacgacgatcgctgaattgactgccggagattcctttaatcgtcagattctcgttgagggataatgaatcctgaatagtaagaaacttgtcttctcgttgtttcatgtatctattgtttcggatcgatccgcgttttttattttttgatgtgtttggtgatttggtttttgttcgattttgctttggatctttgttggttgttaggtttgtgaattgaatctacctaattttgctcgtttaaggtattttgtattagaattttgtatagatttggattttcgttccatggatcttatacaggtcagatccgaggaaatttgatcgagatctgcaatttctgtttactgttgtagttgaaattcgcgagtgtgacacaattttccctttgatctcattagcatattgtatatagatgttcttgcgtttttatttcctgacccgaattttcatgagtttatgagcttcactgagattggtgtttaccgttctgttgttgcagtgactatctgttcaagcttctgcttattggtgattctggtgttggaaaatcatgcttgcttctaagatttgctgtaagtattcccacaattctggattcatcatctctggtagttactttttaacattgtgtacacacaaaaatttgaggatcacatcttggagttcaatacctgttgctcaagactcaaaactcaaaagtcattactccattggattagcttagttctcactatggtatcattgttactcctttgtgttcttatttcctgatatcttgaattttatgtggacaggatgattcttacctggatagctacataagcaccattggtgttgactttgtaagcaccttcatttgctcatcactcatttatatacaggaatcagaataataagtgttaacctttactaatgatatcatgcagaaaattcgcacagttgagcaggacggaaagaccatcaaactccagatcgtaagtgttcttcagctagatatgcaatcataatctgttaaaattttggaaagagcagatagttactcttgttttggtaatcgcctgtgtatacagtgggacacagcaggccaagaacgtttcaggacaatcactagcagctactacagaggagctcatgggatcattgtatgtactcttactctaaccaaccaatcatcttcttgttaaataacacatcctatacctcttgctcacaattgcctatctttgcaggtcacttatgatgtcacagacctagagagcttcaacaacgtcaaacaatggctgaatgaaattgaccgttacgctagcgaaaatgtgaacaagctactggttgggaacaagaacgatctcacttcacagaaagttgtatccactgagacagctaaggtaattttataataaactaggtgaactctctatccacgtaaaccttgtcttaaagagaataacatttttgttgtctcatctccttgtcccacaggcttttgcagatgaacttgggatcccattcttggaaacaagtgctaaaaatgcaaccaatgtggaagaagctttcatggctatgactgctgcaattaagacaaggttagaaactaaattttacttgtgaagtcattaaccctttacttccatacttaaaaggttttgttgttttcgcagaatggctagccaaccagctggaggtgccaagccaccaacggtccagatccgtggacagccagtgaaccagcaatcaggctgttgttcttcttgattcaattagtcaccactcctctttcgatcatcacaccattatgatcatttgtttgcattgcatgttagacttctccaaattaacaactctttggatccttttgcttgtttttcatttgctttcttttgatccgattcttttctgatgtacgttgaagtttgaaacccataacttctatatagtaaaaggtcttttatgcaaataatgtagagcactctttaatgccttcgacgattctaaatcatcgctcaagtatgaaagatactagatatcgtgctattagaaatatacttcatttatgatgtacgaaaagaaagatcgaatgtgtaataccaaaattagagagaaaaatatcttaataatttttttcataacttaaaaaacgtaatagtttcgcagaaaagaccttcagaaagtgtaacaaaaaattataaaactaacaaaattcaaccaaagagaaacgaaagacagagatagcgaggctgaaggaccaggggtctttactagcccaacgaagggaactgagctgtgtctccaatcgccggagctgcagcttcttttgcatacctttggtttcctccttcaccacgaccaccgcgacctcctcttccgcgggagcctccacctctcccgttgtacctctttccatcagccggcttcaagaactcattaatgctcaacgactacaaaatcacccaaaatcactcaggtaaaaaaatgacacaacccaaaagaaatcatgaagtgagaacagaaagaactaagacctttttggccttctcagtagcatctttgcgtttttccttgtcagatccctgaaacaataaaataccaagtattaactattgctccgttacagtgaagggaatagataaactgaacagtagatgattttctgaccagcttgatgaagatttcttcatcggtgttcttcttgttagagagctgttgcatggactcaaacactttggtgtcaactttcctttcctcaacctttgtggcttgcagagccttcttcttctcctccagaattttctcatactcttctagagtcatctcctatatgacaaaaccatatcagttcaaaatgttagcaaacattctacttcaaacttaactaaacctcaaaagatgtttcaagagctgtaaatgattgtaccctggcttcagcttcttcagcttctttctgtgctttctcttccgcagtgagttctttctttgcttcaggggtttcatcctcacctccttgcttctcagcaacagggctcttctcaacctctgtggtaggttcctcagacgttctaatataagaacaacaaaagtttataaacaacctaaagttaaagtcatatggataattaaagtgaagacaaggatgcttacggagggatatcatcttcagtagtgccccagtttccacgacctccaccattacgtttcatgccagtactatcaaacatcaagttaacataaatgaatcacaaacagaagaagtcaaacaaagtagtaactaaagtagtggacagaacaaaaagaaagcttacccatgacctgtcctgctatggcggtcataattcctcggtgggcgttcaacatcaccagattccccgttggcaactccaccacggcgaggtccttcacgaccaccgccaacacggtatccaccaacagacccaccacggcttgctccatcagcatcttcagaaggtctcctgtatcctccagaaaatccattctcatttccaggagcatcattgttcctgttgtcccggttgtatccaccattacccctgccacgggaaaatccaccacgtccaccagtcccaccacgacctccttgaggagcattcctcgactccctcactacattcataacaaaaagctttcaatatatatacttatcctaatctaacaaagtattaagctttaccctaatctaacaaagcagtagagaaacaaaataagatacggaagaaactaacaaagcagcaaatgaaaaaagcacacacatttgactatggatctttcatgacaaccataaacaaacttcactagaactaatcaatcaaacactagacaaaacacagctgaatctaaatctgttaagtatcaacataaaggaaagaacttttacctgcttgagaaggaggagccggcttggttgggaacttagcggccttaggaggctgaacagcagcagcagctttctcgactttctgagacaaagccacagcgagctggcttggatcctcagcatcatctcctagaagatcgaaagggttcaaagacgccatcaccagtctggtaagatcgagttaggtacaagtcacaggagaaattggtttactttgatgggtttatagagagggaaatcagtaattcatggcgatatacagaatcagaaaaaagaggtacttgaagagagattattcggacagagctgtttgtgtttaagagatagcgaaacaagaaccctaagaaaagatgcggcagtgagagagagaggtgcgacttaaaaacctaatctataaacccttcctgagttattattctctgcggcgggtgctatttaactgtgttctggtcctctctttatctatccgtgggctacaaactggttaagcccattaacaataataaatatcagctctcgttggttaaagcccattaatgaaaagaatattcgttcttagtccattaagagaataactgggtttcaatactgaatcctctaggcgagacacggtttttctcattctaaacctttattgggttcaaagttttatgtgcttcaaaaatcaaagatataaattgattgcttaaatgaattttctctagcagagcctttgcttgtcgaccttagacagcttcatcttctcaagagtatcaaacagaaacatttacaagtgattacacacttaagctcacaacatttacaacaaaaaaaaatctaaaatagataggttattatttattgtcgcgctactgttgatggattttggttttagtaattgttacctcttcgatcaagttttggctacttagcaatatagaactcaaattgagttaagagattgtattaggggatatggtgtaatactttaataaagccgtgaatgtcatgtaagaaatgaaactagattgaaaaattaacactcacggctttattaaagtgtctattttgtttatggattgaagatatatggctctgtttagtaactaatttacatcacgggaacacttttacttggtgcctcaacatttatagcaaaactattcaactacaaaacacacaagatcaaacttatgaaaccaataactcatcaacacgtgtctcatcaccaacctcacacttcacctgcaccacctccgacgtcagattctctgcttttctccttcgtttcaacttcccgttttcagacgacgacgtagaagaggacgacgacgacgacgacgaagaagatctcttagacgtgatccgaaccgggtcaggttcaccggaattaaccctcaacggaaaattcaataaagcgcgggaaccacgcatcctaaaagcagctatatcgtaagctaaagccgcatcttccgccgtctcaaacgtccctaaccaaaccctagctccattcttcgccggatcacgtatctccgccgcgaatttcccccacggtctctgcctcactcctctgtaatgcttcgccttcactgccgtctccgtaaccggtatcgctttctttggtttctcctccatcgccgtaaagttctcagttggctcgactttaaccgccggaaaatcaaaaagacagctcaagtccgatgatgacgtgtcaaaatggaaggcatctttgaggagtccgtacaccaacatgtcctctgaatcattctctttcaatggcaaacctccccaactctctgtgaaacacgaactcggtgttgactcattgagtcgcagctcgttctctcctcctcctcctagcaagtgacgtgttatcgactccaacaaagcgtagtcggattctatattgcactgtccgtacattttcagagaaactaactatagagttttttttgttttgttgattgatttatcaaatatctgaacttttttctatgtggaaggtggttaagaggtttatatagagggtacgaggttcacgaacctggaaaaaaagaaaaagtttttcatgtttttccaaatttgttttagtttagtgggtaattaaaaaatatgaaagttgtggatttttcgttactacgaaggttcgtgaattaaacacgtgcgctttatccacagatatcacaatgaagaagggtcaagatgacgtcatgtggtcatgacatttctggaagaaagatgctgatttggttttgtctctcaacttgtcccttgttttgtcgttcggttttgaatacgattcccggttttattaggcaaaactagtgtttaattagtttgttaatcgaaaaccaaggtcttaattcattatactttgttatatcgacataaattttcaactaaacttatatttcatcgccttacactagagtaataatttttgcttaagtatactttattagatagtattggcaagtatattatatgtttaattacatgaaatctaagcttagatcttgttatggtggtgaatgaaaaatcttaacgaggtgggccataattatatgaatggggacactgaaagtgtctgcaaaaatcgggatacatttctcctggtcaccaaccaattcatatcatcatctttccctttcacctttcatttttactaatttctaatttagaattttcctaattgccaatgtcatgtttattttagtactttttgatacaagatttcatgattaagaaattcattagtgccactttagtcaataaatatggagtagtgaaatcatagtgataaagttttcatgcaaagctcaatttacaaaccacagtttaatccatatttgttgcatttcttttctttcttttttgaaaatataacagccttagatctttttgtacaccaatgatttggaattttgtggataattattgaatttccatctctttctattggctaaaagtcaataacaacaataaggctcaaagacaaattaatggtgggtctctcacgtatgtccacttgcaaaagggacctccttcacggaagcatagtttagtcaatagtcactcaaactctctaaaaattagtttactatatatttttaatctatattcgattccaagagtagttttggttcaaacacatcattctggtcagatggttatttcaattttgctgtttttgagtgtatatatgatgttatgtttgtaaacaaatgaaacttttaattgattacaagaacatgaatagctctaaatatgattaaaaacgaatttatttatttctttggtaaaagaataatgataatatacttatggatccaatcaggttaagttccgttttgcaattaaatactttgattaattaaatatgaaagtagtagttgaactttcgtttttatgtttgaactccgcagctaatcctcaaattatctctttggacgtttcacatacatccacttttgctgtatcttaggaatatattgttttcatattgtttcttgtttctttatgatttgggtttatataattttcaaatgtcatgatgatcatcatttaatcttagttgttttagtcacatcttattatgcttattattagtcggtgatagtttaattttaagacgtaaatcatctattctcatattatgctagaacaaactttttctttgtgcaacctcctagaacatatagtcgcctattatccatggatcccagatactcctccaagaccaccgaaaggtttaattatggataggaaccctttggtctacgttaacaccttgattgacttccagacgaagaggtggaaagtagatcgtctacgggagttgttcccccccccccccccccgaggatattactttgattttagggataaaaccgaggctaaatgtctcgcgagatggatatagttggacattgactaagttcggtaattatactgtcaagacaagatatgaagctgcgagagccctctctcgcccgtcttgcgaccaccctcttcagggacctagtgttacggcactaaaggcgcaagcgtggaaattaaaaactacacgaaagctaaagcattttgtgtagcaatgtgtgtcagagtgtttagcaacttgtcaacgcctatattttcgccatattggtagagataaaaaatgtcctagatgtggggcggatgaagaaaccatcaatcatttaatatttgaatgtcccccggcaagacaagtctgggcgctatccggtattccctcctctccatctaggtttctttcgtcttctatatacaataatctcgattatctgtattggagagcgaatgagattggagcttgtgaggagagcttacgggtctttccatggataatgtggtatatttggaaagcgcgaaaccgaaaaaatttcgaaagtatttgcgtgcaacctcaagacactttagacttagcaatacatgaggaagaagtatggaggcgagccaataggagagaagagcaaccagaaggtaccaagccaagtttggaagggcaacatatagatatggcttccccaatctgcttcattgatgggtcttggcatataactgattcgcggagcggtcatgggtggattttgacccgtggggaaagattgcttcatttaggattgaagggttcacgtcgttgtttatcaccgcttcatgcagaactagacacattagtttgggctttaaagtgcttagtagacttatcaatcaaggaagtccttgttaagacggattgctctgatcttctcactatggttaatacgccggaggagtggcccatttttgcatcagagttaaaagatttcgagtattttaagaatcaacttgtatcttttaatattatgcatgttccccgtactagtaatatccgagcagattatcttgcgaaatgtgcaagaactcgcggattctatttttcccatgtaagttcaacggttctcgattggctctctttaaacgagagcgcttatccatagaataatatatagagttttaacccggaaaaaaaaaatactcgcctatagtttgctttaaaaaaaagtttcttccaaccaacaaaagcactcacctaatcttacaactgtgatttttgaccaatgtttttgttcatatctcttcaaaaaaaaatttatactataatgagcattataatatattttctatcacatattattgtgcagaaattaagtatcaagttaaaggcaagttttagcaaaaacacgatttacggaattagcaacatttacacggacgatcgcatatttcagacaagacaaatacagaggataaaatatcataaaagggaaaatgacgacacaaattatgtaggcagtgattggtacacattgttagttttttttaaaatattactatgtttttgccaaaaaaaattacgaatcagagcaatcatgcataaaaattagaagaatagcgtaaatatttttctcttttctattcacacctttactcgcttttctattcattttcttatttttcctctcaattactccaaaaacataccaattagagtttagattcatgatgtaattgacgaaaaaaatcacccatatgattagttacactatatccgaacactaatattcataaatttagtgtctcggatttatgcatacaaacttttcatggaagatgcttctcatttacaagctgatgataaaattgatcttacattttttaacaatgaaatgtcttctattttttgttatagccaaaataactcagctttcagttatatataatctacagtttagtgtattttgttaactttaatcgattcctaattcattttaatcaacacatctatatgtaggcaattggatgcaaaaggtacacaaaacaatgcaaaaggaaggatcaaaggaaagatgttatatgacacgtcagcagtattcaaaagtttgaagttgaacaaatctagtcatgtttgactttgaccactgacttttcaaacctatcttttattagtagcaaactcagttccatacgtgcaaacaacctcacacgtgcgttcccaccgcaatgtttgaggttttcttcaacagaagacgatatttcttattattataacgttagattgagaattcaaagattctcgacaaatgaatggtaacttttttctataagaatcacaataattagttttagttatacaattttataatgttggagtaattgtcacatagatgattggttggtgataatagttgtttatgtatgattgatcaattaaacttataattttccattggaataatattttcttgacctttaaatttggaatgtagatttatatggaaaaagtagataatcatttttgtgacgctaattaaatatgttgtcccataacgacagaaaaaaaaaaatgaaacaaaaatagagaccagattggttcaagaaaacgacacacagtttaggatgctaaaaaagctttgttagtaccatatgattgttatattgtttattggttccttaataatgtatttagacgtcaaaaaatgtttttgtattgatatgtgacctcataactggttagctgcttagggccattagattagagttttgattgtttcaaatgtcaaatcttacagtccgtcaaattttatttgatgtgaagtaagtgagttgataaatgggactactttctccagttggctagggtcgactgctaataacatttctccaaggaattaatctcaacgggcttgttgctcaggcaacaatttataggaatagagattgaacgaaataattaacagattacacaacaatgtttcctctactttaagcaagcaatcttcaaggctatattgatcgactgattcgagacgcaatcgtcttgtcaagaagaaccacaaaaactatgatgatatgtaatgcaaacttgactcgtctttgagtaacacttcttcatctagtccaatcgtcgcagggtttcttttaatttatttatttattatcttctcttttggtaagaaagagcttctttaatttggttaaactttttttttttggttaagtacaaaacttctcattccttaataaaattgatatctatattataaaatatcaaattttgtaaaacaaaaataattaagagtagtgtttcacaacaacaacaaattaaaaagactactatataaattaaaaagactacttggctttctagaaattattaaatataaatttttatattaaatctctgatttgctatatcatttattaaaagtgtgaactttattttgtttcattgtaacaagtaacaacatgactttctagaatctagtgagtgagtcgttgattcattctacaaaccagttaatgcaccgcgtaaattcttttcacgtgcatggtgcagtgcatgaagatggatcaaattaaatacgaaaccaaacataattcaatagtatatcatcttttaaaatttgtatgattaataatctctgtcaataaaaggccgcatgcattgacttgactctttcagtcttgtcttgcttactaattaaaccctccataatgcatcaacctaatcataaccgaaaattttctgagttgtatttggttagactttaatgctttactatcattttagttacgtttgtgtttacctcgcaaaaaatcttctagaaggataatataatactacaatacaatgttggcattatccattactgagcggtgtgaaattggttttgattgtttaacatatgagttaaaatttgttcgcaatattggcaaattagcatcggatatgctattgtataagaaaacgcttatttttggagtgcgcgtctacctgtaactgtataaactacgtaacgaacctttgaacgcagagtgaatgtgagtctctgtgacacgacttaaagcttaatcagaagcagattattggaccttatggagactttatcaagattagctaatgaaggttactatatatgaaactttgaagtaattgtttgcagccttttgggatcaataaaccataaaagcattggttttgttttctctatctatatccaattccggaaagtagaaaactggattagtaaaaatcatattcacacattgcgaagaaaaactatgtgcgcgcggatacgttgggaaaatctgcgcatggtttaaagttttgctttcagtcaattataattcgttttttatactccctctgttccaagatacttgatattttgggtttttgcacaagaattaagaaaagtaacttttatatttttaattattcttttagttagtttaataatattaattttacttctctcatttcattattggttacaaacaaaaataataatgatagtttttcaaaacatcaattttggtggaacaaataaaaaaactcaaaatatcaaataacttgaaacagagggagtagttaattaaaaaaagatatttcacactttgacttggcgaagcctcataacaatgaagttatgtatgaactatatatgaagttagaaacaatggaaaacagcttgtaaatattcattgttgtatatatgtttttttgggtcaatttggtgcatgaacaaaaataaaaacgtagatgaaaaccggatattttggtgttaacatttgcatttgaacttcgtgaaagacggataaaagctcatttttgttctttattatatggctgctattagtacacagagttgaactttagaatactaaaaatctcgacatcttttattttatttttgtcaagcatcgacatcttttctgttcaagaaaacgaccgcaatagtcgaataatataactcttggactagttaatatatatttgcgatagattttcgatctcacttatatcttataaccaagagacaaaaacaatattgcagtcaagtacaaaacgaaaacaatcacaatgtcgactatagatgagtcggtcattcgatccaacggctctgagtccacgaaacacgcaaccaagtggtgctctcttttacaccaaatcatattataaaaaacttaaaagaaagagaggatggttcgttggctccttcttgttccttaattaattcaaattatattcatcacctccattgaataagtccatttcacgacaaagtcaccaatgcttcttttacatgtatatatacttctttccactccctcttctctactcaaatcaaatcttcttccttctctgttttcttaagctttttgaaaattttatcaatggcgactcctaacgaagtatctgcactttggttcatcgagaaacatctactcgacgaggcttctcctgtggctacagatccatggatgaagcacgaatcatcatcagcaacagaatctagctctgactcttcttctatcatcttcggatcatcgtcctcttctttcgccccaattgatttctctgaatccgtatgcaaacctgaaatcatcgatctcgatactcccagatctatggaatttctatcgattccatttgaatttgactcagaagtttctgtttctgatttcgattttaaaccttctaatcaaaatcaaaatcagtttgaaccggagcttaaatctcaaattcgtaaaccgccattgaagatttcgcttccagctaaaacagagtggattcaattcgcagctgaaaacaccaaaccggaagttactaaaccggtttcggaagaagagaagaagcattacagaggagtaagacaaagaccgtgggggaaattcgcggcggagattcgtgacccgaataaacgcggatctcgcgtttggcttgggacgtttgatacagcgattgaagcggctagagcttatgacgaagcagcgtttagactacgaggatcgaaagcgattttgaatttccctcttgaagttgggaagtggaaaccacgcgccgatgaaggtgagaagaaacggaagagagacgatgatgagaaagtgactgtggttgagaaagtgttgaagacggaacagagcgttgacgttaacggtggagagacgtttccgtttgtaacgtcgaatttaacggaattatgtgactgggatttaacggggtttcttaactttccgcttctgtcgccgttatctcctcatccaccgtttggttattcccagttgaccgttgtttgattagttttttttgagtttttgaacgatgtgtatgctgacgtggacgtacacgtaggtgcatgcgatgaaaaaaacatctatttgttcatatttttgcgtttttctatttgttcattctttttcacaattcacaatacattatttcagttaatgattacggataatttagctttacgttaatttattatgagtactagaagaaatcggagtaattcaacatatagattatactagtataaatgtcaattgcattgacattaattgaggaattatagtagaacctagtataaaaagaatgattcaaacatgagatattgaccggcgttatgtgaagttgttcagacaataaatgcataaccgtgattctgtctgaacaagtcgattcttaggataaaaaatggataaacttagtcaaaatatttcccacgtggttagacttttgcttagttacatgacgaatgtgaaagccatccatgcatgtatccagaagaatatatcttgcacggcgaattctctacgtattttagtattttagatttgacgacatctaattttcttttggtatttcgggtttgacatctaatctgctaagaaccttttcttataatcgaagaattttgttgggtcgtcttgtaagatattattttcagtacacactatctaatcattcatcaaggtcactaatgggccttgtggtctaaactttgaatatatactttcacctatgaaatccagaagttctggctgggtaagttctaaaccaacctatcttatacatcgaaacacaaaagataattggaactacaaacaaactttacccaaaaattattagtttgtttttatctccgtagatgaaattgggttttctaaatcgttttcgaagatgaacgctaatcaaacaaaagtggtataacacagtttgttacgaaattttgttaggaaaataaatgaagtatgtgttttgcgtcgacctcaaaataaaatacatattaaatcttgcatgctaatattattgtatagaataccaatcaggtaagaatcgctcgtcatcatacgactattcaatatccaaacatatttatttggaaaacccgaccacgaataatggttagctttacatcattatccacacatactcaaatggttaaattttctagaattgtaatggaagacacaatgttatcacgaatgaggatcatcatgcacttcaggttacctaattatcctacgtggacaatacctaatccttccatgattttcaattattgcagataatttttctgaacgtcatcatttcccataacgaataatcatttcctcaatcaacgcaaacctaactatctatgtcatttacatgtttatgtggtaaaaatctgcttagaataagtaaaccttcacatatatattgtaacaaaataattgaggttaatgttattcaatgcgaaaaaatgtaaacacttgctaatgagtcgtaataaccctatattatttttccaaaacatgtttctattgaagttacaaattaagtttccactctatttggatggagcgtactagtcgtagacacggagagcttccaagtccatcggatcaacttatcaaacttatcgaccttttggtccacaacaagatatcttttgtccatcttcatcatggctctcgcaagaggatgggttacatatatggtttgctttattgcttaatagggattaatttctctaatacttttgattagcttttcgcaaacatttttcagcataaggacgcatctgacgtacaaattaaaaatccaaatgaactaaaatacttttaaacagaaaggacaaggaatctaagccatcaaggcccatctccacgtagctccagcaacgacaagatgctttattatcccattctcgtggatacttgtgtgagatacacgcttcagataaatcaacggacgaaattgtaaaaagcgtgaggaagagagagcctctttccaaaggagagggattggatcattgagatatatccgtttatccatccttgaactcctgaagattccttcgcacagacaactctctcgaacatgttaaagattctctgatacctaactattgattcctttttccctgcatttttcgttcactatttttgcttataactttttgtactaaaattaaaaatcatgccaccatcctgtatttcatatccaaaagctttggattattttataatatatcattggcttgatgtgattgatatttaccaaaaatctattctagtttctttttgtaacaccaaatgttatttaaaatttgtattggaaaaatgattcatttatataagttattatatccctcttaaaaattgtataaaatctctaagacattattaattgtaaaagatagacacaacacgtagctatatgtctatatccaaaaataaaacacgtagctatatgtaatattataaaaatgtacatatattattagggttgtaatatttggtcggttgaaaattgaaatcgcagctcaattggaaattcacgtgtattttgtctttgattgtaagatattaaaactgttcttcgctttccttttctcatttctcacttaaccactcgatccactttaaaccacacattataagtgtgcctcaaaaaaatctaacattactctctcaacacatctctctttcttctccatttccttcttctctttcattctcttatttaagatttaaatctgctcaaatgcttgtaaacaaatttcaagttctttaaacgatttccttttcaagaaaaatccttctccttcttctttttaccacatagatcttcttgatctacaatggattctgtttctctttctgaggttactgtcattaaaggaacaacacatttgggttttatgcacagtttcagacagccattttgtggtgtcaaaatatctccaaagttctatttatccaaaggtaaataataacaccttaaaatcacttcctcttcacaacaagaatcttcattgtcttttttaaaaattgtttttttttttttgcattttggacgagaagttgatggaccaaaggcaatatcttcgagcagcaacacaaagagtcaatttgtttatggaggaggaagcatagctgcaacttcagattcaggttataagatgaatggagtaaacctaaaaagcagaacattgatgagttctgcagttaaagaaagatcattacttgatgcttatgatgatgagtatggtggagtaatagtagatcatggaaaattaccatcaaacccttatgctttcgcttctatgcttcgagcttctctatccgattggagaagaaaggtaaaaacgataaaccctataaaagtcttaaacccttttgtttttgtacatatgtaaatttgggggaaatttttgtagggaaagaaaggagtttggttaaagttacctgtggaacaatcagaattagtcccaatagctataaaggtaagcaataagaaaatggttcttgatcttgtttgataaagcagagatttgtttatgcaagttaatgattttttgtggattgattttgcaggaaggttttgagtatcatcatgcagagaaaggatatgtaatgttaacatattggataccagaggaggaacctagtatgcttcctgcaaatgcttcacatcaagttggtgttggaggttttgtattaaatcaacataaagaggtatcaatatatgaatgattattctctcaagtctcaacacttaaagtagagtaggtaaaaagaagagttacctgaatttttttttaaatctcattaggtgcttgtggtacaagaaaagtattgtgctccttcgattactggtctatggaagttaccaacagggtttattaatgaatctgaagagattttctctggtgctgtaagagaagtcaaggaagaaactggggtaattaaatccgagaagattagtatatagtataaatcttgattctgtttaaaaattcgcaagatcataaccatgtatggcattgtgttgtgttattcaggtagatacagagttctcagaggttatagctttcagacatgctcacaacgttgcatttgagaaatctgatctgttcttcatctgtatgttgagaccactctctgataagataatcatcgatgctcttgagatcaaagccgcaaaggtaaatgtaacaagagtctttattagaatgctccagttgtacatgctacaagacggtcctgattacaatgattgttgtgtttttcagtggatgccattggctgaatttgtggagcaaccgatgataagaggagacaaaatgtttaaaagagtgattgaaatatgcgaggcgagattaagccatcggtactgcggtctttctcctcatcgacttgtctctacttttgatggcaaaccttcttctctctattacaacgttgttgatgatgatcatgatccttcccactccaattgtagcactgagttttatagatagacgggtaaaacagaaccaaatcaagtggttcgattctgtatatacttattctcatgtaatgtatgttgttatttgatactctctcttcagtatagtaaatagtaatagatcctctgcaaaatccatgtagcatcgaaccggtactctcagtagactatacaataaaaagatctgttcaaataaataaccggtgggtcaacacaagtttaaacaatattcaaactcttggactgacatattcaacgcatataatataatgtaaaccaagttgtaattttaattcatagaagaagacattattgcaatggactaattcaactaaaccaagctagccaaacatgtcaagatcctgtgcaaaatatctgcttctctctcaaaccctgagcacaatagataacatacaattgtggtggaacatggaaacgttttcaggaatttgacaagacaaaacaaatgacaagttgtggaaacatacaagaaataagaacgtacgggacaaagtgacaggaaaaaatagctcttgccctcctccactatcccattcaaagccttatatatgagatcatcatcgattttcttataatggacgttgatgaagattcgggcagttttctatatcgactttgttcagcttcagttttggaaaagagacttgactcccatagatgcttcctagttccttcaaataatgtagacgaaggacttgtagctcttgaaaaggatcaaccccaacaccttgagctttctctttgtttattaattctgtcatcttaggcgaggattccacgcttagagactcgagatttgcagcatacatcagccatgtcaaatcctttagatgtatgcatgagtttattaccacagctgagagatccttgaaccatggattgcttggagtgatttcactggatgatgtggatggagaatactggtctcttctcttaccttcccattctgttcccgactctgtgatatcgcagtttaccatttcaagtttgtggagactactcaacgtaccaatggctgcaaatgatactttaagtccttctagatatataccctgcgtcatccctgccaatcttgtgcttcctagaaactcttccaaaacagaatcgttattcacagtaacggtcaaaagttgtaaacccttcaactgctccaagatcttgagcaagcagcaatctaatgcagcagcagaaccataaaatctgagaacctgcaacttttgtaattctgaaatcagaccgacgcttcgaagattggaagtggactccaaattcaagtgaatcaatttactcaagactcctaaaccttccggcagatgctttatactcgtccctgataagttgagaagccgcaaagaaaccaacgccgagattccttttggcaactcggtgatttggaagttccaagatagatccaaaaccaccagagtcgacatgaccagaaagaatttaccaacaatatctaccaacctgttattttgaaggaacaaggttacaagatttgtctggtcaggaaattcaggatcgtctggtatgttcttaatctcattgttgaacagagacatctttgtcacagttgtccaatcggtgacatcaggcagttggcttaaaccagcatctgttttcacaacatatctttctccatccctaaattcagatactatccacaatgccatatcacggatcatatcatgcatatacactttcttattagactctaataacaaacctgccccaacaagattatcgatgatctcatagcctcgatcttttgctctctctcttccgtctttttcatctatgaaaccctcacctatccaatactctaccagctcatcttgtttgatataatatgccttgggaaataaagcacaatacagaaaacacttggcattttttgttttcaaataatcatagctcaacttcaaaacttgaaatattcccttctctgtacctttcatctcactccgataagactccaaagtatcgagtgcacgacgccattgaatcacagtagatttagatgccatagtctttcttataacttcaagtgcaaggggtaagccacaacacttagccacaatcttttttgcaatatcagaaatttcatttaacccgtcgcaatggaccttcatatcgaacaaatcccatgcgtcattctccgacaaacattgaacttctatgtcctcatttgccctcataactgaacagacatccttagaacgagtagtaaacacgactttgtattttttaccgagcactgggatgcctattgctgttaaactcacatcctcccataagtcatctaataacagcacgaaccggggcttcatatctcttagtaccctgcttatttcactagctttcttccctcttgagtatgtagaccaattattgtcacagatgtgtaatctttccccgatggcatcttgaatcttcccgacatctgcatctttagacgattcaacccaaataacaacatcataatcatcactgacttcaacgaacttgttgttaattagagtgaggagggtagttttgcctacgcctcccataccgaagattcccaacattctgttttcatcttttctaagactttcccaagtcttttcaagcgtcgtatcaagaccgactgtttgttggcaaagtctcacttctaccacaggaggaggaggttgctcagtcacttcttgaaaatctttaccggagagacttttaacttcagtcaacttcttgaataccttctcgcctaggttgcaggttgagaaccagcacccagatgttgacagacgtcgacgtacagctgaagcattctgagaagaagcatcccgagcggacgcaacatccattaactgtttggtgttttcctcaatgatttcgacttgtgaaagccacgtagccactatagctagccgttgaccacccttaagctcaccagcattgactctgtttacaacatcttctttttctgctttaagctcatcaaaagcactcttcaacaagacaagattttccttcaacatgcaaatgttacccacctttacacacaagtaagacaaagcagacttataacatggctcaactacctgccaacagcaattcattgtgctcaagattgagaaagagaactaagatgagagtagcaaatttaaaacagatctttgtacagaacaggatgtctgaatcgggggagtagaaatagggaaacagaactttgtgcaggacgaactagagagaccagagaaaaggaagagaccagagaaatggagagatgatgaaagaagaaaaataatggagagaggaaaagaactagagaaaaaagttatgtggaatgcctttaatatccctaccccacccgcatgttgtagaattttttgtaacaacaatgatgactaaaaggtgtactgtgtctgtgtggtaggtaacgttattggttcattgatttacaaatccatatataattacgcaacatgtgctaagatattgacgtggtttggtgtcagctaagagacaaatattggttcactgattaataaattcatatgggtttgaactcatacatagaataatatggttgttcttaaatttaaaaacatccacaaaaccaggttagacaaacaaaaatgactaacaaagcataaacgaatactatatgtccaccaaccatatgcaaaacgaaagaaaaaaacaatgaaatccatgaataaagatttataaaatgaaagatccacaaaagtatcaccacaagccacgtaactcccatatgcattaaaacatatcaaatttaatttcaaatagtaaccaaaaaatttcattttgtaaccaaaaaatcaaattaaaattttaaaagggaagggcaatattgtcaacccacaaagccaaaggggaaagtggctgaaaaattcagtctcaattcagttgactcctaaacacacaaaatgggaaataatttctcagttgaatctccatctttggcgccgttcctgtgtgggaaacgcaagtatttatacaacctggagagaaatctagaggctttgcataaagtaatgcaagacctcaacgcaatgagaaacgatctgttgaagaggctgtcgaaagaggaggagataggtctacaagggctacaagaagtcaaagagtggatttcaatggtggaagagattgaacctaaagccaatcggctgcttgatgaaagtgtctctgaaattcagagactatcaaggtacggctattgttctctgatccctgcgtcgacctatcgttacagtgaaaaggtacttacgactatggaaggagttgaaactctgagatctaagggagtcttcgaagctgtcgttcacagagctcttccgcctcttgtgataaagatgcctccaattcaacttactgtttctcaagcaaagttgcttgatacggcatgggctcgtctaatggacataaatgttgggactttgggtatttatggtaggggtggagtaggcaaaaccacccttcttactaaactcagaaacaagttacttgtagatgcatttggtcttgtgatctttgttgttgtggggtttgaagaggtcgagagcatacaggatgaaattggtaaaagattaggcctccaatggagaagagaaaccaaagagcgcaaggcagctgaaatattggcagtcttaaaggagaagagatttgtgttgttactggatggcatacagagggaattggatcttgaggaaattggagttccttttcccagccgagataatggatgcaaaattgtattcaccactcaatctctggaagcatgtgacgaaagcaagtgggttgatgctaaggtagaaattacatgtttgagcccggaagaagcatgggatttgtttcaagagactgtcggagagaacacgttgagaagtcatcaagacatacctaagctcgcaagagtagttgctagtacatgccgtggtttgccccttgctcttaatctcattggtgaggccatgtcaggaaaaaggactgtacgcgaatggcgttacacaattcatgtcttggcttcatccacagccgaatttccagatatggaagatgggactcttcccattttaaagtctatctatgataatatgagtgatgagatcatcaggttatgcttcctttattgtgctctgtttccagaaaatttggatataggaaaagaagatctggtaaactactggatatgcgagggaatccttgcaaaagaagatagagaggaagctgagatccagggatatgaaattatctgtgatttggttaggatgcgattgttgatggagagtggaaatggaaattgtgtaaagatgcatggtatggttcgtgaaatggccttgtggatagcatctgaacactttgttgtggtaggcggtgagagaatacatcagatgctaaatgtcaatgactggcggatgattagaagaatgtcagtgacgtctactcaaattcagaatatatcagattctccccagtgttccgagcttacaaccctggtctttcgaagaaaccgacacttaaaatggatctcaggtgctttctttcagtggatgacaggacttgtagtcttggatctatcatttaatagagaacttgctgagttgccggaagaagtttcaagcctggtgttgctgcggtttctcaacttatcatggacatgtataaaaggattgccccttggtttaaaagagcttaagagtttgatacacttggatttggattacacatctaatcttcaagaagttgacgtgatagcaagtttattgaatttgcaagtactgagattatttcattctgtttctatggatctcaagttaatggaggatatccaacttttgaagagcctgaaagagttgagtctaacagtgagaggatcttctgttttgcagcggttactaagtatccagcgattagcaagttctatccgacgtttacatctaactgaaactacaatagtcgatggaggaatattatcgttgaatgctatattcagtctttgtgagcttgatattttgggatgtaatatcctggagataaccattgattggagatgcaccatccaaagggaaataattcctcaattccagaacatacgcacaatgactattcatcggtgcgaatatcttagagacttgacatggttgctattagccccgtgtcttggtgagctaagtgtatctgaatgtccgcaaatggaagaagtaataagcaaagataaagctatggccaagctgggtaatacgagtgagcagccctttcaaaatctaactaagctcgtcttagatggtttacctaaactggagagcatctactggactcctctacccttcccagttctggaatatttagtgataaggcgttgtccagagctgagaagacttccattcaactctgagagcactataggaaatcaagttgaaacgataattgaggagcaagtgataaaaatagttgaatgggaggatgaagctacaaaacaacgtttctcccatttcaataacaggtatcttcttccttatcctacattttcttctctatttttttcgataaggtttcttaaatctataaaagcttggccatgaataactagcatcttcccacgggaatgtcacttaccatcttcttaattttttatatatttcaatgtcactcttattattcatagaatctggaaagctgatttgataagattttgcaatggtgatccttattttgattgatcattgtttgttcgaattatgtaacaaacgaacggagtgcagagactttgtacagatggctgaagatccgaagatggatggtttgacatcggagtcacatccaattcaaaccatagacctggtcgggactacaggaagtggagaaactgccactgcaaacaacatccaaggaaagaaggtggtccaatcgggaacacacgcaactgttgttaccatggaatgccagacatataaagttttcacaccagattgccccatcaacaatatgattgacactcctggtacgaatttccttttatgttatacctaactaaattatcatgcgtgggaagaaaaaatacaaattttctaataagtaaggtttgtactttacgtatacaattagaataggatccacgtaaaatgtgtatttctaattttctatatagtttaaaattaaaaagtgacaaaactaataatgctgaaccaaatattataatgtatataactatcaatactattttcaattatataattgatatgattttgtgtcactaccatacgcatatgacatatatatttattatttatatgaacacaaactctcattcattaaactagtgactaaagtttactttgctcacaaaagagttgatttaaacgttttcacaaacaccatccggacgtaaaatgtgtaatggaacatacatagagaccaaataattataaatttataatagataatgcttctatgtatatgtatgtttgtatgtaagattacgtcatctcaggtgaactattgttgagtttttgatattgaacactggttaaaagtcattgagactgtgtctctgatgctagaaagtccttcatttgatgctaaaaagactttgggatccgagttttgtttctgactgtgtcatattttctgactttgggaactggatttaggcaagaggaaggtgaaggagatgctttttaatttgaacgatgaggcaagaattattgggatctcagggatgatcggttcagggaaaaccattcttgccaaggagcttgcgcgggacgaggaggtccgaggtaatcagttttgccctttgttatgtctgaaactatccattgttaatatgcttgggccatctttgaagtcttttgagcagtttatgttgttgctcagtggcatgtttactggtttatttggatgatcatgcatttatctctgtatgttccattgtgtcatgttcatctccggtgaactgttgatgagtcgtatagttgagttcttgatattagaatctgttaagagtcggagagactgttcctttgatgctaaaaaagctttaatacaggccattttgcgaaccgagttttgtttctgactgtgtcacaatctcccaatcttgaggagctgagatcccttatacgggattttcttactggtcatgaggctggctttggtaccgctcttccggaatccgttggtcatacacggaagctagtgatccttgatgatgttaggacaagggaatctctagaccagctgatgttcaatattcctggaaccacaacgcttgtggtctcacagtctaaactcgtagatcctagaaccacctatgatgtagagttattaaatgaacatgacgcaacatctctgttctgtctctctgctttcaaccagaaatcagttccttcagggttcagcaaaagtttggtcaagcaggtaatgggtctgctacaagtgttacatgcatagtagtaatattctttgtactttcagtactcatcttgactctatttgttaggttgttggggagtctaaaggtctacctttgtctctgaaagtccttggcgcttcattaaacgatcgacctgaaacatattgggcaattgcagtggagaggttatcaagaggtgaacctgttgatgaaactcatgagagtaaagtgtttgctcaaatcgaagcaactctagaaaatctcgatccaaaaaccaaagagtgtttcttggatatgggtgctttccctgaaggcaagaaaatccctgttgatgttctcatcaacatgttggtcaagatacatgatcttgaggacgcagccgcctttgatgttcttgttgatctagcaaataggaatcttcttactctcgtgaaagatccaacgtacggttatagaactctttatgttctcatctcttgtagccacttttataattttaaccattcttaactaatttaccgtggataatgttgcaggtttgtcgctatgggcactagctactatgatatattcgtgacgcagcacgatgttttaagagatgtagcacttcatcttaccaatcgtggaaaagtaagtagaagagaccgcttattgatgccaaaaagagagaccatgcttcccagcgaatgggagaggagcaatgatgagccatacaatgcacgagtggtttccattcacacaggcaagaatttgttatgcaacgatcttctaatgaattaattcggttcgtcactagaatcataaggtattaatatggatttctttacaggagaaatgactgagatggactggtttgacatggatttccccaaggcagaagttctgatagtaaacttctcttcagacaactatgtattgcctcctttcattgctaagatgggaatgcttagggtgttcgtgattataaacaacggtacctctccagcgcatctacatgacttccccatccctaccagtttgaccaatctaaggagtctctggcttgagagggttcatgtccctgaactctctagcagtatgatacccttgaaaaacctccacaagctatatctgattatttgcaagatcaataacagttttgatcagacagccatagacattgcccaaatcttcccaaaattgactgatatcacaatagattattgcgatgatcttgcggaactaccttcgaccatctgtggaataacctctctcaactccatcagcataacaaattgtcccaacatcaaggagttaccgaagaatataagtaagctacaagcccttcaacttttgaggctatacgcttgcccagagctaaaatctctgcctgtggaaatctgtgaattgccaagactagtgtatgtcgacatctctcactgtctcagcctaagttctcttccggaaaagataggaaatgtaaggacacttgagaaaatcgacatgagagaatgtagcttatcgagcataccaagttccgcagtttcattgacttccctatgctatgtaacatgctatagagaggctttgtggatgtggaaagaggttgagaaggcagttcccggacttcgtattgaagctactgaaaaatggttcaacatgacttggcccgacgagtagtaggttcttaattctccctccgagcttttgaaaatgcatgttgtattattatttattaactcgattaggacccctgtatgatatacgattttattaatacatgttttgctcttataacgtcaatatataaattatatgttgattttaagtattaaaagtttctatttggaatctcaaagatatgtttttaaagattcacttataagtaataacaaacaaacaaaaactatttagcttaatggtaaaaagcatgagtctatatagagaagggttcataatttaaaattagtttgaatgttgtttgttattaagtgagatacattttaaaataatttagtgagataaatatatcgttaatattatgcatgtgctgattattatatgaccaattatatgacccatcaatagttgtcaacattttcttggtggatcgacgaggacgaacccaatgatttagaaacagggatgatatataacaagtaagtatagtcgcaagtgtccctgatctatagtcatacaaggtaaggcccactgctgaaaagagaagtggcggtcggatttaaaacaatacaagtgaagtagtgtatcgagccctttgtaacatgagattgtatagatcccagtaagagatggtagatttttaatctgagataagaaactatctctatttggaaatcagagaatactttagcaggggagagggatgggagctacctcgagggcatcaagttcttcaaaactggagaatcatctttgatttggatatcagaaagagaagatatatctatggttatagtggctgagacaaacgattctctctcccaaggatcattgggactgccttggccatctggactgcaaggtataaacaggaagaaataaaaacaacaaaaatatcaaggatatagcactaccaatatgataaatgcattgacaaaatcagtcttttaagtacaaaaatacttttggtgaagggaaaactaataaaggaaacttgtgctattgaagcggacaaacagctacccacacaccattgtgggggaattttgagaaacagatttgagactttttattgttgatagtaacatatacataatgctctagcttcttctttctatgcgacgaatcaacaatattgtccatgctatcaacaatacaaataatagctaaaaccccaaaaatcataaaactaagcaacaagctaatcttcttcagtttcagagcaagaatcaaaatgtacagtatttaaaagagctagacagactttaacgtagaagaaaagaatcaatctccagagccttccttagtcatctctgcttcctttttttgcatcttcacgtaatgttggttatgcgatttaacttgttatggattcctagtctttacaaattctctagatatgacctcccaagctcctggccctttcgactttagtccttcaagaaagagtctgaaaacgtacaccaaagtaaatggataatcagatgagagattcatcatatgatctatatttaccaaattagcaactttaaacaattaatgcctaagcaaagccaagacctccatctaacattcatcatcttaaattagcaagaagacaacttactcgtgttcttgggctgaccaacgagttcccttcttcgccactatcggcgtcgctgaacgtggtgagtactcgggcacaacatctctgccggattcgataacagcaatatcttggagcagcttatcgtagtggtatttgatctcatccaccgacgttctcatttgtgcagcgataatctccagctttgccggcgaatccgggacttgcacgagtgcaacctcgaaagctttgttctcctcccaagtccacttcatcgtaccagccattgtagccaagaaaagaaagaaaaagaattgagagagagagagagaaagatcgagcgagtgtaacgacgtggagttgaatctgttacgtaacaagaatctttgcgatttatatctttatacagcaacaacacattaaaccaagaaatgaaccaagattacatcttaattaattcataaaccggacattccagagcccttaaccggaattatattagtatatcactatatacatgttaataatagccttgataaaataatagcaaaacagattagccttttagtttttgacgtcatgcatgcacttgtgggtctgtgaaaatctcgcgttttctcgtggaaaagtggatcgcttacaaaacctcaagatatctttttttttttttcaacttgaacctcaaggtatctaagcctttaaacaaactctcttctacgttttataatcaacagaaaaatgttaaaatataaaacttcaaatacaaattaacaattatcaaactagccaaatgttatatttcaaacatcattgttcattgactttttacatgttttcaaatatttactttaatacaaaataaacaaaatactagtggcgtataaaatatcataaaacacgagcaaatatcggaggatactagaaaacatataaagttgaaaataaactaactccgtgtataaagaggaagaagttatcttatgactagaaaatatatatatatatatatatatataatattaaaagtgagagcacgggtcggagcaaacaataaaaccctaattaacaatcaaagccacctgatagagatgagaaacacattgatgttgtcggaccttccaggagatttgttagaggagatactttgtcgcgttcctgccacatctctgaagcagttacgatctacttgcaaacaatggaacaatttattcaacaatgggagattcacaagaaaacacttggataaagccccaaaggattttcagaatctcatgttgagcgactctagggtattttcgatgagtgtcagtttccatggaattccatctgtagaggccacatgtgaacttagcctaatcgactctttttctagttttgaagataaattcgagatttctcaagtctttcactgtgacggcttattgttatgcaccgacgcagacaacactagaatcgtggtttggaacccgtgtactggtaaaactaggtggattgaacccaataatcgttgctactactatgcttttggatcctacttggacaaatcctacggtaatagctacaaaatattgagctatagtggttatggctacgagaaccaagaactcgcaatctatgagattaactctcaatcatggaggtttcttgatgtcactcgtgactgcatcctcgaaagatatactgattacggtgtgtctttgaagggacatacttactggtttgcgtcagatgagaaagagaaaaatctcagcgtatttctagtcagttttgattatacaactgaaagatttagacgtctacgtctcccgtatcagtgccctgattataacactgcgtctttatccgttgttagagaagagaaacttgcggtgttgttacaacgcgaaaatacatcaaggacagagatatgggtgacaagtaggattggtgagaccaaagtggtgtcgtggagcatggtcttagcagtggatttcccgtccgaactattcattttgtctggcataagtttcttggtcgatgcggagaaaaaattcgtcgtatgttgtgataattacttcggagaggatgaatacgataccaaaaacttggttcacattgttggagagaacaacaaagtgagagaagttaatttcggagtatccgaatcatcttggccatttttgtttaattatgttccaagtttgattcaaatctgggaaggtgtaggaggcaaaagaaagagagtcgaataagtaagcttcacgcaaacctgttttttttttttccttctcaccgttatctttggtcatatctagttatgttttgactaacaaatgtttcatacatacttgttgcattactttaagacagtttttttttttttaatagtttcgtgatcaaaaaagatctgcattaatgccgcctccagcaacatgggggtttcattcttcttttcttaacacatacaaagacagaaaaagcaattaacctaatgaagagaccaaacaaacataatgaagagctacgtgtacgttccaagtctagttccccttccaggataagatggttgtttcgtgtttctaagcttaattggtatgtgattgttcatcttctgccatcatatatgatagtgcatatgtattgaaattgactttggtttttgtgatacaacctggacacgttttaggtctttgtccacagttgtatcagtttcggtcatgtttgtggtatcaacaaaactaagatacacacattccaagtatacatgacaaatttcactctatgctacaaataaccaaggtttgtactaaaatccaaatacaaagaatttggatgaaccttacagaagctatatggaacattctaacttgatatacttaatttgaataaacaaaaaaagaagtcattatttagttattgaatactttttttcccttgaccttacagattactgattaccatatacatacatatatgtgaatttttgaagaagacaacattgcatttgtaacatacattgcaaatgagtaacaatgaccaacaacattaacagattgtttaccaagacttacagtaaatgtacaatgttcagtttgtatagatagggtccttatatatgctgagtcaaagatgtcaatcctaaaggaaaggaagacgagtaacggcattcccccacaaacgctatcatctgcttatttcttttcggatgaaggtggcaacattttcttggtggatcgacgagaaagtatctgaagccgcactttaaggtgagtgccgagattctaccgcgagttgataactctatactagctctaactctacacataaacataacacacaaacttatacaaagataaacgtaacacacaaatatctgaacagagattcaattgtcatacacataagcaaaaacagcaagaattgtgaaccagagtgatccacatgtgtatttcacatatctgagtcgatctctaataccctctcgtggtgtaccatatatttggattaaactaaatgatagcatatttttgtaaattatcttaaaaataaaaatttaattacttttttttagtaaaaatataagtctatgtaccgtgattaatatatctagttaattaacaaagttgataactattccgttattattacactttgcaatgtcgatcacatcaataaacgcattgtccctttcccttttcgtatccgccggaaaaaaataacgtctttttttttttcttccaatctctctgtctctctccccaattcccagattctcatgtaagctctctccaaggatttgatttctgtataatgtttgcgaattgagactaagagccctctcgatttcgatttttgttcgtctggatcctttgcgttaggttttttcttctcgtataattagggcttccgatttgtttacccttagttcattttctctaaattttggtttttgattgatgggttttcttgatttagcaatttttaagatttacttgaaagattccgtaattttgttctgattcggattctttgatctgtgctcactagctctctaccaaagcagcttccttttctgatccctagtgttcaattatgtgaacagattgtttactttagcttctcttccttttcattctagttttgcagagattttaggaggaacatgattgtttgaattgggagagacattggttcgtgtaaaatgcgggtgcttggtttgagctcaagcttatgctctggtgaggataaggaagaagaagagattaatggagaaggctctctcacgcctgtttatctcaacgtctatgatctaactcctgtcaacaattatctctattggttcggccttggcatatttcactctggcattgagggtaattgtggcttcttctctattacttacttgacctaactaaatttttctttgtcattgctttctatttgctttcatccatatctggtttatcatgttatcaaagtacttctagccttgaataggaacaatgatattcctcaattgttctccacaagttgtgatttattattcattaggtgaaaatggtgtttattatattagctatggaatacattattagaaggaaaaagtggaacaagttttgaggaatctagaatggaatgctttttcaaatcctgccttattgtctgaagcattctctttcaataattagaacttgcctgatgagttatataactgtacttctgctgaaactgttattgttgctaaatgttcatctaatgtggagttttttttcactttgccatgtgtactactagctcatggtttcgaatatggatatggagctcatgagtattcgagcagtggggtatttgaggttgaacctaggagctgtccaggtttcatctttaggcgctcagttttgttgggaaccaccagcatgtctcgctctgatttccgctccttcatggagaagctttcgagaaagtatcatggggacacataccatttgattgccaaaaactgtaaccatttcactgaagaagtatgcttgcaggtaacaggaaagcctattcctggatggattaataggatggctcgagttggtaagataactttcttattccagcttattatttctttactggttcttgttgtttggcatatctttttacatggttgcttgttcttgaattttttcaggttcgttctgtaactgtatccttccagaaagcatacagctctcatcggttaatcatcctgaagccctcgagttctctggtaagttaatcatgttcgctcttcttcacctaaaaaaaactgcaataggcatttggatttcggataaaccagttgtgtttcatctccattgtagatgataacgatggatcagaagaatcagttgcatcttctgtgtcatacgaaacagatggagaaggatcggatcatcatctcataacagcaccaaacagcgatattgcgtatctacaggacagaccagtgagacttgcccgtgagctcctccaagaaccaaccgatgatacatctccgcagtacttgttgaagcggtcctgatcatcacaagcatcaacaacttgtgttgtctgtaaacagtgaggcaatgggtccatatattgagtattctttggatctataagtgtaaaaaaagatttaagatttaaatcagaacccatctgagatgttggattgtagtgtaagatttagagacaaatggtgtgacaaaaattgtgccttcttcttctcccaatgtgagttcacatttcagtgtcataattcgtaagatttgcgagactaataattagttttgatttttctattcaatttacagacagttaatggttatggattttcagacattctttgttcttcggttcactcttcgcagctatattttattggaggcggtaacataacttattgggctagcctgggaaaataattatacattgggcccattattttaaataaccttcatcggcccagtttgtgtgtaaacagttatgatcagatccagaccgtccaaaaatagggaggggtgactctcgaacacgatgctctgaagactgaaaaaggcgtaaacttttttcacctggctagggttcttggtcgtcgttaactggtacgtttcaatggtctctctgtactatcatttctgcgaaatgggtcttctctttggaggctaatcgacgttgtgcttaatctaattgctcttttaggttgtttagaggaatatatcacaggttttcaattagattgatctgcttagttttgtaatcagtgtaggttaccagtgaatcatgaacttccgttagggttataagctctctgtttcttttcctgacttatcaatgtcactaatttagatttgatgcgtagtttagcttttgaagatcagggaactgaatatatctggtttaaggaagctttgaattttctgcttgccatggacattcgacttatcagtatttttgtacattttggttaatgtttatcgaattggtttgatcagtctgtggattttaactttacaagttaagatgctattcttttaggtctagttgataggtcatggatttgttgttatatggagtctagacattttgccactgctttagtgttcttagcttctaagggtttcgttgatatattgtactgggtttatcgtttccaggcatctagtatggctttctgcactaaacttggcggtcactggaaacaaggggtaaatgttccagtgtcatcaatgctcggttctcttcgctacatgtccacaaaactttatattggtggtaagtataacttcctatcagattgtttcattttcttactcttcgcagctgtggatgttttctttctcttgtatagcagtttaaatgttttggtcacttttataattttggtcccaggcctgtcccctggaactgacgagcactccttgaaggacgctttctctagcttcaatggagtgacagagggtatgccctggatcttactatctttcttttcactgttctacaatagaacgtggttttgtttgtgctagttaatgtataaaccattcaaggatgtgtggttggattgaagccgtcctattcatcattataccatgaatgattgatggtgatgaccatttttagtatggtatttgtgttttgctttggtttgcctcgggacttaactctcttgttgagtacagttaatatattcagtcatttcattacttgcgtatttaaccagaaccttgccgtatcttttttctgtgcagcaagagtcatgacaaacaaagtgaccgggaggtctagaggttatggatttgttaacttcataagcgaggattctgccaactctgctatttcagcaatgaatggacaggttagaaatctaaagaatcattgatctatctatttacctatcatgtcaattgctgtgttgtatggttaatcttccccttttgttggttttgggatggtgaaataggagctgaatgggtttaacataagtgtgaacgttgcaaaagattggccaagtttgccattgtctttggatgagagtatagaagaagctgagaagaaagaaaataagatgatgagccgatctgtatggaaagatccattcgttgatgcgttcctgatgaagaagaagaatgcagctctgaacaggaaaatatggtcaaggagatcgacgattcttcccgagtatgttgattcggcggtgagaatctacaacggcaaaactcatgtgcgttgtaagatcacagaggggaaagttgggcataaattcggagagtttgcgtttacaagaaaagtgaagaagcatgctaaagcaaagtagcatctttgagaatgaattggtcagctgcttgaaaggattgtgttgaaaagccaaaaacgaatcaaatcaataaattctcaataggtaaaactcattagctcacatgatcatgtagacgaatattgagctttagaaagtctttagttttcttgtcgatttcgtatttttggaccacaaaagtgccaatgttattttggaattcgattaacaaatatcaattgtggagcttcaataaccaaacgaacgatgcacctccatagtgcttgttcaagaacttgtattgtttatatacagaagcaagccaatggggccatgttgagtattctattcgatctaaagatgtaaaagaagattgaaaatgaaatgagaatccagtttaaggtgttgttggatggtactagtgatattagaggcaaatggtgtgaacttgttgacaaaattgtgtcttcttctctctttgagttcacatttcagtgtcataattcgtaagatttgcgagactaataattagtacaagaatttattaatcaatattcgtcgttactggttatggatttgatatgtttactcagaaactgtcgtctaggcttgaagggatttattattcagttcacattttcatgcaatggagccctcacaagacctgtaataagacgagttctatttgtaagttttttatgatttataaaaagctcagaaattcatttatagtctatagcttttatggtttacatcttgagctgaaaaattaaaacttttgcttgtagatattataacttacataagctatgaattatatatataaatttgtatttcggagctaaaaatgttataattttattcatagatttcatacttctatgttgcttacctaaaatgttaattcaaccatatattttgagtgttaagggggtgtaaaagcatatggaattatttgtgttaaaatgacaaatcctctgttattcaatcatcaatattaaaaagttttataaaaatccattgttattgaaataatgattccaaaaaagtaccatcaaatccagtattatggaaatattataaccactggatttttgaatgactttaaggtggtttataagattttaacatgttttgttttttggaatttggaagaactttagaacaaatcataacatttaatctaaaatcacccaaaaattcatctaaaaactcattaaaattcgaatcattcaaactatatggttggataacatagaatttgtcatttcaacaccaatcatttcaatgtgatttattgattatattttttatcatagagagagcaaaaatctctgtcaatggcaagtaggtaccaagtagtggcatgagagagtgatgtctggatttattgatttctttggtagcttatacttccatatgtttccttatttaatttttcattccaaatatgggacaaagttataacaaatagtattcgatatcaaacgtcaaaacatgtactcccaaatatattttattggaatatagttttggagatatttttacctggggggagatggaaccaaaataagatctagaaatgtgattggctaacgaaagaagcacaataagttaacaagtgacagtgacaatttatccctcgacaacaacacacattcacatatatctttttattttattatttttctgtgtgtctttaaagtttacagcacaagtagtttctaaatcttataatcaattttcattgataaacagaaatttaaaatatttaaatagacaaataaatgatcaaatctatatttctatacaagagttaattcacaaaaatttgttgtgaaacaaactctttctatatttctatacaagagttaacatatttctatataagttattgtaaagatcaaaatatgaaaattatggtataaatgcatagacacatatatacgtgccctattaaaagaggcagcgagaagataatataggaggaagaggaagaagaagaagatggtgaagaagagagttaatgcaactgcaagaagatagtaactaatcagcaccgtccatttttgtcatctaattctttcttacttggccgcaacttccaaccacatcacacactctttctattcccttatatattcccatctcaaaagttcttggagacacataaacattaaaaaaagaaaaagaaaaaaactataaacataaacgccaatcgcaactttcttgtctttcaatgggagagaaaggtttgaagcggtctggtgttgcggtggtggttgcattactagccatggttcatgtctctgtttcagttccgttcataatgcttcatgggatctcagctcaatgttctaatgctagggatgctaacttcacacagcttctcactaacctctctggctctcctggcttttgcttgtaagtcaatccacaaaatagtttatgcgttttgataaccaaaagatcgggacatgtagaagaagagttatgtattcttgctatctataagacgataacgtccaaagtggctcaactatgttgatggatttgttctaatgaatccagagaaattggaaatggagttgccgattcatggttaatgccgcttacacgacaagcggaaatagcgtgtgagaaggtgaagcaaatgaaagagttgagtcaaggatacaacattgttggaagatctcaggttcttgatacactttcttgaaaatcctaaaataggttcttgatcattatttacatagtgtttaagtttcatggatgttgattaataatggaacaggggaacctagtggctcgaggcttgatcgagttctgtgacggtggccctccggtttacaactatatatccttggccggtcctcatgctggcatctcctctgttcctatgtgtggtgtaagttttttttataaatcttttttctctaaatattttttctatgattttaatttaatcaatcaatcacagtaacaacattgtctttttcttgttaaagtctggtttattctgtaagttagcagatgagctaatcaagggagatatctatagcgacttcattcaagtataaatctctttctgtcttttttaggattaaatcctcagtagttacaaattaattaacatatatctttaataaccctgcaggatcatcttgctcctagtggttatctcaaaattcctactgtatgtctactcaccaaatatattttgatgataaaaaaactacttcaaaatttgagatatcacaaaatctttgtttttgatttatcaggatatgacaaagtacttgggaagctctaagtatttacctaagcttaacaatgagataccagaccaaagaaaccaaacttacaaagaccgtttcaccagtttacataacttggttcttatcaaggtttggtctcctaaaaaccatctagacttttcaattatcttttgattcctctcttgatgattcggtttttgtttgttttacagtttcagggcgacaaggttatagttccaaaagattcatcttggttcgggttttatccggatggtgaattcgaacctcttctctctgctcaacagacaaagctctatacagaggattggatcggtctgaaaacattggatgatgcgggaaaagtgaagtttgtgagtgtagccggtgaacatatcagaatggtagatgaagatgtcgtcaaacacgttgtaccttatctccaggaccaaccgtcttcggtgcaaagcttcaaccgcaagacgaagcagcccttgcatgcttaaaaatagcaaataccacaatagttatacttattcatgcaatatatgtcgaaaaagcttagtgatgattttgtagaatccttattcttatagaaatatatacatacttatctgaaaaatcgaattaatcagtagagaaacgactcatgagatcttcatcaccacatttgtatcaaggcttcaatggttttctcaacatgagaaacttccaatctcatttttttttgtttttgttgttgtagaagtctcccaaaatgactcgaagttttttcctttttggttctttagtctcaccaaattacatattatttttaaataatctaacaattctccaaatatcctaaaaactaattcatatctctccaaatctaaaatttcctaaattccaccaaattttctaaaatcatgaatccaatacactccctgattcaaatctctccaaatctaaaatttcctaagttccaccagataatgaatccaatacacacccctaagagaggcaacgcggagatgtcattagaggaggaactaggaagcagagcgttaatgcaaaatgttaccaaaaacgttaatgcaagatatcaactgatcagcaccgtccatttcaaactgagaatgtaaaaaccaatcacaatcgtacattttttcatctagttcttcgttcttggccacaacgtccaaccacatgacgctctttctactcactttatatattcccatctcaaaagttcttggagacacaaaatatcataaacatataaacgccaattagaacttttttacttgtggcggtttacaatggagaaaggtttgaagcgatcttgtgttatggtggtggttgcattcttagccaaggttgatatctcagtttcagttccgttcataatgcttcacggaatcgcatctcaatgttctgatgatacaaatgctaacttcacacagcttctcactaacctctctggctctcctggcttttgcttgtaagtcaatccacaaaatagtttattcgttttgataaccgaaagatcgggccatgtagaagagttgtgtattcttgctatataagacgtgcaaagtgactacttatttttgttttatatagcatgaacaagatgatgtatttggtttgatctgattcttgttttttttttggtaatggaatccagagaaattggaaatggagtaataaattcaatgttcttgccacttacacaacaagcagaaatagcatgtgagaatgtgaaggaaatgaaagagttgagtcaaggatacaacattgttggaagatctcaggttcttgatacactttcttgaaaaccctaaaataggttttttgatcactataacacgtttcagtttcatggatgtttgatgaatgatggaacaggggaacctagtggctcgaggcttgatcgagttctgcgacggtggacctcctgttttcaactatatatccttagctggtcctcatgctggcatttcttctcttcctaggggtctttgtggtgtaagctttttttatttttcctcaaattatctaaaacttttatctgtaatttaattttaatcaatcaaggtaacaacaacgattgttttgttttgtttcttttcttttaagttaacgtccgatccagcatgtaagaaatttaatgagttgatcaagggagctctctatagcgagaccattcaagtatatatatctctttctctatatatatcatgattaaagactcaattagaaaataataaaaaatcttcaatgactctgcaggatcatcttgctcctagtggttactacaaaatccctaatgtaagtccattcaccatttgtttataagaaaacttgcaaaatcaacaaataagtgattgatgatcaaaacaacaacataaagttttaacaaaatctttgtttttcttttatttattctcaggatatgaaacagtacttggaaagatctaagtatctacctaagcttaacaacgagataccaaaccaaagaaaccaaacttacaaagaccgtttcaccagtttacacaacctggttcttgtcaaggtttggtctcatcaaaaccatctagacttttcaactatcttctcattcctttcttgatgactctgttttttttttttacagtttcaggacgatgaggttattactccaaatgattcaacttggtttgggttttatccggatggtgagttcgaaactcttctctctgctaaccagacaaagctctatacagaggattggatcggtctgaaaacattggatgatgctggaaaagtgaagtttgtgagtgtacccggtggacatgtcagaatggcagaagaagatgtcgtcaaatacgttgtaccttatctccagaaccaacagcctgccgcacaaagcttcaaccgcaagaccaaggagcccttgcatccttaaaacagagcaaaaacctcaattgttatacttatacttagcaaaaaaaaattgttatacttgttcatgcaatatcgaaaaagcctagtgatgactttgtagaacaagaatccttattattgatatattgatatatacatacctatatgaattgtcgaattaatccgttgagaaacgacgaatgaggtcttcatcaccagttttcttcaagacttcaatgattatctcaacatgagaaacttccaactaatctcattttcttatcaagcatcggtttcacaagcttatagctagcagcttcccaagaaagcccatttataaattaactttggccaatcttttgcaacatcttcaatatacataaactaaccaatataatgcatcttctcgatgcttgttgaagcagtattgatcagagtcatcaataacttatattgtctgcttacagaagtgagtcaatgtgtccattgtaagtattatttctatctaaaaaatatttagagattttattctttacagaaggagcaaatttatttgtatatttagttgtcaaattaaaatttagtctatacattatacaaggcgcaagtttgtggatttaagaattatataaaaacttgaaatatatagtttttatgcattctcctcttgtgtaatacataaaccaaatatgagataggttaatctgtatttcagataatattaaattccaaacaatatttttacttgttataagaaggcaattaatatctctctgttaatggcaagtggtaccaagtagtattaaactattaatgcaatggaagagtactgttggaaattataatcctctatcacacattcaaacagatctcctgaaatcttctcttccaaacttgtacttctctgatccaaatgtaggctccaaaatatagacatttaccatttactaagtccacaactcctttcttgtctccttcaaaaatgactcttgtgtaaccatcatatgactccgacagttcggcattgccatgatgagagcttaaaaattcaccttcctgagcatttcaagtcttcactcccttagcttgacctgaaccaagataaaatgcctttgtcgtcccgtaatatccatcctgctttggacggcatcatagttacattcgatccatcctatttacaatgttattttagtattaaaaacatgacaataaatttgttgttaaacatattcaaatacaatatgattggatttataagtaattgtaatatgaaatgtccttagtaatatgttaaaaaatacatagatacacacacgtactaaaagaggcaacgcgggagatgtcattagaggaagaactaggaagcagagcgttcatgcaaaatgctaccaaaaacgttaatgcaatatctcaactaatcagcacagtccatttcatactgagaatgtaaaaaccaatcagcatcgtccattttttcatctaattatttgttaactcttaattggccacaacttccaaccacatgacgctctttctattccctttatatattcccatctcaaatgttcttggagacacaaaatatcataaacatataaacataaacgccaatcgcagcttttgtacttttggcggtttacaatggagaaaggtttgacgatgtcttgtgttttggtggtggttgcattcttagccatggttcatgtctctgtttcagttccgttcgtagtgtttcctgaaatcggaacacaatgttctgatgctccaaatgctaacttcacacagcttctcagtaacctctctagctcacctggcttttgcatgtaagtcaatccacaactctttcgtccttttgataatccaaagattatggctatttatgtgttcttgatacttaagacgtgcaaagtgactatttatgatgatgtctttggtttgatctgattcttgttttttttttttggtatggaatccagagaaattggcgagggaaatccaataggcgcttcatggttaataccacttacacaacaagcggaagtagcgtgtgataaggtgacgcagatggaagagttgagtcaaggatacaacattgttggaagagctcaggttcttgaaaaccctaaaatcgggttttgatcattatatgtacatattgtttaagtttcatggatgttgatgaatgatggaacaggggagcttagtggctcgaggcttaatcgagttctgcgaaggtgggcctcctgttcacaactatatatccttggctggtcctcatgctggcaccgccgatcttcttcggtgtaatactgtaagcttttttatttcctctaaatatcaaatatatatctttgatttcatttttaatcaatcaatcacagtcacaacattgtatttttctgttgtttttggttttccttgttcaagtctggcttaatttgtgacatagcaaatgggataggcaaggaaaatccctacagcgactttgttcaagtattgatctctttctctctctttacatcatatgattaagtcgtcaattagaaaattaattaaaatctttgaatgacttttgcaggataatcttgctcctagtggttatttcaaaaaccctaaagtatgtctctattcaccatagtttattaggaaacttgcaaaatcaacaaattagtatctacctaagcttaacattattttttctgtttcacagaatgtgacagggtacctgaaagactgtcagtatctacctaagcttaacaatgagagaccatacgaaagaaacacaacttacaaagaccgtttcgcaagtttacagaacctggtttttgtcctggttcgcttctcttctcttaactattatagttgtctactatcttctgattcctctcgtgatgatttgtttttcttttatacagtttgagaacgatacggttattgttccaaaagagtcatcttggttcgggttttatccggatggtgacttaacacatgttctccctgttcaagagacaaagctctatatagaagattggataggtctgaaagcattggttgttgctggaaaagtgcagtttgtgaatgtaaccggtgaccacttaataatggcggacgaagatctcgtcaaatacgtcgtacctcttctccaggatcaacagtctgccccaccaagactcaaccgcaagaccaaggagcccttgcatccttaaaatgagcaaatagttcaatcgctatactaattcatccaatgtcgaataagctcagtgatgattgtgtgacacaataatccttcttcttatatgaataataaaagcatactatctgaataaattgaattaatcaatagagaaacgactcatgagatcttcatcaccagttttcttcaaggcttcaatgattttctcaacatgagaaactttcaatctcattttcttgtcaagcattgatttcgcaagcttagcagcttcccaagaattcccctgttggcagagaccgagcaaaagaaccgcatgtatatccgagtctattgttgatttcacatccttcttctcgatttcttgatacagaaggaaacaatcgagatacctttccaacaaacataactccctgaaaacatgactgcacgcaagaccatcaggtctaaccccgcggaccaacatcagacggaaaatcttttcagcctcttcccatcttttcatacggattagcgacacagtagccgaactaaaacactcagaaagagaaacaccgcctagtttcaccaacttatcaatcaacttagaaagagccttcacatcctcatcattctccaaaaccccctgaatcaaaacacaagcagtaacacgattcggcatgcaccctcggtttcccattctatccaataccaacaacgcctcttcaaccctcctcttctcacaaaacgcttgaatcaccaaagtataagtaaccgcattcggactaatcaatccaccaccgtcttctttctccatctccgccaacaactctaacgctctctccatatcaccagacttgcaaactccttcaagaatcctagaatacgtcacactgttaagcacgcaatcatgcttactcatctccttagctaacctccaagcgtcatcaatcttacccgcattgcaatacccattgatcatcgacgtataagtaatcacatctggataaagaccaacacaatccatctcttttatcaacatatcagctatattcaaatctcccttatcagcaaacaacctaatcaccaaattatacgcaacagtgtctgcacatacattaaattcaggaaacttccttaatacccacaatgcctcatcagcgagattcgcttgattacacagagtcagaacaatcctcatcgtcttaacattaacaaagcattcttctttccgataagattcaataacgtatttgatcaaatctggctttgctctaatcttaagaatgtcgcaagctttggtatacatgtaagcactgtgtctatggctggatagagttcctgcccatatgaaaaacctaagacccgattgaaattgatttggatcgcatcttcttagtacctcgttgatacaagaggagtctaattgtacattagccgaagctaattctttctcgagattacttgtgcatccttgaagctggccgtataatctctcggcggctgagacagttgttaaaaaacgtaaagctgagatttttgagggctgagatcgtaatgaaggagataccagacgagaaatcaatgaatttggcatctgggtcgctataagtgtagcgattgatgaaagatttcgttaagaaaatcgtaagaatgagacttgagtgagagaaataggagagtttcgctttcgcagatggaaacgacgacgaaagactaaacgtatgggccgacataataatgtagcccattaagacccaataagaattgctcatacatctttgtcagatctgaatcggaaaagcaattgaagtcagattaggtcacaagatttcatgatttcgttaagaacttcaaataagctacacttctttttcttttcttttttgagcaactgcatataagctacacttataccatgctcagaaactgtgtatttatctagaagacgtttgtgaatttttggtttaatttagaactcttgtaagatatcaaaaaaagatagtttcataatttttggttaatatagcaagtttgtaactaatttttgctaatttaaatctttttaaggttgcatcatacataggactagttcatgagaaggccaatcatccaaaattacaatgaccccacacagatagactatataacgataacgaaaaataccaaaacacccttttcccaccactaaaataaaaaatcacgatcgtggacgcaaggcttcaaaattcagcccatgagccacctgaccagcacaagcaacccacggattgatagaaacgggcctgtgattgtggtgatggttcgatgatgatgggccacccacacgctcgcacgaaggacacatgatgagtgtagttggtggagtcatctgaccgtagaattgtggagacagcttgagagttcgaagctccatagcctctttctgaagtctccggttctcttccgttagcttctctacgcaccgtttcaagtattcgcaatctacctccgtttgctttaacttggttctgtaaaaccaaatcggaccttgtaagtaaaaacttctacacaagggggtataaatgtaattttacaattttggtgttaagacaagaaaatctcacctagctcttctgttttggaaccacacttccacttgtcttgccgtcaagttcagcttcttagccaaagctagcttctgtttctgtaaattatgataataaccttggttatttcaaagtaattacgataattatcatttgattcctctgacttttttacacttacgggattgagagtgttgtgttctttgaaagtctcttcgagaaaagcagactgatcttttgataacctgagcttcttcctcgacgtttcgcccccgtcttcttcttcatctgaggttccacgtgagtaccctcgatccggagtgatctcgtcgtgatcgtcgccggagccaacgccggttccggagattccttctctctcacttctcttcccgctaatggtgcttgagatcgtactgtttggtgacgaaactcctgtgtcttcctcgcagttaaccgttgatggaaaactgttcacgtctatcttgcgaagatctgcaaagagcaatcaaattttaagtttgagatctgtttttattttacttggaaacgaagaaaagtctcatacttcaattctgaaatctgttctgtttctttaaaaaaaaaaacagagaagatttaagtatatacctgatgtaggatcgaatgtttggttccatgggagtctctggagattgtttgataatgaagagttaggattcagattcatctgaagaggattgtgattttgtgaaaaccctaagcttaggctcaaacctagatcttctttgcccatcatcatgttttttatttcctttcacaagaactcaacagtttcaggaattatatttccttatgagaatagagaaagaaagaacacgaaatggtttgttctttctgagatagagatgagaaatggtgtttgtttcaactcgaagttaggactctttgtggaagagaaatagagagagatgtgagatggtaatgaagaagagaggggattaatatagtactttgaatgatgagagattttgtcaggtggctaattacaatccatcattattgtttctttgtttttggacttgtattactttatctccaacttgtgtcccccctttggcctttgccatgtctttctttttgtactttctcaatatttgtgtttttctttttctttcacaaacatttttagtttattccttacaagaacccatgcataataagatggcagtttgtccaaaacaaataagatggccaatatgttttcaagtgtacacatgtatatgtgttttgtgtctgaagatttaaagccaatgtctttaaaaccaatagaaatgtccggaccactctgagaaagtaatctacaattaagtgaatcatcaaggtgcgatgttttttgtatatggataacgcaatttgcactacttgtgttaattttcatgatccatatcatgtagtatgtctcaaagttgataaatacaataattctcgtacttcgttttgtcttaatcaagtacacgtcattatactcaaagtacatgtattatgtggatatcaataaaagaaagtatagaaaatagtatcttgattagttacggcataccgagctgagtcaaatctccaatagtgtagccaattatttgtccaaatattttttaaagagaaaagggaaaatagtatttgaggttggatataatggaatattgactaattggagtggttggtacaaaacacaatcaaaaagaatctgaacttgttcaaagttgtggaccaaccaacggttatgaaccaatgatatacgtgtgagatgaatatttgcacataaatatcatcatcatggtttctactttcatcaacaatgacattttaaagctactactttttttcgtttcttccgtcagtaaaacctttaaatgtttgtgctttttcctttagaaataaaaatttaaatgtgagcaatattggtcaagtgtgtgtaaatgtataaccactttgcgtacagtaacatggagataggagcatgtgggtcataacagcgtgatcgtgcgtgttgtgttgtttcctcactcgcctgctccttatcatgtgtaaccatccgcctcaatcaatgctaacttgttaattatttgattcctttaactgctgcctacttttttatcgtctaatattcctttcttttcacaaaaactagttgtagactaacttcagtttttgtaaatagttgttttacaatgcctgaagcatgtaaacttaattgttctagtaaactactagtgatcgttgcataatcataattcacaatccaaataaaagtgtcattagtgtatatgtaaacaataaaaaaatgatggtttggatatacttttgtaaatatatttcatgtttatttagaaaaaaataacatgtaaactaaaattccaaaaacaatttaataatttccgcctaacgtagacatgtatatagtgaaattatgaagagatacggcaatgagcgacaataattgagagcaaaaagatgggtttcgtggtgagagatattatgaaaagtgggacccaacgctttacataagatccgacaagatgtcggagttgtgtttcagtgtgatctggctgtcccacgtgttcactctgacttgtgccacacgcactgaccaagtgcgttatatccacgcgcgcatgtttatttgtaatcatttacccctcaacgaaaaagagagtccgcaaagcatgatgattgatgatcaatcatttattagtgatcctccaatagcttttatgtaagtattggcaaaaacatcgagtgttcttggtgttgaggttcgagcatgtctaagtttgagttcggcaccaaggtaatatatatatcggattcaaatttggtctactagtctaacttttagcacttaattgagcatgaccgcggatcttgcactagggtgaaacaattcttaacgagaacatattcaagtagcatagcttaaatgagaatttcatgttctatccgtaatggtgaatggcttaaatttctgcatttagcccctactagcactttggtatcgttaatttgtagatatagcaaattgagatatggcgtccaaacagcaacttgttatttcacattattccgattttttcagtagagcctcgtctatttggaggtagtgcagaagggtatgagcattctcttacagtcttaccttagtttctcaatttacatgataagtgaaatattgaattgaatacaccatttcgattacttagtttccttcggaaataaaatatatatatattatttgaaataaaagctgcaggcctacatcacagatccaaatccaaagttgagtaccacaacacaaaacaaaatcataggcaacggaatattttaaaagtatgtgttgtaatcattttatatgtttggcaattgcgtaggactaataatcatggttttagttgcttaatcatatgtttcatgcatgtgtatattagctttgaatgttctttacagcattttggctgtagaacgaggtcatcattggggatattttatactctctgttttttccttaacctaactaaccaattattctctaaacaaatagtacattagattttgtctaattgtcctctcacatgtactgagatctgttaactggaatatttgattattttttagatttaggaaaaatcaatcaacatgcataattatgatcatcacacaaagcagcttattcttattctagagaagctcggaatttgaggtttgcatcacatgattgttggactcttatagtattttaaaaataaacactaagctttaattattaacgaaaatgcgtatgtgacagttttgattattttttgacgttaaaattgaggcttgttattactaatggtaataatatgatcgatcattgagattcccatgccaaaaataaagatagggattataatttcttcaatgattttgtttaaagtcataatttcttcaatgattataaggataaaaaatgaaaatcatattggagaatcttgagagagagcttcgaaagttgggtggtgcgtaaaatcttatgggctacccatgtggaattgacgtggcgcacatattcttatgcgacccaaaaccacccactccagcgaagcacacgtgtgtgtagtgacacccgcacgtgcattccccacttacatatagatttccagtcaacggtcaaacatccgtctcttatttttctactcacaagaataaacgaaatgtttgtttaatgaacgtgtactaattagattattttcatataatcttgaaaatgatgatccagaagaaaactattaaccttgaaaatgcaaagtatcaccaagaagaaaaatcagattatgctcttctcggcttataaatctataatgatgcaaagttgtgaataacttaaacattgttgttttgtgaccgttcactcttaaattcaaaccacaatctcttcactcttgtgttatattacatcgaccaaaagtccaaaattgtcaaatcttgtcgtcgtatcaacaatgttccactgtcttatcaaactatacatgtcacattatgatttcacaattagcagttagattagttagttttgtaaaaaaggaaaaatcaagccagagcggtctgggaaagaagatagtttctcttgtacacaaggatagcctttttcattgtctcactataaacatacaagggagagaattagggcatcgaaagctttcattataacacaagcaatatccttctaaacccaccagggctttttctccatcaagtccttggagaaaacataacggaattttgaactgtatggcaaccattcgacgacctgcgatgctttcttgttgtttggtttgccttgtacgcatttttgtattgattctccaagcttttcgtctgcgttatctattaaccatctcatcaggtcatcaaagctcagagaagcttcctttgtaaacctctctataatcttaggtaataacactttcttctgcatctttacaaccacgtttgctccaagaaactctctttttgaagcatctaattcctctttaacgtttgatgcagtgtaggcttttagctgcaatcacttccatcatgtaatttcccattacaagctattcttttgctcaagtaaaccaacatattctgactgaaatgtgacaaaatttaatatatgtatgtgaataagattagtaataaaacgtcaaaagaagttaccactggatctgatagagcaccaatgcaaagagcaaaacagacaagtggctctggtttgtcaaggctaaacattgactttactttatcttcagctggtttcttcctcaaggcggtggaaataatggtctcaagccactgcaacataggattctttcaatgattcttctttctgtttgaaaaaggataaggagtaaagactcttacacgtccattccgtggagtctggaagcagaagatagagtattcaatggtgtttgcattgatgatgtgcccaccgatattatacgcagactgcactagacattagacaatgaaacccattagtctctgctcaaatatgaatctgttctcatgtcaagcattgagatcaaagtagaataccttgtgaaacaaagctaaccttctgagggaatgagcaggtacaccatatgctaagtatgccttgagaagatatatagaagattatcctcatagaagcatgaattagcagatgtaaagggattttgtatcagatcaatatattcttacatgcatgaggagagcattgtatatgttgatccaaaaggctaactttgcattgccttccatttgatttatagtaactctctctagttgttcaacaaggagcctgcaagttaaaatcatgagttcttgtgatggaactaaattcagatgttgttttcaaaaactgctattgttggactaacctatagttgttgatagcatacgttacttgagaaaatcttttcttgtctgatgagatccaagatacttccaccatggatctgcaggaccaagctctgtcttcattcataatgttcttggggatgatcacattgctagtagatgatcttgataggattctcttttcaggatctgctgacatggcactgcagcagagccagaagtacactgaagacatacacttgaccatatcttcagacaacttgtttgggcattggtacaaatgatccttaagagttctctgagatggagacttcactgttactgaatcctttaagaagtgggactgacagaaaaatcaacagaatatataaaagttagaagaagtatcaacaatgactaaattagggggaagttagtctttattcatttacttttgcttgacttgagcaacttgttgttgaaggaatacagtttctgaactggaactgagaagattggtcctttttggaagtttttctactcgaatctttaagagtaaccatagcatgccacggctttagagggaaattattggaggaacaaaatgcatttgaaataacatttgggtcttgttttcttggtggctgctttatatgatgagctggagaagaaatgcttgagctttgttcggaaggtgctctgcttactgtctgttcaaatatacttcgatatagagaaagcacatgatgctcgcgattcgtgacctctgcttcaagcaactcaatctccgtgataagttcatttgcctgaatcatccaaattcacatgtaaaatctaaagtctcacaatttctatttactcttaagtaaaatgcagaaatactgaagtgttttacctgaccagcaaaatgtctgtgccctggagacaaactgctcgaagcacggcccattgctctctctaacaccattctcatagatttctcctgttgaagacgaaggtgaagctgctcaacctgtgtagccaagtcacaaagatcattcagatgagatcaattcactttttggacatgataatgcatgttaaagacgaggagatacgaaacatgacgcgcttacatcgcgttccaaggatgctctgtcgttagaagacacattgtttttagttaacatctgacaattatgcagtggttttggtctcttgtttgctgttgtttgaacagaggatgcctatggaccagaaaaatacaaatcaacctcaaaagaaaaaaacaatcatatgaaatacagctttaaagtgtcttacttgcattctagtgaagttgtttgcagattgtgaagctccattaccagaagtgtgaagatcccgctctgacgacgcactgggaagatcataaacaagaattcgttctagcctctaggaagaaacattctaaacagaaaaagctctaaaacagacttctttgcataacagtctctatctacgtcgttttcatcatagagacgtttaagcaaacattggtgtgcaagaaacatcgagagataatctcaaaaacccattaatggatttaagataaagattcaatattagtgaaaagattgagcttaaactattgaagcgagagtaccttttagagcggccatgtttatgagaatccaggcaatgccaagaatctccgtttcttctctgcttgttaccgtctttattcaaatcaaaaccacccatatatctcagccaaaaccttaaactcagatgatgaaagtaatcaaagtctccaaaagaatctcagtaaaagaagaaattgataaaggagtgaattcaaatgcagcaaaggagaagaaagaatgaagaagtaaatgcagagacgaaaactgaaactgtagcttagcccataagaaaggggaccaggttagtagtatcagagtgcctgccaaaattcaattacatttcactttatggttgttgtattgcatttaattcgattttttttttgtctcattttaaattcatagttccatttccctccttttttcgagaaatacaacacttctaggttaggaaaattcgcataaatagttatactcttaattttctctggtcaaataatattaagaacacgctacagtaggacagtgcagtagttaatgttgtcatgtcggtccgagtacattgagaatttaatgttccgatataaatttccttgttttttcccaattttgaaaagtccgttaaattttcatatttattcaacgagacactgtactttcagtttccaccgaaaaataattcattactcatcatttattcaatgttcgataatttcttggaagcagacagcatttgggcctcgagatttaaattggcccaaggtccacgtttacttgggtcaatcacagtcaaaacgttttcccggggtttctctcaatttttttgtcaaagtctctcaacttttaaaaatacaaacactgggatcctccacggcatgcaaaaggatattataatgaagatgaaatcaaattggtataaaaagttggagaaaggtataaacactatgtatgtggctaaaaatagctagaaacttataatttaggtgaaagaagatttgagtaacgttgttgttgttatataataagatgaaataatgacaagaaatctgaaataatatgcgaatatgccaccgacgggagaaatacacgtggacggctgataaagctttgtgaaggaatcccacaataatataagaagatctgaccaaaggttcctttctggataagccgctctcctcgtgtccacgtggcattttcaaacgtgggacctcctaatctatatcactaaacccatccactcatattatctctctttctatcatctaaaatccaaaatgttcgtccatttttttttttctgttcataaacaaaaactgcattgccttttaatttattcttcttctaatccatacaaatgattatggaactataaatctataataataatacaattaaccacaaaataaaatatatcttagtattataagatatgacttttggagttagggggtgtctaatacaaatattatggtatttgtaatcttagcaagaaatgaaatcacaatcatgtttatctttcttaagataacatattttactcagtcatgggtctacttttattttcagtttagattattaaataaataacaatagttttgtcgccttactatatgaccaaaaattagattttctctatgtgtaggatgttggcatttgtttaccatttttcttatgataacttattaaacagatgtcatattttacttatttgtgtttataactgttaaaatctagtcaagctttctgtatggaacgcgtgaagggctattaagatattttaaaatgttgaatagtgtaattaatcttgtggctaataatattcatgccaattgttaatttctggtggagggttaacacttgtacataaatacttaatttttctttttgcagtttttgtatagatatccatccttatataaatagaaaaatataaggaaattgtaatgatttagcataagacaattggataatcacaaatgcattaaacctattaactagtctatatagaaagagttattagttacagctatactatttgtggtggcattaatatatagtaacttatttaagatatatgtcataatgttaaaaagaaatcacagagaaagctgttattttttttaatcctaaatttaaaactttggatattgagattagcctgtaatacatctttttccaaaaaatttatacaaaaatggccattaataattaatagtaatagctagttggacttcttagttcaaagtaattcaacattttttctaaaataaatcttctaataatagaacacgttggattgactaattaagtcaaatatgaaatatggaaaaggaaaaaaatccaccaacgatacaccaaataatttccgatttttatatatataaataaacatactaagagcaaaagaaaaacaaactgaaaataaaaaaaataaataaataaaaaaaaaaatccggccagataaatcgaatttatgtaataaatccgaccagataaactgatattattgtctttcttccgctcctttgtctctctatctctttctcacaattagattctgtgcttcttctgcgatcaactaagatccgatccgcgagcgtttcagacttcgatcagatccgattaagagaagcaaatcgggtcgggtatgactcgtcgatgttctcactgcaatcacaatggccacaactctcggacttgtcccaatcgcggcgtgaagctctttggtgttcggctcaccgaaggttcgatccggaaaagtgcaagtatgggtaatcttagccattacacgggttctggatcgggtgggcatggaaccgggtccaacactccgggttctccgggtgatgtccctgaccatgtcgctggtgatggttacgcttctgaggatttcgttgctggctcttcctctagccgcgagagaaagaaaggtatcttcgtttgatttctgagattaaattttttatcaaattccaaatttttgtaattgagtttattttgcatcaaagtcgttgattgcattatgtaacaagtggtgatctggtttatgtaacaagattttgatgtgtgtttgatattggttttgttgtaggaactccatggacagaggaagaacacaggatgttcttattaggtttacagaagctgggtaaaggtgattggagaggtatctcaagaaactatgtgaccactaggacacctacacaagttgctagccatgctcagaagtatttcatcagacaatccaatgtctctcgtcgcaaaagacgttctagtctctttgatatggttcctgatgaggtttgttccttcttcattcaaaaacaccatttttatttatattggagtggttacaaaatgtgttgagatactgatttaaaggattcagaagcttattaggtggattggtttgccttctacatttcaatatgaaaagttgaagtctgttggggttctaattgatatgcttgaggatatcattttgtagccaatcctgcttaagcattttggtcttctcatgggaatgtgatcttgaaatgtaattctctttctttattctgcttatgctgtgtgatttgtccttgtaggttggagatattcccatggatttgcaagaaccagaggaagataatattcctgtggaaactgaaatgcaaggtgctgactctattcatcagacacttgctcctagctcacttcacgcaccgtcaatcttggaaatcgaagaatgtgaatcaatggactccacaaactctaccaccggggaaccaaccgcaactgccgctgctgcttcttcttcttccagactagaagaaaccacacaactgcaatcacaactgcaaccgcagccgcaactacctggctcattccccatactatatccgacctacttttcaccatattacccgtttccattcccaatatggcctgctggttatgttcctgaaccacccaagaaagaggaaactcatgaaattctcagaccaactgctgtgcactcgaaagctcctatcaatgttgacgagcttcttggtatgtctaagctcagccttgcagagtccaacaaacatggagaatccgatcagtctctttcattgaagctaggtggcgggtcatcttcaagacaatcagcatttcacccgaatcctagctctgatagttcagacatcaaaagcgtgatacacgctttataaaagacctgaggaagtgatggtctaaaatgggatctggtttggggtttacaggttagttgttggtcacagtaacttaaataagtttttctttgttaggttgtttaacttgggtaggatgttttagttcagctttgatcattagggaaaagaaaaaagaaaaaaaaaagggagaaaaacaaattattattttttgcttacatttctttatatttgtatgcttttattttgactctaggatgcgttaattttcgtttaatctgtactaaaaattagaatttattagttttgaataaataaaatcacagtttgtttatcctctgaccaaaaactataactggattgaaaacggaaattaaaccaagacgaaccggatttaaccggactccagtgttgtaagagaaagtaaacaagttcccaagcgtttcgtaagtaaaaaaacgaatgggctaaacaattagtctaaatgggccttaaaagagtgaataacgtgtcataatcaggagcgttaaatttagggcgatgagtgtcgagagtgttcccgcgttcaccgattcactccactctttggttaaaaagtccactgtcatggaaaattaatcgcggtgatttacacagatgccacgtggcacgttcgctttctttttcttcctcgtgttgattttttttcttctcttttgtccctctttggtttttcttttccccttcacaaggcgcgatttgagtcgcctcgcatttcaaacccttcttctccggcgtaaacctttgctctatctctcgataaaaacccttgtttcgttttcaccttcgtatttagcgatgcttccacactcctacaccgtcgattcgctttcgcaatcacaagacctagcttcagctatactctcagcttccacgccgtcgagtatctccgctgcttgctcttccgtcgaatcgtttcttcagtcgcatacgcctgatcagtgtcgccatttcttctctgttacttttccgagtttaatctgtaagatcttcggtttcggcgacacgaccgcggcatctccggcacagtcttcttcgctgcgaccgaacggttggatcgatgtaatctcggcggccaacgatttggatttagcggagagagtatacaatctcttatcccctagtggaatactcatgagctcaatcttcgctgttgataaattagctcttgttaagtatgttttcccgacggaacgtttaccggagtatgctagattcatgctctccagcgagaaggatcgaattgcgttatcgaatctgtgcccctttttgaaaggtaaaattgaggaggattcagttcgtggttcattgtgtgaagttaggctaaatgtttttgagtattacatgttttggctctcttattatccagtttgtagaggaaacaatgagatttcagctgtgaatctgaatcctatccaaaagagaaacaagtttaggctagagaattggacacttatcaaaggttttccagggagtaacaagcgtgattctgatcagaaattggagtgtaatctctacataaggcttctttactcttatttgaaagcatttgttcctgttttcgacttaaacgctcaccagccttatcgtagttctcttttgcattacggaaatgggtatgatgggtcagtgatgacaagagctgagttcttggtgaatgttttcgtgcattattggcttgttgagaatgacttctcaccatttcctgttgttacggctaaatcttttggtgtggctcctcctttccgttctgctgtggaggagattccacctacttgtgggttggaagaagtagtgaagttgcttgtcaagtatctgaatttgagttgggttacaagtggtgttgggagtgaaaactacattgagtatggcgagagtccacggtggaagacaccgacttcaggatcgtcatcccatgtcgcgaatttgagcctcaggccgctcacttcctggaacacccatttacagaggccgctttatcgttatatattgaggagtttcttgttctgtcccataggaagctcaattaagaatgcatctcaggtgttctccatctgggttacgtacctggaaccatggatgatcagtttggatgatttctcagtttttgaacctgctttaagtggatctgtaaaagatatgaaaaaggaagattcttatgaatcacgcgtttgtggatacacgcctttgtggcagagctatgtgatatccaattatctctactatagttctctggtcatgcattttattggctttgcacacaagttccttcacacagatccagaaataataactcagatggctcttaaggtttgatccctggcttaagctattttctcaaattcatgagtttatctgtagaatatggattgcaagacttctgtttgaaatcttaatgtgactgaatggttctactgtgtctccctaaataggtgatgagtacgttgacatcgtcaaaagagcttttggttctgatgaagaatattgataaagcctttcactctaaacaaactggaccaggaaactcaaaagtgaacgaattgtctagattttctccatctatccgtgagcagttgaaggtatgcctatatttttcctcaacaccagttgttatctgttctccggtcatagaacgcttttccagtgattttactcttatgtatccgccatcctttgtcttcatacttatttagctttttcatcataacacccttggaagtttaacaaaagactgtaaaatcaatctttttttcacataagtcacataagtactcaaactctatactgaaaaatcatgtttaactgcttgtggaacttcaggattgggaagatgggttgtgtgagagcaacgctgatggctcatacttgcatgaaaactggaacaaagacttgaaactctttagtgatggtgaagatggcggacaacaactgcttcaggttaatgtcttccttttataacctactgtagtgataagttaggaataaaaaaatggaagataatctttgtaggatgatatcttcaaatgtacttaaaatagctctattatggaatgatctagttgacaaatatatagataaaccttcagatttacttgtttgttgtttgtagccttctatctatattaacaggagaatttgttacttgacaattagatgagtacgcagtcatcggcaatgttgtgagctattaacttgggaatttgttttttgagaaattgttcacggaaatatactttgagaactagttctcctacatttgtttttcagtaacctagttgtatcgcatgttttcttgtttccgatactctactttagtttatacgactcttgaatcctttagctcatagggggggagtggagcttaaaacctgttttactttgctgaaggcgtttgttctttgcatttgcagctattcatactgcgggcagaagccgaactgcaaactgtatccgataaaaacctcacagaggcccttaagtgtgtagattcactaaaatcagcggtttccaacttctttggcgggcatgtcgtaaaaccaatcgcttttttcctagagccggaccatcctcagaaaaaccgtgacgagctcttcaagccacgtggtgctggtaaccaaacagcaggcggtgtgaagtacaaaggggactggatgacccgtccggtgtcagaagacgaggttgcattgatggctaaactgctaatcaacatgtctatttggctcaatgaacgcctcgggctgaacaaatctgagacgagcaacgacaagaaagagaattcagagtcagtatcatatgtagatgtatcaggggaagatgtgggaaacgttgcaggacctggagatgctgcgaagatgctgttgcgagggatggtgatggtatgtggcacagtgttgcagctgatgagaagattcgggattcgagtcaatcttcgggttatggcttcaaaaaagtttctgatgcttttatttctctatgtcctgtttcttgtagtcaaaagggtagtcacaaggatgatttggtagatgggtgtccaaaatgtgttaaaagttgaagaagtaaaaggaaatagacactctaactcgcgtagagcgtttgataggaattggaaagcttatttacgaaacagggactgagttttttggtaatttacatgttcgcattacaaattgaagcgtgtctttacttgttacaaccaatgagaatggtccacgtaatcagtctccacgtgtcatctgccaataagatccacccatcagcaaaattcatcggtcgttcgtcgctgactatcacaattccgaacaccaaatttcgaatttctgccacttgctttgtgatctgatcgttcgaaattgaccggagaattcttctgtgttcttagatctgtcgcgaatttgttaaagctcctcagaaggttttggttacagatcttctctgtggtcttcaccactatggccgctccgtttttttcaactccatttcagccttatgtctaccaggtgtgcttcttctctctttgatcatttcgctttcaaaatgatgaggtcgtgttcttcttagttgcaatttgactaaatttgaggttcattgtaagtaggatttagagaaattccatctttgattagtttaacttagctgggagaacgcataatcgggccaattagggattttagatcatgacattgttctagtgttgtctaataagtggccatttgatgcagagtcaacaagatactattacaccgttccagattttgggtggtgaatcccaagttgttcaggtacatttgctttcttaatatagcgtgatcttcgtatttgtgggttatatgccatataattttaacttctctaaccattgctcgtatgttggcagataatgttaaagtcagaggagaaagtcattgctaagcctggtacttccactgaataactcgcttctctactcagttttgtataatggtttcaagtttcaactaattttgtgttatggtgatgtagcttccatgtgctacatgtctggctccatcgagatggaaaatacatacactcctgaacaagaagttggagttctgcagtggattttgggcaagagtgtaagcagtgttgttcttcggaatactgggcaaaacgacgggtttgttggtattgctgcaccttatttggctaggattctcccggttagtgattttagcttgtccatgttggcataatcatcttccatttcacccttaatgtataccgcctgattccttgttgtttttgtgatctttgttttccatgtagattgatttggcaatgtttggaggtgagatcttatgccaggtagagtcttttttcctagattttgaacacttagctatcagcttcttcttcactcagatcaagctcttacagagtcgcctgaccttttcttcactttctgtagccagatgcattcctttgttctgtccatgatgtgaaggttgtcaactccgttgaccagagagcaagaaacattgttgccgctggtgcagaggtaagaactaagaaggaaaatacgttgatttggtttctgatgcaattattattcttaacaaaattctgcaacccgttgtctggcttctactcacaaattgctgttgcagggatttctgagacaacgcctatctggacaaggtcttgctttcatcctcgcaggtggctctggtgagattttatcccaatgaaatgctgtttccgttgaggcctcatccccttcaataaaactgacatttaacatcccaaacatgttagttgtacaaaaagttctggaggtaggagaagttttctccattgacgtttcctgtattgctgctctcacaccctctatcgatgtccgaatcaaaaacaatgctccttttagacgagcactattcggggtacattttcacatatactttgtttcaatgagaagaagattcaggtttttgttttgtttctcaactgttttaatctttcaacattcaaaagggtgataacgtagtaatggcgactctaacggggcctggcattgtcttcattcaaagcttaccgtttcatcggctctcgcagcgtattgcaaggtaaagcaaccaacaatccaaatctccatttatgttgcaaatatgtttatataaagtgtgaatggtttttctgtgacaggtcggtaacgtcgccaaacatgagagagaatccaaaattgctgatacagatagctatatttgcgttcctagcatacgctgtgattttgtcatcgttgatcttaaccgaagtttgaaagcagagagatagaaagaattatccgaccaacaaactaacgttgtaattgttcaaattatctcgggtttggactttggatggatagagtgaagatgaattagacacatctcaaaccattttcttttcgtttactagtgagtttaggcacttgtgttatattgatattgctcctatatattgaaaagtgaaaacgtagataccgagttgaacaaaaattggattctttacttaaatcacacatcaatttaaattaattaatttgattttttgttttgttaaataattaatgtctaatgatattattgattaattttcatcggatggttaagaaattggattaattcaaaaaaaaaaatctggattaattcgttaccaatggatcatatagtcaagactcaagagaatgtctcaatgatatcatggactaattttcagaaaatggattatagcaggagttaatagttttccaaaaacattgaactgtcaaaaacagtaaacatgctcaagcaaaaattcacaattttgaaaacagcgaaatgtcataggtgttaacacacgaatttcaacaatatacaatactccgttttttccgtttactttttaaactattcgaattactcatggatacggatcttacgatacgatgaatacatttacgttataagaagtgactacaaccattcttaaacatgtttacgattcgcacataagatctctcaaatcagtgaagctagaccaacaagaataaatttgatatgaatcgtcgtcaaaacaaacactaaatttctcactgtaaattcgctggtctcatagattaagaataaagtagttacgaaatcgaattccactacaaaaattaaaaaagaattcgatgacaaaagaactctctctctttgttcgttacagcaaaacaagaagattctcattctctgtttttgattatacaaaaaaaaaaaaaaacatgtttgaaaatccatgtcaagctcgagatctctccccctttccacgttttgagtatcggagtttatcttcactcacatcactaaccaccaccggtggtgatcgcgcgtaccttgacggcttcctcttgaaatgcctatcttcatcactagattcataatctgctacttctatttccttccgactactgtgtcggtgaactgatgttcccacggcggctgcggcagaggcggaagcagatggatccgtaacagaagtagaagaagaggaaggcacctttcttcgtttaccagaagatgtttcttcctccggaaaacttatccgagcgaatacgctagacttaagattattctcgatctctgctttagtagcagggactggtggctccgatgaaggcggttccgatctcttgcggtggtgatgttggctgcgttcggtttcaccacggtggtggcgatgatctcggcttctgtcttcatcgcgacggtcgcgagtacggtcgtgttcacgatctacgtcttggtgacgtgacctctcacggtcgcgttgccgatctcgttcatcaggataacgctcggattttctcttggagtcgcgagacggggaaatgtttttacgcgtaggcggatgctctggggatagtctcttctccggtcgtctccggcgatcgtaatcgtggattggtggtggaggtgcttgtctctgtaaaacaattgttagcccaaattattataataaaatatgtattgaattcggcccacaaataaaaaggaaatgggctcaatagcccagttaccgtcgtcacctttcggttcctacgcctactattttgcattttaggctttttagccatctacccttctatttcttttcctttttattcacagcccttagtttctgataaaccccaattttatatttcagaaaattacgttagaaaccaatatattttcccctagttttcttcaagtttttttttttttttttttgggttttcaaaataagcaaaatgagggaatcagggaagagaatttggagccattttctgatataataataacatataaccaaaagtaaatgggagagagcgaagcacaggtgaacaaagaaaagaagaaagagagagcgagaggggaagatgagtcaaacaaaaggagacatacagatttattagggttgatggatgatgcagaggctgaagtaccgttgttcatcatcattctgctattctctccatccctaaacatcttcccactgtatatacaaccaaacaacaaccaatgtttaggttttagcatatccttgtttgaatctgtagtaaaaatagagtgagtgttttctttttacccttcaggtcgtctctcgttttcacgttttcttaacatctcagcgtttcgggcttcggcttcatctctgcccatcatagcacgttggagattcattcggtttcccatttcagctaggtccctgcgcatgcacagaaagttccatcatgagacttgttgagaaagctttattgctcttctttgatagagtgagtgttttacctatggggtggtggtatattagggaacccaaatccttgtgccatgaatggatctggatgcatcatattcatacccccaccaaatcccatgtccattgggtttaatccgtaacccataaatggaggcattgcgcctggaaacgggcctccaaatccattgaagccagggtgaaagccattgaagccaggttgaacaccgttgaagcctggttgtacgccattgaagccaggttgcatgccgttgaagtactgcggacctggtcccatttgcatcatatagtcagggcctgctagatctggcacaggattccattgcatgtctgcaataaatcacataaacaaaccatcttttagacctcccattcgattcacatagacttcgaaactgacaatgtattgccttcagcgtagcaaagaaagcttttaccattcccaggcactcttggtttctttttcttcttttttcctgtatagagacaataagtacgtattacattgatgaatgacaacaagggttcctcagtaattgaaaaaaaaaaggttcatgtgaggtccagcttgattaatctcagtagggaaatctgaactggactatcagtcaccaatcattcgcaatgtccagtgaagctaatattagtacatctttattttacctggctctccagcagcaacctgctgctgcatttcttccttgggggcttgcgtattcaactttgacactgttgcttctttcacaatcacggacccttgagtgctttcacatgcatcaactggcttttctacattcacttctgcagatgcacgaggggcacttgtgatctctgcaacttccattggcgcctttaaagttgaagcatcattattgttactaagtactggtttcttctcgcctttagatgcaacagatgtagtaggagatagagccttgggaggtggacagcgtgcagactccaaatctatattgtccatgataattcagtagtgaggactaatcaaacaaagtttaaaaacacatgaatttaaaataatgacggacctgggatatggccaacgctgcccacattctcagtgctatcgtttccagcttccaaaatacggtttatggtatccctgagggtcttgtttggtagaaggtcgtcagcaagtacatctgatcttccacaaacacacattgactttgaaataatgtgatctctgatacctgaatcagtgaaaaaggataataatgtagaactggaactgacaacggtcagaaaaggtttttgtggaacagcagaatgcattaaaagaacttacacttgtcacagaagctcttgtaacaacatttgcttgtaagcgcagcatctttcatcacttctttgcataatgggcattttagctcaggtggaagttctcctacagaacgtgttgttgatggcaatccctccatttccttctcaaaagcatccctgaatttgttgaagacacaacaaacatttaaactataatcaatatatgtgaagaagtacccaatagcaacattcccaaactaattcagtacaacttactcatttggtttcagaactgcaactgcgccacttggcaaggaataagaaccatctggggtcgccatcaacatggacttggggataccagtaggtggcttaactctcttaacatcatagttagggtctccatttgtggggcaatgctgaataaaatgtcctgagacagcaaagaaaatgctctcaacacttcttatctattatatatccatctacaaaagtgagagaaaaataaagattttcagagctgacataccagggatattgcaacgatggcacacataacctggaggtggcgttttcctttccattcctatccagccagcaaaaccaaactaagtatcttacaacttgagcaaatagaacaaaaatataaaatattttgacagaagtaaatgttttgtatactgtattttgacattccagaattcaaccaaaatcaaagaataaaagtaagtataagttaccaaaaccacgtccattcatccttccaggcatacccctcccataacctctaccagctccaaaagtatcttgaccttgtctgttacattgaataaatataagaggtctgttaaaccttctcacaaaatccaacagtttcacctgcaccatttctggaagattgcttaccgttgttgccagtcaagtgctggagtgtcaatcagcgcctgaattttgctttcttcatctactttgtcgtctgcggttgcaagatgaggacgtggaataatatgctgggcatcttgggtatcaggaatggaataaagatcagtcccaaactcgtcatactcatcttcaggctaagaggtgaatacggatgacattagtacttttgtagtagaagaaaattaggtgcagtcaatgccaacagaagccgagaaaagttcactataatcaacttacaaattcagcagcagatggatcagcaacaggaaaattggtggtttcagcctgaacgtcttccactttattctggattctaggcctgcaaagttaagatatttgcatcattgaggatcccgaagtttcttaaatccgatagtcagacaattaacttatgtttagctaaaacgatgcaccagtaaaatgcaatgcttttaatatcatgtctatttaagtttaatagctaaataagtagacaaagaatatagaaactaaagatc

SEQ ID NO: 850 - DNA, 80117 bp, Arabidopsis thaliana
tgagaaagtactcttgtgtggtaataactgtgatgcgaggacgtccaggaacccgacgaataaggacagatgtattctttgggattaacattgcttcatccagatactctgaaaattcaaaacagagaacatataaaggccacagattgcaatcatattggcacgagacacagtacactaaagcttcctgagaaattcaagaatcatattccaacaaaccatttcctaatagttcacaaaagtaaaaaaaaaataagacaaagctcagctagtaaacaatcataacataaaataaagttcattgtatcacagctgcaagcaaacagtctaataatacgaaaagcgcagcacaacatttgacatagaagacaaaccttcgttagtttgggcattggagacgacaatatcaaggtctttaccagtgcccaaatgcttagtttcgaaaattttgtctttgagaataccgacggatataaaaggaccatccatggcaatggtatcataatcccttgcactcttaaacttgtaataaattgccattgaaaatttgtatctgatataaaaagcaaaaaaatacatatatctattacttatcttataaagatcatgacacaaagctactagattttgaaaaccctaatcaaggcctccggattattaaaaaaaaaaaacgaggccagagatttgatttccaaaacaaaaaggtaaatacaaactaagaaaaccctaaagattcaatttttacttcgctgattcgacttcacagaaggaaactccacgcgtgtagcaaaatcaatccaaatcaacgaatcctggaaaagttcctgcagattcaaggaacgagaacgtccgtgtgatcgccgagctgagaatggcgccggtgatgtctccaaatctccttctccgaggaatcttcgcagctacaaaacgacaacttgtaacaaagaaacggatgatcgggcttcactccataagatccggtagctccaagctccgatttgggggatcaaaatcgagaaacctttcggggggaaattgaaaaggatctagagagtaatcataggaatcgagtagagagcggtgtcttcacgagaaagaagatagatcgatcttgaaatctagggtttggacacaagagctctctttctctcgtatccgtgtttatgtaaatcccgtaagagaattttcctttaaataatgaattaaaatcttatcttatgggcccacttataaagtaagaatatggacagaaccacggttttgtttttatttattttccttcttaaaagttaaaacacattaaattacctaacttttgttaatttgaaaacgtaaaaagttgattttagtatattaataatattttatttgtgtaataaatagttttgacttttaataagctaaaatcatacagtaaaatcaatttttgtgaaaatatgtaaatttggtggtactttatgctatcaattttaacaaaacccatttcttattgggcccattttgattttgatttgtttattaaatgcccattttgatattttcacccgagtgaaaaatccagattttttattgctcaatatttacgggacgacaaaaaaaaaaagattaaaaaaatggaagagtggagcgcgatcctttggggaatcgggacggaccgtgattggtcggtctctctcgttacggtgaggctgaggctgaggcggagattgagagagaccaaccatgatacgacgaatcaccgagagagcttctggtttcgctaagaatattccgattctcaaatcgtctcgatttcacggcgagtccctcgattcctccgtctcccctgttctcattcccggcgtccatgtcttccattgtcaggatgctgttgggattgtagctaaactatcagattgcatagcagcaaaaggtggcaacattcttggctacgatgtttttgttcctgaaaacaacaacgtcttctactctcgcaggtctccatttttactccaaaatcttcccttttttagtaactttctcgttcaatagactttaagaagtgtacgaagctttgataatgaatcgagtgaaatattatgtattggttttatttctgatgtttccttttgacagcgagtttatctttgatccggttaaatggccgagaagccaagtggatgaagattttcaaactattgcacaaagatacggtgccttgaattcagttgtgcgtgtgccttctattgatcctaagtataagatagctcttcttctttcaaaacaggtattcacaatacctttttggattttcgatactctttgtatttcctgctcaaaagtatgtgcttctattatatacaggatcattgtcttgtcgaaatgttgcataaatggcaggacgggaaactccctgtggatattacctgtgtgataaggtgagctaatagttctttggatctgtatattatgtaagcatttatatgtctagtgactcggatgctgaaatgtttttttttggttaatagcaatcatgaaagagcttcaaacactcacgttatgcggtttcttgagaggcatggcatcccttatcattatgtatctacaactaaagagaataaaagagaagatgatattttggaattggttaaggacactgatttcctagttcttgctagatatatgcaggtagatgaaatcacatttttagtctttgcatgagctcttttttctttctttggtcaaattctgacttacatgttcagatgaatattattgcgtactatttaagcttcttcttctatttccaactaagaatagcaaaatttaattcatagcattttccctttggcagattttatcgggtaactttttgaaaggttatggaaaggatgtaatcaacatccaccatggtctcttaccatcatttaagggtggatatcccgcaaaacaggtcactgagttttgtcatggctctaccttctcttagttggttatattgttgtctgtttttttcttgcctcttaatgttctagattctgtttacaggcattcgacgctggtgtgaaactaattggagccactagtcactttgttaccgaggaacttgattcagggccaattattgaacaaatggtgattcatcttccaagtagttgatatgtaatgtagtaccttctggggattgtcaattttcttctgcagctttctcaatttatctgtttgaatggaacttttcacaggttgagagtgtttcccaccgagacaacttaaggagctttgtccagaaatccgaggacctagagaaaaaatgcctcacgagagctataaaatcttactgcgaactaagggtattaccttatggtacaaacaagactgttgtattctagttaagaaagcaataactacgattctcatctgattctttgtttgaacatctcaagaaaaggtgatacgaatttctataagattgttgattcatttgcagtatttacagcagaaaaaactgtgaatagtaaatatttacaggattctctatcgcatgcgattgctgagactcagagattccagagagcatttggcagcctcgaggcaacttactaagcggagattagactgaatcccagcaacccatctctgcttctgaatcttgctcttgcacttgaactctaaaagaccctgtcctgttttcagaccaaaatagacttcttcggaattttccctctctttcctgcaaggccatgcagatatctcgtcgcagactccataaacaacacctttgaaagcaacaacaagcttcagacttccgtgtttcaagtaatttccctaactcttgaaagaataaaaaaatgcttacatttgatcttcttggagaatgcccctccaacatgtttgcttttgagtttgatcatgacctgagaaattcatagaggttaagtaactaagtatagagaagcaaatagatatgtgtctcttacagattaaatccagtctactcaagtacctgagacttcttgttgatatagacacaaactcgcttatttcgctgcaatcctgctaataaattagaattataagcatcttaattagtggaaccagtcttgaatagagtttgagaagaataggattaccatttcgtgcacattgcaccagttcgccctctaaaggaaggtttggttcctccaatctaaactgacaattttcgccgggccagtgagagtctgagaagctcctttcacaaggtgtgatagttgcattcttccttgattccttcggctgcctcacctttaaagctgcttcccctctcaatgctggttcattttttccacagactcagatcaaataccatcttactaacccaaccaaagcctcaaacaccaacttttaaacaatagccttaccagttgcagccgcagctgtgagagtcatgagatcgccagggctgtggatatcaacggaagacctgaccgtggaagcaacacaggtgtgatcagcgcctgcttgctcagccatgtcaatgcagtgtgaagccagtagctctgttgctgaggctagagccagtgccatcatggagcatgactctttgctgcagctttcctcagaagtcacagatgctaacccagctgccagagctgcaatggacacagctgagtgaacatgggctttctgtacacgcgctttatctttcttcctcggaatcctcatggtgcttgggttggtgtgttgtttgtggtgaaaccactttgataatctccctgatctacgggttccagctgagttcatgatattctctgcctgcaaataccaaggaatcatcaaaatcagaattcaaaaactggtgaatatgtccacacaagtggaaggtaatcataccatgagtggatctgcagcaacatcttggaagaagcctctaggactgttctgggaaacagaaaacagatctcgctgttgtctctgtttctgcgccaaagctttggagatttcagaagcagatagactccatgatctggatagaaacttcattggctcccttggtgtctgaggctgaggtatctgagagacaatctcttcacttcttacatttccttcctccaactcgtgctccggattctctgatccgaataacgacgaggaactatcattccaatcggaataaaacccaccttccatttccttcttagtttacagaaaacccaagatgacgaaagaactttttgagatgaaagaggttaataatgttgttgactcaagattgtgaaagagaagaagacgaggacaacaaagcagatcaccaataagcaaacactacctctttctttaatactagcttggaattgttcaaatatcaaatcagaaaatgatgctaagtaaataaacgaagtttccatgttctgatattagtaaagagaaagaaaggaagagacagagagaacacaaatcgatgtaattgtgctttgagcagactcaatagattcaggaaatgtctcatcaaatgggtacaaatgtagattagagaaatcatggaagtctcgtaatatgaataattaagataagatggtaggatactgtggggacatatgcattggtttgagagccataagctgctcttttgtcttgtctttttttgagttcgagaagatttgacctgacaactttaacggagttcgtgactctaccgaccagtttctgttataattgtagtcacacgtaacaacaacgcttttggtttctctataaagatactcccacgagttcaaaagtgttaaagacaattcgaataactctcggctattggtttgtttttctttgtatattaccattattattccttccatatctatggataattacgtaatcaatactccatatttggttccacaaaagcaatacaaaacggaaatatttctacagattagtttatcgattcaatataaactaacatacgatataattttagtttccgattttgcttccgtttttgttgatgccaccgttcgggccaataggagaatgatcccctttcgccgtaacggccatcaacaatgttgttgtaattgccataggtgagttttctgtaaaattgcttcgaggtgacaatggttgtcgtttggtcgccaaggcaaccgtagatagagagattgatgaacaaatgttgcaaatgaaccattattcgttgaaaatgatgatcgcatactgtggcgaagcaattcgttcaacaagaatgttttgcaaattgattatgttttggccaaattgattaataaattatagtaagtaatagaactagagagaatcaaagaatcgaacgaagaagaagaactttctgttattcatcttaagaaagtttgttacattgagactctctttatgtactagagagacccggttcataccggttcataccggtttacacttaaccgaaccatacaatttcatcaattatatagtctattatcctccctcaagatgagccgtatatggagagaagactcatcttgccaatgagagaatgccgtatagtactaaagtaagcaatcacatcctgtatctgacttttcgacatgtttcccactaattcagcaattccatcaggaccaatgccttttcccaatgtcatcttcccatcagtcaaagcaagattagcaacaaccggttttgacttctcaggtggtgtactaccttctgcttatgtttgaaaccaataggatagccatggattttgtaacaagtgtcagcagtgtgaccagtgtatccacaatgtgaacactgaacttttggttttgaatttggttgaaaagaacgagtagcattgacagcaatctgatcattcgacaaaatggagacattaaaggcagaagcattcgttggattagtaacaatgttgcgctgactgtgatcttgatccagaagattgtaaatctcagcaaggtctggtattgtctttttcatgattatctgactccgaatggttgagtaaaaatcattcaaacctgcaagaaacttaacaatcttggaatgctcatttacagaagcagtagcagaacaacatttgcagtttcgacaagtgttaacacaactagctccatccaaatcatcccaaagagtcttcaaagtagtatagtaatcagataaactcatattgccttgttgtaaactccaaatctgctgtgtcaactgataagatcttggtaagtttgtgatatgaaatcgagtatccaagtctttccaaatttccgcagcatcattgaatcgaagaatactcttgtaaatttgctttgtaacagaattcaagatccaagacttgaccatactattgcatcgtgaccaaactctaaagctcggatcaaactcaggaggtcttggtaaagttccatcaacaaaagcgatcttattcttagcatctaacgcaacaaacatcgctattttccaagaagaaaagttagatccatcaagtacctcagaaacaattgtagtacccggattatcaccattagacaatgcataaggtgaataatgagcatccgcgaaatcgaactgtggaaatggataaactgatgatctcgtagcaaaattttgttgaatcggagacgaaattggtggaaccggtggaatcggtgaagattgagtacgatctggagtcttctcagctgagatcttgcttgatttcctcgtgcgacgccgtaacttttcaacggaaaccatcgcgaaatctgagcttgatttaactgatttatgaagaaacaatcgaaaaacagaagatcgacgagctcagatgaacaagaactcgaagatgtgaagagagttaggtgttgaatcggctgagaacttcgaattccagcgctctgataccataatagaactagagagaatcaaagaatcgaacgaagaagaagaagtttctgttattcatcttaagaaagtttgttacattgagactctctttatatactagagagacccggttcataccggtttatacttaaccgaaccatacaatttcatcaattatatagtctattagtaacttctcatgaatctcaaatcaataaaatttgacttgctcatatcattcggcaaattttcacatctttgatgtaaaattggtgtggaaactggaatccatttgtatttgggatttagatatttcaatggaccattcacaatcacaaatcacaagaacaacaaaaatctaagagaagataagtagtttgaatccgatcgttaagtacgttttaattatgtcgataactttatgaaagtaaaatgccatagaatacaaaaacatatgaaagaaaccaaacatgctatacgttaaaaaaaaggagatgaagtgaaatgtatatacattttcttattaacaggacataactttttttcttttctctacatacaatcttgcaagaaagtggacaccaaacatacacacgcaaacaaaacatcaaccaaccatcaagcaatcacaaaacccagtcaattacactcggatctcacgggtttctaccgcttcataagaaccgatgaacacatcaccgtagataagtcccgcgagtgcaccacccacaagtggtcccacccaatagatccagatttgggacaagtcaccactgacaacagctggtccgaacgaccttgctggattcatggagccaccactgaatggaccagcagcgaggatgttggcaccaactatgaagccgatggcgattggagcgatggtccctagcgatcctttctttggatcagctgctgtggcgtaaacggtgtagaccaatgcaaaggtcacaacgatctccatgacgacaccttcgaccgctcctagaccggctgagaccccgtgggtcggtacgctctgcagcaaaccgggaaacaactcattagtcaattattttatacccttaaaccgtttagtttttgaaacgttataatatttttgtcatcatatatatattaatatactaacgtacctatgacggtacgaacatataaaccaaacctaacaaaagtacaaaacctatgtattttttaattttctaactaaatttactagtacgtaccttgccattagtaacaaagacgaggagaagacaagcgacgatggagccaagacactgagcaatccaatagaagaaacctgtgatgagtgttatgtttccgccgatggcaaggccaagagtcacggctgggttaaggtgaccaccagaaatgttagccgcaatggaaactccaacgaaaagagcaaacgcgtgagcaattgcaattgctacaagaccagctgggtccaaggctccatcagaggttagtttggcaaacgcaacagcagagccaacgcctgcgaatacgaagagaagagttgcgatgaactcagacaagtaagctttaagagatgatacactgaatgagtctcccacacttccaacttcgatcttcaccattttttgctttggttttgttacttctttctattttctgttatttgggctttgtatgggctctttgtatatatatagtgaagagagcaattgacaaaaggtggggttgatattacgtgggagatcattattggatgccgcccaaaccgcctcttatttgattaatggaaggttagcaatattaaagatgtgtagtgacaactatagtgggatttaataacatgtaaggataagaatcttctgttggcattttgatatcccgcatttttaaattaatgtttgtgtcacaccaataatgataatggccttattatgtttactagtctttgttattttcaatttcgtattggattagagaagtaggaaggtgctaaagtattagtggggattataagttaaatacaatttctttgtttctttttttttttcctgtgcggagttggttgattggaaatattttaaggaaagccaatttttaactagatgagattatgacttttcacaaaactaacattatatcgaatatagatttagtgtaattcaagtttttttttttttttcatttatagatctagtgtttgaatccaaatgctactccgaggtcttctactgatttgataagaaactttgtccgcctagggtcggtaacccttcactccccgcattaccattcagccagctcaaaagacatcaatcaagagaattacttacgtttagttgataatcctggaaaggtaatacgatcccaatttcttattttgttatcagctcacaccttgctaacatttacacatgatcaggtaatgcttgaattcacgtccgtttttgcaagtcataatgaccagtttgcgaattctcgctctaagtaaattgatttcgtgctcaaatgtaatattttgattttactttattcaaaaataaaataaaataatatctcggtttcaagaatatgataatgcatgcagaaagatttgaaaaaattgctttggtcatcctatagtgctcctctagcagcggctgctcctggattccctcgggaagcttcatccgtcgtgagtttcacccacggacccgtccaccctatcattcttgtccctcgtgaaggtttgtgggtgttattcttcgttatcaagcgagtttagatggcgtaactttttcgttaatgggcctaaagcccataatgatctgaaagattgctaaacccaaaaaagaagaaaaaccagatatttattttccggcttcctcatcatctttcctccgtccgttctaaaaccctataaaaactctgtggaagaagaagatcgatctcactttttccggcttcattttctagctcttacaatggcttctagattcatgagcagatcctctgtctcgtctttcaaatccgccattagatcttcatttcgaaattctcccattggcactggatcttctccggctgctgcttcatccgccggatttcgtattccgtctaaaccagctgcttctcctcttccccgattctccttctccaggtctgcttcatatgtttagtgtttaattccatgtatctgcttcactttggccatttctttgatctcattttgatgaatttgtgtgattacattataggtgtccgtcggagcttggttgtgttcagtctctgttaccgctacacagcacggtggcggctgcgcggttgacgtcatgcttaagcacaacttccagaagcagccgagctctcactcagggtactctctgctgcacctctcccgacctctaattctcttttctgctttctttcttgtgagtcgctttattttgctttccttctttgagtctttataatttgcaattctatgttgcacaagtcttttatggtttgcactcgtttttgttagttagacttagaaaactgaaccatttcccaagtgttttgcatgtgaggacactatattgatgtaaggataaattattcgattgattatatgaagtcttgaaagctctatgtttgatttgtgactttgcttcttcctgctttatgttaatttcttgcttgccgaatcaggtttaatgtttgactcataacaagtaggatgattggccctagtgaaactaatataggctgaggaattagttttcagagttgtgaaagagttttgagcttcagtgccattgtgtctgtctaattatgagtacttggttcatgcaggcacataatttcaccgttaccatgtgggatccttgcatctttatcaagtacgaaccttttatgaattctagttatccaaatgaaataatgaaaacaaatttgtaggaaaaaaccctggaagttaaaccaaatgttagccttgtcagattgtcattgtgtttcttgtttttcttcttttttctttctatgtatggcagtctagcgaatttagttcatgatccgtgtataagagtagtaacaatactgtagtaatttgtaaaagtgctctttgtcccagatggaatcgatgacacgtgagacgtatttgcagttgtatttaaaggtgggctctgtcaacaatgctttggtgataatttagagtttaggaagctattatagatgagatagcttgactagtttgctgttcatctgattcacttgacattgttcaaagattcttaccatgaagtcaatattcccaaagcatccgtctttcttcttactttgtaaagatcagttttctgtgtctgtcctaatctttatttctcttgctgtttactaatatagagatgggactttcagtcccaaggtgacaagatacattcatgaagagtattactattgagggatgcaagtttcttctctaaacttagagacaagaatttgttttttgtgttatgactccaaacttatgttctttgattcatgaagggaaaaaatgtaatactatttcttctttttacacgattcatctctcagattctagcctcatgattgatttcatgactagtttgacattgcgttaacataaccaacaactcaaaatttaatagctactacattttgttcttgaatcaatccagctagacccgacttctttcagtaccccactttctctcattatcttcctaatttgaccaacttctctccatctctcatggtaagcatagagattcgacatcactatgtataaatactcatctttatcagcatcccctaattcaatcatcttagcggcaacggttttcgcagctttcagatccttgcgagcactgcaagcaccaagtaacgccctccaagccacaccatcatacccaaaaccgaattcttgaataacctgttttgcctgccaaacctctcctctctgccccatagctctgataagagaacagcaatgctctacgcttggtttgattctatactcgttgatcatcatctcaaagtatccaagcatgacttccattggaacttcacaatgagaacacacagctaagagattcaagaacgtgaatcgatcaggtttcaggaacctttcttgtttcagttggttaaagagcttgatcgcctcgattgaatcgccattacgggcatatccagagatcatctcgttccacacaatcagattctttctaggcattgtccaaaacatcagctcagcgtgcttcaacattccgcatttggaatacatatctatcagagcactcgcgacaacaactcgagagtctaggccaagcttatgagcacaagcatggatgagactcccccatggaaccacagcgagagcagcaacggcggccagaactattgacagactgtactcatcgaatctgacacctgacgaatgcattttggtgaaaaactcagtagcttcccctgatttctcactgttgacataaccggtcaatattgtgttccatgaagatgaattaggattcggcatatccgatagaacctgaaaggcattattgaaatccccggacttgacgaaagcatcgatgagctcgttgtatgttacagtgtctggatttggcatttggtggaaaaaccaaagtcccagctcgagcttaccgttccttgagcaggaagcaacaattgcattccaagaaactgtgtccttttcttccatgtgttggaataccaaaacagcatcatccataaaaccacatttcccgtacatgtcaattagacaattacccacaacaacattgcctttctctaagcctagtttcacaagcttggagtggatgcaagctccgagaggcgagagatgcaatcgtgcacaagcagctaaagcggctgtgaaagagaattcgttagggaagacatcagatctatgaagctcaagaaacaaacaaattccttcctggaaccttcccgattgaacataaccagaaaccaatgagttccacgatatgacatctgggtcaggcatttcatcaaacactttgtgagcatcttctaatgagtcacttgtcttgtaaaacctcatcagcgaattagaaagacgcgtatttgagacaaacccatgttttgtgacgtaaccgtgaagctgtcgacacaaagaaacgtagccataattgccagagacacggagcaagtgaacaagtggagaagcatctggcttttcgccgtcattgatcaattcaacggcagcgcgtaatacgccgatggaaccgaaacgagccagagcaggaacgatggtgctccatgagttcgaagacgcagtggaaccaacatggctccttgtggtaaaagcatttgacacagttcttagcatttgataattttacccttgtaagcagattgctccataatgcatcatattatatatgattcatatatttaatcaacattccgaatatttggtaaaaaaaaatgtttgggggggggagattgcagagcagttttgatgagattgaaggttgggataaaaatggcttaaaatagaaataaaagttatttgggaagtaacaaatatagatggaacaacaatggagggtctgttttcttacagaagcaaaacctgaggaatataatgatagagtaaaggaaagagagagaaaggaagaaaatggtgattccagatatattttctggatgaaggtaaaggagagagatagagagagtaattcatttgttttattgcaatcttatcctaacgcttacaagggaattcatgccatgcaatttttttgtgtaaatttgtatcgatcggtgctcaatctccttgaggagaggatgaagacggagatgatagaagagatggtgatagtaggaggtttagtaatggttcaatttgtatacgcaggcaattctttgctcatgagttatttgatgtcactcggtcttggccctttcaccattgtcatcttttctacattcgccactttcataatcctctcccctttcgccattctcttcgaaaggtctgtctgataacattttcacatagcctagaaaaccaaacttgtctttttttcttttcacgttgtaaatgttttgttttgtttttgttgttctaaaggaagcaatggccaaatgagcttagcttgaggctgattggtaagctagttttgatctcctttgcagggtaagctatttactctctttttttgtgttaaaattagaaaacttggtttaaattttcacagctttttttggttctgtattcgaaaacaaaaacagggttactctgttccagtctctgtttctagaaggaatcaggttgacatcaccagcaatggcaacagcgatgccaaatcttgctcctggtctcatttttttcatcgcttggatcgttgggtgaatcactaaatccttgttctaactcgtaatttcacgacgtgttccaacattaagtgtggtcttattttatggataggttagagaagatgaatctgaaatgtgtgtacagcaagttgaagatcttagggacattgttgtgcgtatttggcgctttagctatgagcgtaatgcacagcacttcgatcagtcacaaagaagaagatgacactccaatattcgtctttgatcgagacaaggtcgttggatgtatctaccttcttggagccgtctttgttttatccaccaacgtcgttcttcaggtaagtaaacccggttcgtcataaccggtttggttcggtttctaaaatgtcggttattgtaggcgtcaacgttggcagagttcccggcaccgatatcgttaagtgcaataacggcattactaggagtgttgataacaacggtggtactactattacaaaaccgaaaaacaaaagtacttgccagttcattaattagtttcggtaacctcgttggttattctgtcctggtaagttcaagtagatcattcgtagatataaaacataatcaattggtttatggttggttggttataatgtatatagtttttgaaatggtcaggcaggggcagtgagtggagcatgtgttagctttaatggatgggccatgaagaaacgtggaccggttttcgtttcaatgtttagtcctttcgctaccgttatttcggttgctttcgccgttttgacattaggagagtccgttagccttggaaggtgagcattattaacacaactcttttaacaatattttaggttttcattggtaacattacacatttggtcttcaaactaagaaacccatcaaattagtaggaaaacatacaatggtaaaacttactcatacacggttatattaccggagatatgctaattgttaccggattctaatcaaaccgtcaaaactaatattcgattttccgaaggttatatttgattttgtttcttttaatgaattgattaacaaaaaattgcagtgtgggagggatggtgttgatgttcgtagggctataccttgtgttatgggctaaaggcaaagaagggttctctgaaattgagagttttgagagtgagttcgactctaagaagcctcttttgtcttgattgttttctttttgttcatcttcttcttctattaaatttatggaaaagaaaaaatggtcgaatatttagatatagagttttagtctttatttctagtcaacattttagacgaagaaaatggaaatctatatatgttccatttttatattgttttttttcgcagaacattgatagaagatctgatggatgaagttacaaatcatatcgaattacacaagttttgttccataattttaatttatttttttcatgagttagagcaattatcttataagtccaccaaagattacaagttaggttaacatataaatcatgttagaatatcaaacctataagaagttactgagcttagatttgtacaaagcattgtaaataattttaaatgtcgttaaattacttgatgacataatttgtaaaagttagctttgtgactatttttcaacatactagtgttatagataccaattagattagatatatcatcatttatggaacacaatctattattatgtctgatctatttattacagtgataatacataaattaatttgttttttttgttgttgttgtttaatcaagcatacactgtattctttatattttgttcgaaaaacgttatataaaatattgttaatctttttaggacataaaaatgcggtcaataatcgatagttattggctcataatcgtcactatgaaatatttatgaatcttatggaaacatacatataagggtaaatccggaaaaaaataataatcaaagagtctctctctctctctctcattcgatctcgacgatttcaccgactaatcggagtttggatcggagattagatccgggaaatcactgacgaatcctttctggattttggatcggtctatgcttctctactctacttgatcttgatcttctagaaatttaacttcgttttgcaattgatcgtctcgctttaagaagcttgcagatccgttgatctctttctgtgattttgcggggtttagggttagggttttaatttcgatttcggttgtcaattttgatggcttcgactgctgatttcctcctggatgatcaaacggacgaggatttcttcgacaaacttgttgatgattcctatactcctaccgcttcatcctctgccaaggagctgaaattcgatgacggtagtgattccgatgacgccaaagcttttgctaatctctccgtcgttgacgatgttttgggtgatggagatgtcgcattgaatgaagcaggtttggggaacgatgttgcaaacgagggtacaagtggttcggtgggaaaagaagagccttcttcatctattgctccggaagctgttcaatttgtcaacagtgatgcaaataggttaagggatgttgatgtggtgcgatcggaggtggatgatatggcactaactgaaacaggaaaagagagtaatatagtcgatggatctgggagtcctggggttaaggaggttgactggggctcgttttatgcagattcatctgtaaatgacggtggtgggtttggttcatactctgatttcttcactgagttggatgcaactgcaggaaatgtacagggacaggcggaggtagctgtggccactggaggaaacttagtagccaatgatacaattaacacaagtgttggtttagataattcggcaggctttgagcaacaccagggtcaagtgcaacacgattctggaagcgggcagtatgtggataacagtcaatcttgggaaaatctctatcctggatggaaatatgatgcaagtactggtcaatggtatcaagttgatggtcaggatgcaaccgttaattcacaggagagctatattaactcaacaggtaactgggaaagcgttgctgctgataactcggatgttgcttatctgaaacagagtacaacatctgcaatggctggcacagctgagagtgtgtctacatggaaccaggtttcacaagtgggcaatggatatccagaacacatggtatttgacgcccagtatcctggatggtactatgacacaattgctcaagaatggcgctctctggacagctacaaccaggcttcccaaacaactgtaactggtcaagctcatgatcagcaagttcagaacggtcatgctcgtacaactacgtatcacaataatagccagagtagtgtgtatgatgttaacaacaaaaaccagacattcaaagcgcaagactttgctattcagggccaacacggaagttgggacgaatcttactatgccaacaatcagcaggctggaaacacttggcaaccagtaaatgtaggtaaggctgagcctgcggtaacttctgattcattatcacgcttcggaggaaaccagcaagtaaataatttgtacagtacagaatctgtggctgaacagtttaagccaaatacgattggagcccagagctttatccctcagcatatgaatgtggctagtgccacacaaaatggaccattgagtttctcaaacgatttgtataatagacagcaatcggtagatcatgctcaaaagtcttttcagaacaatcagcttttctccccaagtgtgggaagatcatctgataggcgtccaccacacgcactagtcagttttggatttggtgggaagctcattgttatgaaggataataatggttctctgcagaatacatcatttgggagtcaggttagttcttaagtgtggattttcattagtttattttacaccctgggaagttagtaaaactactgtagagctatcactttttttttttttttgcttatcactgaacatttatgaaatatgttgtcaactattgtccaaatatgttagtgaaatttaattcaagattctgtctaactgctgatatttctctatttgatgcaaaggggattgggggaagctccatcactgtcttaaacttggcagaagttatttctgggagtgcctcttattccagtcccggggaagactctttgagctactttcgttgtctgcatcaacaatctcttccaggccctttggtagggggaaatgttggaagtaaagagttgcataagtggattgatgagagactcttgcattgtgaatcttccaacatggatttttcaagagggaaactcttaaagatgcttctttctttgctcagaatatcttgtcagtattatgggaaactccgatctccttttggctctgatgcatcgcaaaaggtgagcaaatcatgagatatcttgtcatttattttcttaagaaaaacattgtatatgttgcatttcctcatcttggtattcacactgcaaacaggaaacggatactccagaagcagcagttgctaaactttttgcatttgccaagaaagatggcatccaaaatggttatgctcctattagccaatgcttgcagcatttaccacctgaatcgcaaatgcaagtgagtattggacatcaaatcccatatactctttcgaggacgtttttttttcctgattaactcgtggaagaattccccaggtaactgcttcagaggttcagaatcttctggcttctggtagaaaaatggaggctctacaatgtgcgcaagaaggccatttatggggaccggcacttgtcatcgcggctcaacttggggatcaggttcctttcccttgattgctatagaactaaacgttccactgtagtgcttggttgactgacttggtgatgtcctaacttgcagttctatgtagacactgtgaaacaaatggcccttcgccagctgatacccgggtcacctttacggacattgtgcctactcgttgcgggacaaccagctgaagtgtgtcccactggaagtagtagtagcatgcttgacaattgggaagagaatttgggtataataactgctaacagaaccacagatgacgaccttgtgattattcatcttggagatagcatgtggaaagaaagaggggaggtggttctctgccttgttgtatttttttacttcatggaagattttatcatgacatttgaagtactgttatgaatcagataattgcggcgcatatttgctatttaatcgcagacaagaactttgatccatactcagaaagcgccagactctgccttgtcggagcggaccattggaaatgtcctcgaacatacgcaagtccagatgctatacaggtgaatttttatcacagtgttttagttattataatactagacgtaagattctattttgaggctttttatgaatactctccatgtttctcaaatatgttgtatagaaactctgacgaaattcatggaggacgccattttttttcttacttatttgaaattctcttgatttgtcggttgatctttgcatgggcagagaacagagttatatgaatactctaagacgctgggaaactctcagtatatcctgttaccgtttcaaccatataaaatcatatatgctcatatgctggctgaagttggtaaactttctactgcacaaaagtaagatgatttactttccttcatctgctccttggttagactctatatggcttcctgatgtcattctactgttgcttattcaggtactgtcaagcagtaataagatgcctcaagactagccgatcatctgaagtagaaatgtggaagcagtttgcttcatctcttgaagagagaatccgtagccatcaagaggtacaagttacaccacttctggttccaatagaattacatggaacagttgatttttcgtgtggggttacatctgttagctgtcttttcctttaaatggaaatgcaacagtgaaaagtatttacatctgtgagttgtactttgattaaagatgtcaaaaaagaaactcgagcgttgtggacatccataaaattgggtaccacgtaaagcttctttttacttatgatccgactaatcagacatttctatctcagggtgggaatttggccccagcaaaacttgttggaaagctgctgaactctttgtgggggatgccaccacctgcaccacattcaacaactggaaacccgcaggtaaatgagtatcaacatcaacagcaggaagcggctaagttatcatatagtcaatccgctaatacaatgtcatcattgatgccacctgcttcaattgaacccgtacatgagtggggtgggaacgggaggacaatggcagcacattctagaagtgtatcagagccagatttcagtaggacgccaatacaggtctatatcactagaaaaccatttctttttcttcttttttgttagtaacagatgcgggtaagttgctccctcatcatgctatttcccctatccagctaccccacactcagatatatcactggatcgagtagtcctaaggaggctttctaagtataccaaccaatacgcgtcagaaaaccattgcttattgcttaaatgtttgtcttttctgataggatcagactgactcctcaaaagacaaagctcctgatggggtgacacaggtgaaatcaactcggaaggtgccaagttctcggtttagccgctttggtattggcatattgaagaacactgtagggaaggtcttcccatctcgatcatctaatgaggtgcaccttactaaatcttgaggtcgtgaggagtcttgttgaacttatactaattgttttgagtcattctttgggtaaaggcaaaactgggtaatgagaatcaattctactatgacgataacctaaagagatgggtggaaagaggtgtggaacccccagctgaggaagctgcactacctcctcctccaacgtcagtcccattccgaagcaactcattgggtcatgaaaacaagtctgagataaagaacgagatgtctccatctagtgggagctggagtagtggcagcccaactccgtcagagaattctccgggaatcccaccagtctcacagggctcaaaccaattctcagctcgtggacgtatgggtgtgcgtgcaaggtaaacaaaccacttgagacacttgagaattatatataatctgtggaggctatcctggatcctaagttagaatggcaataaggaaggaatataagccaccattgatttacgggtacaaaagagcttttgatgtgagatgggaatagttctcctgatggtagtgtacggttgtgcaactgatagctataatttgtctgatcgtttattaaaaaagctactggatataatattccctcgttagtgttttactgtagataatgtgcatgcttagaactgatcattttactctttttcgggggcaggtacgttgacacctataatcaaggctcctcgagcatgtatcagtcacctcccgtgcaatcttctaaaccaccgattcctgcgaaagcaaaattctttgtcccagcagcaccggcatcgtttgcaaacgaccaggtaatggaatcggttagtgctgaaaccagacaagagaactcaggagatgaagcagtagtaggctctgcaggcgctccaggaccaagccaggcttcattccagtccccgacaccatctccaattgcaatgcagagatttccaagtgtagacaacatcagaagaagtggatcaggaacaagccttaatggtgatcttcctcagtcagtatcaagaagaacagcttcatggagcggaagcgtcaacagctcgtcgtttatgtctccaacgagtgcatcaacattcagaccaagcccactgaacagtagcagtagcagcttaggagaggagcttcaggaagttgaactgtaagttgaaaaatctgtaatatcacaaaagaaaaaaaaagttttgctcactgtcacaacaggttagatcgatcaatcaatcaaatgttaatccatgagttaccccaaaattacatgaagcactttctctgcttctgtcaatgacagggggcaaatatgtattatgccgtttgtattttttttttattttcttactaaatataaattcattaaatttctttgttaacagacttgaggaattacacaataatacacattaatatttcgttcatgagtggtaatgaaatttgttcaccatgtgttggcctctaatttctgcatccctttgattgtgtggtttcccgtattcatagtttagatggagtatgcattttggaaagaagaggatggaaccagaacataattttggttttgcctttaattatgtttagattaaaaataataataatagttattagtataatgatttacttttaataatatagcataataaattttaatttgatacacggctgaaccaaattttgaattatgcatgatttcttttggtaattcggtttggttcaattagattcgaataaatttgcatcacaattttttttataacattagtgaccgaaaatgtggctctttggaccgggaacgcggacttttaagaaaaaaccccgctggtatcggcatgtgccgattcatttgtgtttttgttttatgtgggctggccattaataataattgggccgataattcgtgttttatgattaatcgtccgatctgaagctctaattaattaattaacggatgaagaaccggtttcttaaagcatcttgaagagcgatccaatggctaccgttggattcatcagatctctgtagcttctttagaagaaacaaacagagggagtcttcttcttcctccaacgtaaaaaccagaatttcaatatcttcattccctgattatatcacatctggatcaggcatttcgtcaaacaccttgtgagcatcttttagcgagccgtttcttttgtagaatctcagcaaggaatttggaatcaaagtgtacatgtggcaaacagacctgtgtgtttatgaccgtagctggacatgaagctttcgtcacaaagaaacgtagccattgtcgccggaaacgctcttggtttgtctccttcattgagtagttacgagatatcggaaattttgtaagtttcttagacacagatctttgcatttaaaacagatcggcgccaaccatcctcgatgcgtatagaaatgtcattaagaagagataatatgaatcacattgtatgatacttttgttgagaatgacgttgaaggttgagatggaaaagcttcgaatagacgtttaagttattaggaaagtagcaaatttgggacgaatcctttctaggttttggatcggaatctatggcatcgtgctccacttgatcgctgcgttctatagagcttcttccgatcctctctcacggcgatttttgttggggattagattcgggttaatataattccgattttcatctctttttcgattgatggcttcggcttctcaattcctgctggaggatcagacggatgaggatttcttcgacaagcttgttgatgatgcttattctcccaccgaagctcaggcttcatcctctgtgacggagctgaagttcgacgatgaaagtgactccgatgatatcagagctttttcgaatctctctattggtaaagatcctttgggcggaggagatggcacactgaatgaagcaattttggggaacgatgttgcaaacgagggtgcaagcggttcggtgggggaagacgagccttcatctattgctccggaagctgttcaatttccccatagtgatgcaagggaattaagagatgatgaaatgagatcggaggtagctgatatgccactatctgaaacagcaaaagaatgcacgatagttaacgagcccgggattcctggggttaaggagctagattggggttcatttgatgcggatttatctgtaaatgacggtcgtgggtttggttcatactctgatttcttcactgagctggatgcaactgcaggaaatttacagggaaaggcggatgtagctgtggccactggaggaaacttagtagccaatgatacaaataacacaagtgttgggtttgagcaacaccagggtcaattgcaccacgattctgcaagcgggcagtacgtggataacagtcaatcttgggaaaatctctatcctggatggaaatatgatgcaagtactggtcagtggtttcaagttgatggtcatgatgcaagcatgaattcacaggagagctatgaaaactcaactagtaactgggaaaacgttgctgcgaacaactcggatgttgcttatcagagacagagtacagcatctgcagtggctggcacagttgagaatgtttctacttggaaccaggtttcacaagtgagcaatgggtatccagaacacatggtctttgactcccagtatccgggatggtactatgacacaattgctcaagaatggcgctctcttgacagctacaaccaggcttttcaaacaactggtcaagctaatgatcagcaagttcagaatggcaattcttttacagctgtggaccatagtagagagagtaacgtacatgatgtttacgataaaaatcagatactcagaacacaaaaatttgatatccagagccaacatggaagttgggatcaatcgtactatgacaaaaatcagcaggctacaaacatgtggcaaccagaaaatgcaggtgcggctgaggcggctgtgactcctgcctcattatcaaactccggaggaaaccagcaagtaaataatttgtacagtacaggacctgtggctgaacagtttaagccatatgagagtggcgttcagagcttcattcctcagcatatgaatgtggctaatgtcacgcagaatggacccatgagtttctcgaacggtttttatagtagacaggaatctgtagatgatgctccacagtcatttcagagcagtcagcttttctccccaagtgcaggaagatcatctgatgggcgtccaccacatgcacttgtcaattttggatttggcggaaagctcattcttatgaaggacgatagtggttctctccagaattcatcatttggaagtcaggtaatgaagtggtattttttatattatgcttactcgcttatttttcttatattatgcttatcggagaacttgtatgaaagatattctccaattagaactttaagtgaatcatgaaaatcttttcactgctaacctttttctatccgactcagaagggaactgggggaagctccatctctgtcttaaacttggcagaagttatttctgggagtgcctcttattcaagtctcggagaaaactctttgagttacttcagttgtctggatcaacaatctcttccaggacccttggttggaggaaatgttggaagtaaagacttacataagtggcttgatgagagaattttgaattgtgaatcttcctacatggacttttcaagagggaaacttttaaagatgcttctttctttgctcagaatatcttgtcagtattatgggaaactccgttctccttttggttccgatgcattgcaaaaggtgagcaatccatgagatgtcttatcacttctgttttgtaagaaacattgatatgtattacaattttctcattcttgaatatacactgcaaacaggaaacggactctgctgaagcagcagtcgctaagctttttgcaattgccaaggaagatggcgtacaaaatggttatgctcctattagccaatgcttacagcatttaccaccggaatcacaaatgcaagtgagtattagacatcatatctggtatttatctttcaaggagaatgtttctaaaattaacatggttttgcttattaactcatttggaagaattgtccaggtaactgcttcagaggtgcagaatcttctggcttctggcaggaagatggaggctctccaatgtgcacaagaaggtcatttatggggaccagcgcttgttatcgcagcacaacttgggcaacaggtttgtttctcttgattgctatagaactaaacattgcactgtagtgcttggttgactgacttggtcgatgtcttaattgatgcagttctatgttgacactgtgaaacaaatggcccttcgccagctggtacccgggtcacctttacgaacactgtgcctgctggttgcagggcaaccagctgaagtgttctccactggaagtacaagcgatatctcttttcctggttccgtaaatttacctccacagcaacctcaggtaatgcataaaccatctattgcgtctcagtaagacaattttagaaacgtgttgacaaaagatgtagaataagaaaactctacatagtattaaatactaaataggtaaactcttttgttccttcgaagagtccgattcaaacatactgcaagacaaaaaatattttatctaccatagggaactagatcactccatttcaaagggcatattttcttatgcagctctgtcatgggagcttgttaataatgtcttaatgtttccctgaattgcagtttggatgtagtagcatgcttgacagttgggaagagaatttgggtataattactgcgaacagaaccacagatgatgagcttgtgattactcatcttggagattgcatgtggaaagaaaggggcgaggtggttctctcccttgttgtgttgttttactttatgaaactttatcatgacatttgaactattgttatgaatcagattattgcggcccatatttgctatttaattgcggataagaactttgatacatactcagatactgccagactgtgccttgttggagcggatcactggaaatatcctcgaacatatgcaagtccagaggctatacaggtgattttttttttatcattctggtttttggttatcatcatactagccgggcgattctgttttgagcatatcatagataccctccatgttcctcaaatacgtattgcatagatactccaacgaaattcttggataacaccattcttttagttaatcgtctgattattttttgacttgtcgattgatctttgcatggacagagaacagagttatatgaatactctaagacgctgggaaactctcagtataccctgttaacgtttcaaccatataaagtcatgtatgcccatatgctggctgaagttggtaaactttcgactgcacaaaagtaagatgattcactttccttcatctactcctttgttagactgtataatggcttcctgatgtcgtttgtgctatggctgattcaggtactgtcaagcagtattaaaatgcctcaagacaggccgatcaccagaagtggaaatgtggaaacagtttgtttcatctcttgaagagagaatccgtatccaccaacaggtacaacttctggttccaatccgtatctaccaatagatttttccatttggtttacatctgttagatgtctattccttcaaatggaaatgtaaaataagatttacatctgtgagttttccttcccattaatttaaagtgtgaagaaaaaaagtgggaataatctaaagcttgttcttttctctaatgatgcaacttaaccatttcagggcgggtatacagcgaatttacacccagaaaaacttgttggagtactgctaaacttttttggtagtaagacacatcgtcctgttgggggcatgccaccacctgcaccacattcaaccaaaggaaacctacagggaaatgagtatcaacatcaacagcaggaagctactaagttagcatatagtcaatcggttaatacaatgtcatcattgatgccacctgcttcagtggaacccacacatgagtcgggtgggagtgggaggagaatggcagtacatactagaagtgtatcagagccagatttcggtaggacgccgatacaggtctataccagaaaaccataatcaccgctaagaatatttgaaaatggaatttataaaaggtttccctttttttaggaaatggctgactcctcgaaagaaaaggcagttgatggggtgacaaagttgaaatcatctgggtcagtggcaggttcgcggtttagtcgctttggttttggcatttttaaggacactgtaggaagggtcttagctcggtcatccaaagaggtacactgctaaatgctttggtcgtgatgatatctcttgaacttattctaattttttcggttcatgctttgggtcaaggcaaaattgggcgcagaaaatcagttctactatgacgacaaactaaagagatgggtggaaagaggtgtggaacccccagctgaggaagctgcactgcctcctcctccaacaataggcgcattccaaaacaactcattgggttatgaaaacaaatctgatatgattccatctaatgggaactggagttctggtggcccaactccgtcagagaattcttcaggaatcccaccaatctcacacggttcgaatcaattctcagctcgtgggcgtacgggtgtgagggcaaggtaaacaaatagcttaaggcattttagaattataatctgtggagactatcctggattataaatcatgagcgcaattgtaccgtcacattagaattgcatggaggagggaatattagccacacttggtttactaccaggaaagatataaaagatgaaacattcaatatgaaataggcatgattgtagttgctgtttccagctgtgagttgtaaattttcaagtgaaaatgtttgcagtcttgttagtgttttactgaagataatttgcatgcttagagctaatcactttactctccttttgggcagatacgttgacacctataatcctccaggccgtggaaactctcataccatgattccgtcaccttccgtacaaactgcaaaaccaccaatccccgcaaaagcaaagttctttgttcccgcagcacctgcatcgttttcaaacgaccaggcaatggaaccggctgctgctgaaaccagacaggaggagatttcagcagatgaagtagtagcctcttcaggggctccaccaccaatgatgatgcagagatatccaagtatggataacatccaaagaaatggattggggataagcgtcaatggggataatcatcagcctcctacttccagaagaacagcttcatggagtggaaactttaacacctcgtttacgcctcctaccagtccatcaaccttcaaaccagtcctactcaacagtagcagcagcagcttaggagaggagcttcaggaagtggaactctaagtgaccaggaactgaaaatttcacaaagtttttggttattgttacaggtaggaaagttttcgacacagaaaccaatccatggagcttggatttacgtattcttcttgagttatagtggcaggcaacaatatataattgcagtttgtatagatgattctttacttcatttgggttttgagaatggaaccaaaagttggtcttcgagagagttgcaaaactgtacctttcgctaaatataaaataaggtcaaatctgaccaattttcatgtattgtgtttttcttattcattaattttttctatgtcaacacaacagagaagtcggaagttgcacaatgttacacacttacacatcttgtatttactctctggtaagccaatttttttcagtatgaaactagttgaattttccagccaaataaaatgttatatattcgtttttgtaagatatataaatgatataaaaagtgataagatttaagttatatctatagcaaaggttatataataatacatttgttcaattaataaataggaaaaaaagaatatagtagaaataaaaacgaatgtgtaagctcaaaacatttaactgaaatggatacagatgaagaagaagcaatactttgttgtacgatcacacaatgtataaataaattggaaaaaataaacaataaaagaaataaacgaatgataaaaatatagtaagcttttaggacttgggactgggaggaaccgaggaattaggaaaagaaaccccgccaaggtttgaagttggttaagcatctcgaggagcgatccaatgtctcccattaacgaagctcttagcgataaatggatgggccgattcatagtccaaagctctagcccaagacacgcctctcgtcgctgctgctcctggcccatagcaattgtacactccgaaaaatgccgtcctaatgattttcaacatttttgagagtcattaatttcttcggattaactaaaatcttacacatttttgtttttagtagtacgtacttgcttttgttggatttgtggtcccaatcgtcccaaccaccgtgagcgacgagagcatcaaagtaagtgtaggcgtaaacgatacgtgagtattgtcccatggcccggcccacatacaatggacccgtacctgttacccgacaacccacgaacgcgaaacccgttttctcttccgggcatgtcctaccatgcgccgctatcgacccgaatcttgacgctatcgaatgcaactcacaatccttcaccaacaagtaacacacattaacaagtttatttaacaagtcccaatacttggtctattcctcctcggatattctggttacacaaaaagtaatatattcaacttttgtttttgttactatattcataattaatgctatatagtaagtattatttaggagtccttccttactttatacatggagcggccattaccaaagataaagtcgatagagccttcaatgtaacactccttgaagtaatgacggccagcatcgtcgcataaagtgtcttgtgcaccgtaaaacccgcagccggaaaagaaagctttgtcgccggagatcctaaacgccaccgcttgccacccttgcatccccggcaatggagccggcgcagtattcttcacaatttaaaataaaataaagaaagactcgcatttttgtgaaagtttccctatatatataattgcgttagaattgaatagagtaccgtgaagctaatgtttctagcggtgaaataattagcgtagacggtgacggaagcggtttgataggtacgtaactgttgaccgttagcgccaaggtcggacgcacggtcgtgccactctatagcggtcacatccctaccagctcctttgaacgttatgtacggttttgtagctggaaccaccactttctctctggaaaatgtatttatgaaaagttaagttttaaccttaattaagtttgcatgtatgcatgaacaagacaaaaaaaaatgtaacaaataaaggagagaactaaaacaaaaaggaaaaatattcattagggaattatatatatatcaacctgtaaaatccgggagcaatcttgattgtgatgctcttgttattgttctttggtatggaatccacagcgtcttggacggagcgaaactgagcgtggccgttaagtgagacggtgatgactttgtggcctgagggaccaacccatttccggtggtgatggtgttgaatctgttgatcgtcagtggagtttgaacaagctgcaaccaacgaaaaacgaaaacataagcagtggaacgatacaaataataagagagaaacagaaaagagataattgagggaattagtaagttgcgccattggcttgtgagaaaggaaacggtcggagtaagtaaattacgatggaggatctataggttttatatatgtacttgtactaaagtggtcctttttacctttctgtctcaacggtcatattttttgtggtgaagtgaaggaaacaaagacaaagtattttttttttgttgacatcaggcaaagaattatacacaacaagatctaaatgtttttgtcttcatatgtattagcttttactgtttaaaccaaggaattgagagtccttattataattttaataaaaggtagcctgcctgcctatatcgtgttaggtcgtttattttttctatttggaattacgtgtttggctaactatttcaggttttgagtttataaaggtttgcgtttatttcagattcaaccaatgatgtaacagctttattggtaatcataaatagctgcccatgataattgttttaatataactttgataataaatatattaatagtttactgcttccatgaattgtatattggactattggagaatgcccataatcatgataagattatttgaagcatgcttaattaaccacaatgtagcatgaggaacccactctttctctcacactctctttcttagtttaatttctatttatacatatacacatgcacaccaatctattgacatttaaaagtagtttcggtgtaaaatgggaatatggacaataaaacggtcctgttgaggtgaaaaatgaatttgaaaacgatctaaagcaaaatgggatataaaagagggaaagaagaaagatgggtgagaaaataaggacgtgaaatttatgatagtgcggacacactgcttcttaagcatcacgtgaacctccttttggggtcctacttcctttgaaaagttgcactcatcatcattcatcaatccacaaacctatcaacctagctagatatattttgaacgttggagattgttccaaacctttttggttaaatccgaaggggaccatagtccatagactcctttgatatccgatcccgttcattattaccttttatttcgacggatctaaaatttatagttaaccataaagcaataaaatgctacaaccaaataattttctattcattaattagaatgaaccgaatgacattttgataaaatttacgaggatatattatgcatgtctaaatatcggtaaattacaaattaatataatatttttttttttaaacgaagatttacatgaatattaggttattatattttgtgacatatcacatatcaaaggacccagtgttgtttttacttcttctttttttttgtttatttgttaaaagctactttttacattactcctagtcctaggtctgtttttaaaatgagaaataccctagaatagcaataaaacaagtttgtggataattatagcacacattctctaaaattagcataagtaaatatacaaaataactatttttacctaattatgtaaaataaaaagttaattgcaatttgcaatcacgattacaatatgatcgcatgaaacgtcaatcaaaatcttatattagtctttttaatattaaatttgtgctattttgaaaatttggagattgtgtgctaaatttggttacaaagtttatttttgtgatatttgtgaaagttggccttttaaaaatgtctttttgaaaattgtatatcattttattttaaatcttatttgatgtatataattctattttaaaatcttatttgatgtatataattaagatatgtaaatgaatactttttcttggtttgaaattttatattttctcgtttattcaagagcagttgacaaaaaagaaagaaaaaaaaaactaattttggagaaatgtataaccagtgtaatacatagatcacagatggctcagctcattattaagtaataaaagtaggcccattttatctaataaaatcgtaagtgggccttccttgttttctaaacaaacaaaaacgacgccgtaaagcagaattaacaacacaaaaataccgttattctctctctttctctttctcgcctaacttttcccgcgccgagagaaatcaattattcgattctctcactgaacttttcttttcttcctcagcacttcaatgcatctatttcatcaattcttcttctttacaagttttgaattctggaaacagagtcgcataatctatcgttgcggatgatgcaagaaacagacagagatattcacatctctgatggtaccatgaacaaggaagagcagagcccaaataatgaagagatggttgaagcgtttcgtaacttgcttctcctccatggccacttacctgataagcacggggatcataatacacttcgcaggtaatcttcaaaatcatcctataaccccaaaatcaccctggttgatttttcttctcaaaatgttaggtttcttaaaatgagagattttgatctggagaaatctaaagaggcttttctcaattatatgaagtggcgagtggactataaagtggatttgatctctcaggtgagttaaaaaggcgatcactttttcttgtttatgtttcgttaactaagattattagcttactcacaaggtgttcgacgaaatgtctgacagaagtttaagtttgaggaatatggtgaagtcaagaaacattaccctcatgggtttcataaggtagacaaaactggtaggcctatttacattgagagactcgggatgactgaccttaacgcgtttctcaaagcaaccaccattgagagatatgttaactatcatatcaaagaacaagagaaaacaatgagcttgagatatccagcatgttcaattgcttcagataagcatgtttcgtcaacaacaaccatattggatgtctctggagtggtaatattttcggccttttaaactgtagatgaaattatttaacaaattgtttgttgcctcatccattgttcttgaaaagggaatgtcaaacttctcaaaacctgcgagatccctctttatggaaattcaaaagatagacagcaactactaccctgaggtaggttggatttttcggattcattaacagcttcatatcaacaaggaatggatgtaattctggttggtttggctctagactttgcatcgcctcttcgttgtcaatgccagttctggattccggatgttgtggcttgcactcaagacctttcttgatgctcggacattggccaaagttcaagtaataagcatatgccactcggtgctcgcttttcgtttagtcacagatttctttacctaaaatgatgtttgttgttgtaggtgctaggacccaattaccttggagagctacttgaagcaatagaaccaaggtctaaaacctttttctgatttgttttctctactaaattcagtgaaaagatttgtttcataaatgaggaacctcaggaatatttgtgtttgatttctgaaaacagcaacttaccaacatttcttggaggaaattgcacctgttcagatcatggaggctgtcttttcagtgatgaaggaccttggaatgatccaggcatcaaggaaaagatcgaggtttgtgccattaccatttattgaacttttatcaagctatacacagtaaaattggatattatcttcgatataggagccttccacaatcgaagatgctcattcagagactatggataaagtctcagaaaatgctccagccaatcaaaaggtacataaagatagtgtaaatgaaatcgatttattgaattcaatattgaagctgattcagatatatataaatggaatgcaggaaagtttaggcgaggtcatgattacaatggagaagtatgctgccctgaaaactgctgtcaaggattcccagaaggtgaaatctaggataatatgaaatttagtttcatgaatcttttgactgatttgtgtgtgttttggttcctgcagaggatagaaatgttggaaatatcactccatgagactaaaaaggtaaagagagacaagagaagctaaatggttacacagcatatgagttttacttgtctatgcttaagatccaatggtcttcctcctattttcaggtcttgaatggactcgcggagatcattgaggccattcaaccgaatcaacctataaccaaatgcaaaccggtttagaaagcaatatagttaagaatatgtccggtttgattatctgaagaaaagaaatgtattatgatgacgataatgatgatgatagatgatagatgatagataagtttgtggaatccgtactacggcgttaaatgcaatcatgtgtggagccaatctgtctcacatgcaattgcacgtgtgatctctgcaccacaactttcttctaattccacagctcgatttgatcctcttcccgatgacaaatgctccatagaaataacaatattcattacatattacaactattttatttacaagtaaaccattttcttgtaaaaggatctatagacttggcagtgatgtataacaggtgacactaacagaagactaatcatcatcatcattcattatcatgagttgcaaactttatagagtagtgtgagtctcataaaagcttctgcaatagaaaatttacagattgctactacacctaaacacttccacaccacaacacaagcccatctcaaatttcaacgttcatggcaacgtggacaacataaacaatcaaacagatgatcaatagtcttcctttttaagctctctacaatttcagttttctatcaagaagaacaacatccacctttcttgaactcgccctgcccgtctgatggtatcacaactttcttgccattgctcagtgaagcagggtcttgcttgtttagctcctgtgagctcatcactttcctgctcagtatgttgtatatctccttcacaaccgtctcaaatgcagctgccacgtttgatgagtccaaagccgatgtctccatgaagaaaagaccttgtgcttcagccaatgccttcccttccgctgttgacacttctctcaagtccttcagatccgacttgttgcccaccaggatcgtcacaacattcatatcagagtgtgctgcaacagttttatgaagacacccctcactttcattattcttgaatcaattagcaaatgggagattgtttagtagcagataagaaaagataagaggtttcttactgtgtagctcgttgagccatctaccaatgctgtgaaaagtctgccgtctgctgatatcgtaaaccagaagagctccaactgcacctcggtaatatgcagaagtgactgctctaaaacgttcttgacctgctgtgtcccatatctgtgctttgatctccttcccgtttatatccatcttctgtgtctgaaactccactccaatcgtcgactttgaattgggatagaactcatccctcgcaaatctggcaagtaaatttgatttcccgacagcagaatcaccgattagaacaatcttaaagaggtagtcttcgctcttgtcgtcttcagagtagaaagccatgtcctttaatgctcaagattaacccttctacagaagcatatctttaccactggcttgaagcccgtcaacaaagctaaggacaaaacaaagagccaaagtgaggaagagggaagacaagaataagtagagttggcataggaaacttgagaaacagtaaagattgagatctaagagaaacaagagaatctttaagatcacctgtctacttgaggtagcttcctagaaggttcagtggaacaaagttgactaaatatcaaaactttcagctctcaaccaccctaagaaaatctatcacaagcaaagtattcagcacataaacgcattctggatccaaagtaagacagcaatacaagttacctcttctgaaagcttgatctggctctttaacacctcctagagaaacttgttatacaagctcatgaagcctatatacaacaagtaaagctaactttagttataatctcaccctaagaatctaagttaaagtcggtagatactgactattcacaaatcatgaaagccaccaataggaaagcagagaaatattctctctatcataaggagaaacagaattgagacagaaaagacaagcgcgggcccaattcaaccaacaatactcattcacttgatcacacaaagtgcaatcttaaacactgatagaaaattctcagtcttgtccttagggctcacattaaagatgaatcgagttaatgattgctgcaggtttataatatctgcctgaatatgaaaatcttcatatacggcattagaaaatgaaagtaggccacacatttctttctgaaaaagatgatgagacatcaaaacttataaaacaccaattcaaaaaaataatcgaaacttcacctaagaaactaaacccaagtaagaacccattttcgcaaaagagaaggaggagatattgtaagaactctttaaagcaaaaacagagcattgtaatagaaacaatcaaaccaagtaaaaacagaattttacatgagagatcatcacattacattcccgtcagatgtaagatcacacacatacatacacacacaagacagagaaaacgttgatgatcacgaattatgaagacccattagacaaaacaggacaaaaaactcgcatttacagggataatcataaggggaaaattgagaaaaaccttctctttattctcgggaagtgcagaggaaaacaaaattaccttgtggaagcaacaccgattaaagaaattggggaacatgggaatggaatggatccaaagagaagaaaacgaaacaagagatcccaaaaatggaatcggaaaacgaaaggattcaacgccttcttctgggaaatcaaagacacgcagtaactctggcagagagagagagaaagaaagagaccggagtttttccatttcggttcggattggtaataatgggctcagcaaaaataaaacatcttgggcccttatggaccctcttaccctattttaccataggctctacttttttttaccacctttgttttagtttcacttaaaattttagttaaggaaaaaaaagttaccgattatgtacactctactgttatttattagacacaacaaaactttcaaatatgatggattttccatcctattttatttataaaagaaaatatttatatttctaacatcaacaaactctacccaaatcagattatccttctgaaactatgcaatttgtattgtttttcaggaaactagtgattttttgaataattgtaatacttttcattcatcaaaaaaacatattatatctttcctttttttccatcaaaaacatattatatctaaatatctcattttgggttgttttttgataattaacacttaagcccatataaaagagtctagttcaaactgagcccagctacaccaaagaatctagtgggggacatgtggcaggtagtaatttgagcgttgaccaagaaaggacattattatacatccacctggttagagcatgcttataggtgatattctcaaagtatcattaaaaaaattttagtattatttataatgtttgtttaatagataaatattttttttcttacttttaataaatgctaccaatcaggagatgtcacgtagatgatactgatatcaagaaaatcactggaatgatactaatcaaactcattctaattgtttggttaataaaaaaataatttttacactgatgatattctaaaaatatcactcatgtacatggtcttaaccgttgaaatgttggtcgcggcctatatatagaagaacataactctaaaaatagctaaacccaaccacttcccttggattggaatctctcataaacagtttgttggtctggtccgctccagtccatactcataaggtggtagatgtttacttagggtacatcatacatgcacaacgttagtagttgcaggcatagacgtgtttgccctttattacgcgaaaaccactactcccttcgctagtctactttcgtcaattgaaccactaaacccaatgaaacctaatattttagtgtgctcaataatttatcatcatcccaattcccaagcgtaccaagattataatctaacttaacgcgcaatgtcatgacaaaacctatatacaatgaaaaagatttttcatgacaaacaaagaaaaaataaacacgagaaatgagttctcgtaataaagttggtgtgaactggtttttgaacgtgaagatgaccccttcatatttttatttcttggtttttgcttgagagggttaaagactcttaaggaagaaatacattacacgtcaaacctttttgggaaaacaatgaacgcttcatttataatgtttctattttttactcttaggtaaaacattgcaattgatagatgaacaagaacaaaagcagaggattaaaagaaagattaaactatgaaaaaaggacacgtgtgaagagaattagagattctgtattaagacagattaactaacaaaccaaaccctacttgttccactttctattcatacttaatctcattctcctctcttccccttcatacttaaatcttatcattcatccatcttttaatcattactcgagattctgtttccatggccatatcctcaaatcttctcctttgtctctctcttttcattttcatcatcaccaaatccgccttggctcagaaatgttccaactacaaattctccaccaaccgtctctttgagtcttgcaacgacctacctgttcttgattccttcctccactacacttacgattcttcttcaggcaatctccaaatcgcgtatcgccacacaaagctcacccccgggaaatgggtggcatgggccgtgaatcccacatctactggcatggtcggagctcaagccattgtggcttatccacaatcagacggcaccgttagggcttatacgtcacccatcagtagctaccaaacgagtctcctagaagctgagctgagtttcaacgtctctcagttgtctgccacttaccaaaacaacgagatggtcatctacgcaattctgaatcttccacttgcgaatggtggaatcattaacactgtgtggcaagatgggtcactgtcagggaacaatcctctgcctcatccaacttctggcaacaatgttcgttctgtttctactcttaaccttgtctctggtgcatctggatccacctctaccggagcaggaggagcttccaagctacgcaaacgcaacgtgagtccatggttttatcaatttcttcatttcatgttttttaggaatctcacatatgaaatgagatttatcaatcccatcattgttagttggttttatgaaacttatcactcctaatcattattgcagatacatggaatattgaacggtgtgagctggggtataatgatgccaataggagcaatcattgctcgctacttgaaagtctcaaaatcagcagatcctgcttggttctaccttcatgttttctgccagtcttctgcttacatcattggtgttgccggttgggcgaccggtctcaaactgggcaacgaatcagccgggattcagtttacctttcaccgtgctgttgggatcgctctcttctgcctcgcaacaattcaggtaggttttagttaacagtacagagagtattacacttgtcatgaatatgttgcaattactaagttgcttgtttcacacgttaggtgtttgcaatgtttttgagacccaaaccagagcacaagtacagagtctactggaacatttatcaccacactgtaggctattcagtgatcattcttgcggtggtaaacgtttttaaaggactagacatcctgagccctgagaagcagtggagaaacgcttacaccgccataatcgtagtactaggtatagtcgcggttgtgctcgaagggtttacttggtatgtagtcataaagagagggaaagcagaggcatctgcgaaaacaagtcaacgagtaggcaacgatggtcggtctctatacgtgtagactctgtaaagattagagtaaaatgttctggtttatttggtcattatgggcttgtggttgttaatttttgtttgttttcgagattaagttaatacatttgatgtttaatagttgttgaagttgaaagactcttgtgctcttttacaacattcatgatgtgagcttttgacaaaccattttatttcatcgacagtgaagtagtgtacatatgaatacatatatcgaatagatatctcgtatgtgtatgtgtgtgtgtgtgtgtgtgtgtgtgtgtgtgtgtggtgagaaagtgagaggaagattggttacctaatgtaaaaaaacaacaagatgcttcaaaaatgtcttttcgagtgttttaaaagggaaggaaggatgaattgcattagttggttcaagcaagatctcgaggttcaagggctgcgatttctctcaaaacctgacttttgtctgcttcaaacctctcatcctctgtcaaccaaatgaaccaaacaatgctttaataaggttaaggagcagaaggatcggatacaagcgtttcacttaacaagattagtttcatacctttgtctggtttcaaatcagccaacaatctcagaagcttgcttctgttggccaccagaatgttgactatatccgcaggcttgttttggttcgctgcaaacagctgcacaacagtgacgataatctcagtacaatcacgttggactgacaagtgacaatcatcattatgttacatctcgttaatgtaggtaccttaaagacatggaatgcttctatttggatactcttgcttgactcctgtaattcaagcgattgagtttatttcccaaactattataatcaagaacaaaaaaacggagagtaaagcatcgtactcttagaagattcatgagaatcctcaagttatccctcgagctcacatatttcgtcatcacagctgaatttgatcgatccaataatatatcacccaacaactgtttaacatttacaccatacagtacataagattgatcagccagtaccatcatttcaatgttttagattcttgtataagttagcctaccttaatagcttgccgtctggttatataattacttgattcaagaagctttgagttgtagtctgcgaaaaactgcaaaccaaaaagtttgagattattatacgacttgaacgcaggacctgcagaggataaattacaatgttctgtcttcaagcatatatcatagtgcattgttgctacataacttacccagtcttcattcttggtgagaaactcggcaacagtagacttatgccttgtcagcagttcctgtgaaaataaatgacaggtttggagttatgattgcatgtttactagtcccagacagggaaagatccaagctaaaaatgcgagttttgttttggaaccttaaaagtagcagcagcatcggcagcaatgtcgaaatttggaagctgtatgtaatcaaagaatttcttcacatggtcagactccaaaacatatctgaatccaaagaaattaagttagtaaacacattttccgttattctctgaatccataattactccataggtcgtaaaatgaagaaaatgaaacgattggctcacttagccacaatctgatgacggatacactccctaaacatagcaccatagtgtaaagccatgtctgtgttctcgaagctgacacaaaacatggaaagctataaaaatgataaaatgtggtatctcttaatttggaaaaactaccaactaataacttcaatgatagtaacacacaagactcaccttcaatcaaaacatccatgagatcaatgttggcttctaaataatcagaagcaatcaaccgtgaattaacctgttgcctctgtagatttgcaacaacttgtgtagcatctttcctcgtctaattaaaaaaaaaggacagatttttcgcaattcaatcatccaatgtatctcaaaaatgatgtctttcctatacggagaaatgttacctccaagttaagtttagggagacaagtaatcaagagacgtagagtatcctctttaaagaattcttgagtcaactgtgcacaagcttctgccacaggctctgcttcgctgttcccgtagagaatcgacttcatgtcacggatattccggcttaattccgccatctgcaaccacataccattaattcaattggagcacaaatggcatagagagaaatgacattattgcaatgaagataccaaaaccaaacaccaagaagaattcaacaattcatggaagaatttgcacacattgaaagaatcatcttttattggagaatataaataaaaatggaaccttttcgtcgcgtttggaatctcggaggtcaggcaaagaggtagatcgatcggagaagagaaggagatcgcgggtttgtcgaacaaggtcagcaggagtgcgtggcttagacttgaaaagccctttcatcttcgcaccgccgatatcagattgatccgacggttctccgccgtagccagaagagctaaggctaccgctgaggtggtgctgcgacggaagcctcctcgccgatgcggaggaggaggcttcacgtccagcagcacctctcgttgacacgcacgaccctatccttacacctttccttcttcctcccccaaattccaaacaacgaaaagataaaaactttgtccccaaaaattgaagcttttttgtttgtgctctgaatatgggaatgggattctctctcccctatatctcctcgcctttcaccatctttctctcacttgggcctcttccatttttagcgctggaaatgtacagagaatagagagagaaagctattttctcctttcttttgtttccctcggattttaaaactaatttatattttgttttcgtgtcactttttgttatgattatattttaatatggctaaaaagcaattgttcgaggtcactcgaaaatagaatccttgggtatcgattgctaacattttttgggtaacaatgttacatgtatttataaatacaactttgccacagcgaatacaatgaaaaatgaaaagttagcatattaaaaaggtaacaatgattgctaacaattactactagttttatcgttttagtagttatcgatcacaaatatgaaaagttagcgatactaaaagctgtgatttcagcatttcttgtattgttgtttcttactaatcgtagttattttggtatcgttattgttttgtaatcggaaccgatgattacaaatgaaataggtattggtttcaacaatttagacactatgtagatgaatagagatgatgatgatggaaaatgtgaagaaggtagttggataaacaaaacaaaggtcacatgtaaatgagcaatatggatggaccaaagacaaatgacatgttcactttacaccttcactttctttctttccctcacatgttccctcttgtctcctgttttgtaattgactcatttaattgttttatttagagagtgttattacatctctcaactgtctcgtgactgacccataatttgcataccagattatccggcataattaccggatttgtcaaagaacttgttcaatcatcatttcttcagatttgcatattttgaaaactatagaaatacataaaatagacacaataattgtcttatgtttatttcaactcctttgtttttaatgtttctgcaatattaataaagagcggttacatgttaaaagcttaaaggaagcgaccattattggcaggctcgaaggaagtgagatttctgaatttcatccacggcttgtcccatacgattgccaagtagttcttgctcactccgtcgccgtcattagccgccaccttaagacggtaatttgtaccagatacgacctgagtctcgccgctaacaaccgtctcgaacttgagtcccgattcgctccgtttgttgtactcggagaccgcgaattcaccgatctctacgacttgagggtccgtaacgttgctgatgggactccaaccaccgacgcgggcagccgcagaggcgtagagagggaggaggacgacgacgagagagaggagaagaaggaagacgaccttactagtcattttgctttgtaactgttgtttcctcaaaattgattatggcattgagtttaagggcttttaaatacattaaaggtccgccacgtggcatgacgtgtggcagaattctagatttctagcagaatatttatttctaatcttaataacacatgccataatttaggcaaaaggtttaatgaacttttatgaaaaacttttttgctttgtatttcaaaatttatactaatttattggtaaataattaacactcacataattctttatatgttatggaattcagcataatatagacaaattaatgaggtttatcctctagaggttggatatcatttatgtaatttgcaatggccaacttctacctacgaaaataaatatccaaaaggattatgactacttgtagttttttacgattataagcatattattcaatagacaagtagtgtatagcaaaggacaaagaaagaacataaatgagtgtaaaggacaaaaactaattaaaaagcaagacgttataaaccatgcattgatgttttgttttctttgctttttgtgtttgtagaaaaccgaaaacagaagaagacacgctggacaatgacgtggtatggtatggccaggttggaccgcgcgctggatttgccactagttgctattgttaggaagaagaacacacaaatctgtattaaccctttttcatatacacaccaaacaaaaaaaaaaagggaccaaagttaccggtacgttggaagcacaaaagaaagcaatggtaccggaaactataatcgggcgggttacaaaaatgggccgattttgtgaattttgacctcatctaaatttcccattccattgactatatatctacatatgtattacggtagtaaacaatatagtacaataaatcaattgtgtacatggtcttgtgcttggcttgtagaactaaactcctcccattgatgcaaaaacgtaagcccctggcatcatgtaacaatatctataagaaaactaaactacaatgaatcttattatataaagaagaaggttttgagtaaattaccaagagtgggcatcaagatggagagaaagatggttccagcgatcttgagaggcaagcctgtcttgatcatgtctttgatctctatatgccctgtcgtgaacccaacgacgttagagggtgttcccgtgggaagcaagaaagcgaactgagccccaatggctcctggaaccatcaagagcaaaggatggatccccatgttctttgcgatttcgatgagtaacggaaccaacaatgtagtggttgcgttgtttgaagtgaactctgtgatggtagcagcgatgaggcaaaccgttggagcaatggcccagtaaggagccgtttcaaggaagacaagtcctttggataagacctcagctaagccactggtgcgtactccatcggctatagcgaatccagctcccaataacaagacaatgttccatggtagtttcttgcatttgttccagtccattagcttctctccttttttaatattgcttgggatgataaacaacaatgtcgccatcatcacactcacggttccatccccggctcggccggcgaagatccgaccccagccggggatatcatcagttatattccttgtcatccacaacacaaccaacccaccaaacacggctaagaccatcttctcagcgaagttcattggccctaacaaatcaagctctctcctgagatgagatttatggagataaggagagagagcttgtcctgctcctttaggacaatacataacacaaagaacacaccaaagcaccacgaatatgcacaaagccaatgggaagccaaagaagaaccattggctaaaactgatcggatcagcctcagggaagtagcttttccacattccaacaagaatcagattcactcctgttccagtgagtgtgctcatcccaccaaccgccgcagagtatatcacacctaacaccaccgccctgctaaacttccccacggccggatgcaccacttccgtcgtcgatgatgacgagggcagtctctgaagtatccccgtagcgacaggcatcatcatgactgcagctgctacgttatgcatccacatgcttacgaacgctgttgtggcgcagatgccaagcagaagtagcggcgcgtttagcggctccacgcagaacaccaacgttatcttcaagaattagattatccattaagttatggtattagcttatcataattagatacgtggtgactggtgagttttctcttaatcataggatatctctcgtacgattaattatagtttaaaaacatgataaaagtaaacaatgattatagttgtgacttgtgagctaattattggagcccgcacttgcacaaattaaatcatactcactatcattgcttttgctggagaaacatagtgtttacgtgtctctcatctttttttttgggttgtcatataaatggaattatggattggcctagggcctcatgaaatgacatctcatctatgatacaaataaaataaaataaaatgcatatgaaaaagattttgtttaaaaaattgaaataaaggactctttgtatgttaataacttaactttaaatgatcaagttatcattagactttgaacacacaaattattgaagaagaattaaaacgaaataaatgtgtgtggggaaaaaaatgtatggggaaggaaaaacatataatctggcatcaccacgtataaaacatggaccactacacattgtaatgtttaattttataagtagggattcaattgaagcaatccacctatttaacgatcatattttgtaattaattcacccgtggacccgcacacaatcggaaagaatcaaatattgaataaattatgtagaaaaaagaagaagaagaagaagaagataaagagataaaggaaagactaacgttaagggcaagccggcgatggatgttgtagtgttcgacggcgagagcaagtatgaagctgccgagtacaagggagatgacgtcatccatgtaagaatttgctacgtcatccgcagccgatataccaaagagagggaagaggaagagcggcgtcatggaggtgatcggcatcggaacggcctccgtcaaccaccacgcgaacatccacaccaaaacaccgagcatgttcctcgccgtcgtcgtttcatctcccccgagatctacgcatagacacacgacggcgcaaagaagaggaccaagagcgatgtaacagtttttgggcgtgaatattgtccgaagttgttgtcccaccgtttgtcgttcgaatggttcatcattatggacgaccggtaagagcggagatttcagatcgtcggatccggcgacggtgacatcaccaccgttcattctgtttattccgtttttaatggaaggacaaaaaatgatatagagaaatgtaagaaccaaagaagaagagaaatgagcctttttataaatttatttatttcttttattataatgtgtttgggcaaaacataaaaataaatatacgaaatgtgtttatattaaggttatttatagaataattaaagtttgtggtcatatgacgaaaatattcggtgtaagaccgtgagtgacacatgtgacatgttttagtatgtgaaggcctttttagtaaacttgtgtttttttcctgtaaaaaaaaattgtattttcaatcacaaatttttgctggttcacgcaaataaaattaacaatgtatggggtaagattgattaaagagacaaataatgtatttttttggaagccaaaatcgaattattagataatgggttaatatacgaaagaaaggtcattcttcagtgaatatgtgattgatgacttttcagtttatctaaggaaaataatcggccatgaaaatgaaaatgatggggtcttgcaaattacaagttacaagtggcgacgctgtgatggcttgtaattttgtctggactctagaatctgatgacccataaaaggacactagagattaagatgacaagtaatcataacaatctatttgctaataaattattcagtagtcatataatccaagtgctatagcctatagggaattaatcattaaaaatatgtaaacttaagagttataacttgtagataatattgatcgtagcttctccattaacatttattggtttcgttttatccacaatccataagcctgtaactttgattaatatgtcaaatggatagtagaataactaaaatttcaaagtatattcttttgctaaataagctacatattacgaaatatttagaaaaacataatcattttcgaattgatatataaatccttttttatggtttagaattaagaggatatagaaatgttgaaaaatatggaaataaatgaggacaaaagagaaagaattgaaagccaaattgatagttggcaagagtaaagagagcgagtgagacacgttattatatgcagcctttggtactcctccagagcccaacttccctggttcttaccctcccctctcttttttttttgtcctttttcctccaaatttaataataataatcatattgttgtaataatcatatagatacaaattttcttagaaatgttcaagaatcgacatgtatttggattttttaacttgtctgtcaaatctctctaagagatatagatgcacttggtctaaagaagataagcacacatacacacatgcatgtaaagatatacgtacgatgagatttgctatatccagtttgccaacaaagagaaggaagacttataagaactattccctcaaatataactggatataacataataagagagaaaaatagaggtgtggtaccaatcacaatcttgttttgaaggggtccaaaacagtcaggttgaacaagagccggtacaaatgacacataggcagatcacattgatgattttgatcatgaaactattattatttactcttatggaatatttgaaaagattgaaagaaatccttgactcatgtggctgtctttgattccatcacttggaaagtttcagtccatagattctatgatttttatttaagattctatgattatcaactatagttttaatcatctgcattgtagactatgtagtctctaaacttgccccttattgtgacaagtctacattagacgtgtatttgtacaagtcaaatccaattcatcatcccacagtcacttatcaaatttcaaattagagcttcttaaagtattcttcttagtataaaaattttagacaagtcacaccaatcttttatcatattaatttttacccgtaagaataagatctatgtttacaaatacgaatttcttactaaactacttgtcgtgatgaattttgatagagataatcatcagagaaaacaaagagaactaaataaatgcgtataagatatgaataatatacagaagaggaaagaaataccgaatacgtaatggatataaaaccaaagtttcaattccaagacggatacgaacaagttcgagtttctctcaatgtcccactcacatgccccattaggtttaatttgtctttctgtttttttcttttttctttttattgtagcctttgtttgattgaagtcgtacgaggctcaaacttggttcgacacatggcgctaactgaattgcgagacgattgttttctaaaagttacaaaacacaactcaagatttcctgaaccagaagtcttctcttatggatctctctcactggtcactgttaattacagagacaacgcatataataaaaacaaagtcttctttttattcttttgtcttcaagttctaagcaggaaacaacaaacattttaaagaacaaagcagtgaagaaaacacgcttcctgttttgatgagcagatcacttagatgggtctctatggctctcctccaagctcaactctcaggttgtcatatggatacactctcggtgtctgcaacaacacagtaagagattaacatgatatggaaaacaagttccacaatgacacaaaagcagagagatgatatgccacagaacaaattctaaagtaaaagagagcagcaattcaactcatgtataaacaagaagatatagagcaacttctcagccttggagtgctgttcaacctctataaccctaagttcttcaaaacaagacacatcataatagcctttgatacaaagtctatgattcttggccaacggacactaagagaagtaacatttggagtaaaaagaagaacagcaattcaactcatgtatagacaagaagacatagatcaacttcttagccccggtgtggtgttcaacttctataactcgaagtcctttaaagaaaactcattatagtatagcctttgtacaaagtttatgattcttggccagtcgacactaagagaaccaactcatcgattttagctgctcatgcacctcaaagagccttcatgtctttcttacacctctaagagatgccacagaacaacttctagagtaaatgaacagcaccaatgtctagacaaaaagccagagcaccttttttaggcctaagtcttttactcggaatccttcaaaacaagactcatcacagtataacctattaacctttgatacagagtttttcattcttggccagtggacactaagaaaactaaaacatagattatagctgctggtacatacacctctagcatacgcttaagcatttaccgagttcccaagaacactgtgggtgtttctttcaagtgttcctaactacaacgtacatgctcaaattaattaagacaggattatggaagcaatgcggacataagattcatctagtccagtaactttggtcagatgcaaaagcaaacagcaagaattgttcatgttcataaacagacaaaatgcagaactgaaagctaaatattgcggcaattcagcaaataaagaaaagaacattgacacattctctgttacgcgagcatattttgtagattcctatgttttctgtccacatttagttaatgagtttctgaagattccagcaaaaacctattctcagaaataagccaatgccaaacatatgtatcaaattcagagttgaacaacatacataataacagctgcatagggatgatagatcttagcataatcatgacttcgatcatcacactcaggacaacaaaatgggcttgattataatttcgaaagttgaaagctttgaacttacaaatggaaccttagaagctttgtcgttcaaaacagcgagcagaccgagaccaacaaagaaccctaatccgccactcaaccatgccaatgcttcatactgttcacattaatccaaaatcaatcagaaaagcaatctctttttacaccgagaatcaccagcaattagaaatcgtgtaaccaaacctttccgacggtatcagcaatccgatctatgcaaggctctggaaacgcagtcccgttgtcccacatcagctcgtcgtttaccgatagctgacccgcacaatttgtaaacatcagattttcagaagaatctaacaagaaatttacaacagaaatttgactcaccggcttatcggggacgatgtgtttgccgacggggagacccattccggcgcgttgacggagagaagaaccgacggatcgggcaacgacgccgtttccacccatgattcgtgacgcaacaccgctcaatcttccagccattttcgctcttttcaggtttcgatccaaaatccaatcaaattacagatagagagagaagaaagacgcagtcactgaaacgattccctgaaacgccatcgttttaaaagaggtcaatattgtaatttcgattaacgaattttaaaaccaacgaaatgagcaaacacatacacttcaagtgtgtcaaaaagcttcagattcttactatatacaaagagattcatgtggtgaatacacaaaggtacaaaaacagaaaaagctacaacctttaacatatctataaactactcaacagtgaggcgcagttcgtccgagtcgggataaactgtcttgttgttattatcacattcgcaagagttaatcttgtagaatgctctccattcgtcgatgttcttcatctgatcacatctcaatttaggtaaccttcttctctctaagatctctagaatcttctctgttcttcccagatgcagagctgctcctcttactgattcttcccttacttctacagctgacaccaaacacttgacggatatcacttgtgctacgttgcaaaagcaacctgacactatgtctgatattgtgctttccagctttctcaacagagcttcccctgttccatagtctcttgattcgtaagttagtagaattgtttgacagattcggtacatggagttggctgctagagtcttgatgggccagtgagagggcttgtgcttcatgcataccatcaggttcatctgccatgactctgagaactctttcttcgcgatttccatcagctcccgaagggtttcttctggatttctttgttgctttgatagtttccgaagatccacatcaaaccacttgtgatagagatcaacacctagccaaacgacctcagcagctttcctgaggttaactgactctcctccggtatccaggacgcattcaaacttgttgacatattccagtgcctcgttgacagcattgagtaacttcttcagggaggagggcttgatgtcgggaagtgcaacagcaatacttgtgagtgttacaagcgggagagcccaacaattgggcggttctccgtgggccagagaagccaccttgttgctgtcgaactctgcaatcccttcaaatccttttgaaatgggtgttgttgcttccaaaagctctatcagattcactggttgtttctttctgcccttctctatccaatgatctgtcgcttcccggttgctccgcaccatcacatccaccagcgggtcctctccttcaaggtgcaggacaaaactcgctaggtcctgtctcgagcttggatttgaatcggatttttctgactcactgtgtgtgatagtattactggtccttaaggcgaaatgacagcacaacaagatcttacccacacaggataccgagatgtaacggataattttgctaccaaacacaatcacatactgtatcacaatacatacatccaatatccagcgttttgcattgtgtgcagtcttcctgtatctgcgttctttgaggatccaaaggcttaagggatgttgcttcttctctgagaaccaatgtgtccagtaactctctattctaaactcatctctataatacttctttcctctaatcggacacctgaagttcacagccgtgaaccatctgatcgcaggagcaatggtccctatagctacagtagtagtctggcaaacaagaaccagagaagttgaccatttgtaatcagaatctccatggcagaacccaagtgaccttggtcttaaaaagtaactcctaaccatagcttcaccaagcgtaatggcactcaggagacagaagaaaccagaagcagtgcacgtgacagaacgagccatcacgaattgagggctactagtatgagccatcatccaaaactttgacaaatcttgctgaattttcttagcaactgttctctctgtagccaaaggacacttcatagcaacgtcgtacctcttattgtacttactctccaagattcttttcgtagtgggaactgtggtggccgagaaacacaagatcataagcataagaagcatgagaagtacgaccagaaaatgttcctcagagaaaacataaatcgcaccagtacccaactgaatacagatgttaacaacatcagtgatgacaagaatccctaaagccataagattcatgaggagatcattgttgtccataatacccagagaaggcatcgaattacccatcacagtacatacaaagacggtgctgctgagtttagctaactgatcctgacgactcggcatggaagtgttgagatccacagagagtttgattccgacagcgatgaaagtcagagaagtggcgttgagagagaagaacttacagggaaaccagaatttgcggtgtcggaagccgtgtataagatcggcggccatggctagaccacagatgagtgaagctacggcaacgtagataccaatcgaaggtaagggtttgctgaactctgcatcgttcaaatcgccatgggcgtcgcagccgaggatacccatcaatcgaattcaaggatttgatcgaaaaagctcttcttcaagttgactccatggaaatgagtgatcttgttgacatcattctagagactggaaaagtagcaaactttgacttctctgaccgattttgagcacaaattccaacctttctactacactcttctatgaccatttcaactaaatttcggatagacactgttgaatcgcagatcaaccgggaaaaactcacgggaagaaagtgtttctgcctgctttcgtggagtttggaaaaggcctggagtgatccacctatcatgggcctaataatcggcccaattagttttgttactggatgtgttaataatgatgaagagtagaaactttgacttgtctgataaaatgatcacactcctttcatgaccatttcgattcaattgaggaattaggcactgttgagtgacagatcaaatgtcctaggatctataaacaattgacattccatggaatcagctttagggggttttgagcaatcatcatcaccaatcaggttattcgagggatccagtttgtttgtttttgaattcagcttaggggaacaaaagagttaagattgtgaaaacaaatgacatgaatcacttgattcgatagcaaacacaaaagcaggactaatctctctcacacacacaatgtctcaacttaaacagagaaaactagtcaatgtcccaaaatgaaaatatagtagagtactagctaaaagagaggtagagagatcattcattcaatagggtttcttttgttgttgatggtggtcatgtcgtcaggaggtatgacagcaatcctgagaacaccaaattctgcatcccaagcgatggtgttgttcgaaattaaagcgggaaaaggactttggacgcttccgaggtaggttcgaccgctctcatcgtgttcatacacgtccttgatctcagctttgaatctgatttccttttcatcagcatacacttccacatcatccggactaacacctggcatgtccactgcaaagtgagcccctcctcccgcttttgtcaccccaattagtgctcccttgcgaccagacaccagacacggatgatcctccaagcgtattccggattgaccttaataaagaacagagagtactgtattaacaacaaatgatgcagcaaaagagattgtgactttagagaagaggaatgagtcgaacctgtaaaaggaggcacagtgagagtacacttgttgttgttgttgtcttgagccttgctcacaaccttgacccttgtgagaatcatcctcaaaactccatctttcattttggcatccacgcctgtgatctcgcagcagtcacagccaagcccagcggttccagagtactgacgcacaccttccttgccgttgttcagagtttcaccggagaaaaagacaaccttttgtctcacggcgtcaactctgtagcgaacggcgtcgtctggaacaccaggcaagtcgacacgcacgtagagattgtcgttctccagaaccttcacttgaacgaaaccctttggacccgctttctgaaactgattgttcgtcgcgtagaacccctctgtaataataataagtaaacaaagatcaaaacttgatgaagaaaagtatacagagaacaaaggaagacacttatcaaagatggaactaactcgatctgcttcattttcatgaatcatgcacagtaaaaaaactgtaaatctttgtaccaagttcatgttaacacttcacaagtaaacaaattgagacaactttctagaaaaaacacatattttccgagaaaaattagaacaatgttgttcttgggaaatctagtagctcgtgaaaagagatacctcgaactttaggaattcttgacatgtccctgaaatctgcctttgtctcacccatctctctctttgttttttgctctctcttctcttctagttcaaggtaggttgcgtaaaaatggcgttttgttctcctgttgataaatatagacgaagcaccatcttgtggtacagactgtgacgtggcacgctccagctggcttttttttaaccttcatagcataagtttgactggtcttgcctacgtcaccgactctctctctcggtaagaaaaaaaacttgcttttactcttttgattttttttacggtagagaataagctgacgtcaccagctctgtgagctatcccacgctttttttactcctttcgtttatatgtaattatgtacgacaaaaatgactgcaaaagtaaaaccgtacccacactcttcactcttcattaattttcaaacatttttgacaagacgacgctgacgtcagcaatcttcaagagtaaaaaaattatgagctctcaattatctttttttttttcatcaaagatcaaataaggtttcaaccgtcgtttagtgtttatccaattattacgacaacgctattaaaaagtttgatccctacttacaacaacatatatctattaacatgtccaggttacatactcgtaatccggtttaataatggcaaagatctatatagtcttatcgaatagctaggttaatgtaagattaaatagaacaaagaaagctgacaactttttctttattgagatcacgacatatagaagcaagatcgttcttaactaaaccacaaaatgataaacataaagcagtagctgcatcaaagttcatagatagatagagacgctagacacaagtaccattacgagacacaaaccaaggtgttgttaaatcagtaatggaggatcctctccttgacattaatggaagcgtttttgcctgggatcttagggacggtgatccagagcactccgttgataagcttcactttagttttcttgacgtcgtaagcctcagggttgaaaatcatggagcctccgtatttgcgtccggcgttttcgtactcaggcattgctggttcgtcggcgaagaagtggacgttgttggcgtcgacccagtaggtgagatctgactcgggacaaccaggcatgtcgactctcgtcacgcaagatttcttcgtctctgtcacctcgtacaccgcttgactcccacttttctgaaatcggttccttactgtacatacataagataaaacaaacacaaattcgttattagaaagagagatttgacgtgtaaactataaaggtttgatttttataagaaatgacagtgaaagatgaaaactttacttggagacggaatttcgccggaactgcctgcgttaacttccatgttcctactcatttgctcaaaacgatgctctttctctttcttttggaaggaaactgagtgagcaaagtcgctctactccacttgctatttatagccgaggaggactatagggtttgggaaaggcctggagtgacctatcatttggcccattaatcggcccaaggagtgttaaaaattcgaaattgtttctgatttggtgaaattgatcgaaaagctcttctagttgaactccatggaaaggagtgatcttgtagagtgttgacaattgacatcaatctggagactttgacttctctgaacaatttttagcacaaccggagtgaccacctaatatgggcctaagaatcggcccatttagttttgtcgggggatgaattataaacaattgacatttgatggaagaaactaatattcaatatcagcttagctttaggtaaattatgcaatggacccaatttgtttcaatcggcttagaggaaaaaaaaagagttaaaagtttgtgaaaacaaatgacatgaatcattgggtaccatagcaaacacaagtatgtatatgttagttacttgtgtatttggcccatacatcggcccaatgagtgtttgagcctttaaaattcgaaaactgcttttgatttggtgcagtatatgttagttattcagcttccatctaatctcctccatacacattataatttaagttgctctgagttttatttgattcttactgaagattggtccagaaactttcctagtacaatgaactcttgtttcaaaacaaaaaaaaacactgtttcattgtgtggcgatgtagaattagattgatacaatacaagtacttaagtaaatactttggttggtctacgttacctaataatacagagcagatacagggtaatctcaagcaaaacatgatacaactctaaagcttttggaaaaacaagattaaaaaaagaagctaagcattgatgtggcttgaaggagtttcagagtgttgtgagaagatagaagttctgcaagtgggacaggaggagcgagtagagagccatttgtggatacacttaacatggaaaccatgctgacatttctccagcacttgaatgctttctccttgttcaaattccgacaagcaaatggcacactctgcttcagctcctgcgagttcaaggtcggaggagtagacaagtgtaggagttgttggagtggatgaagcagctgcttcagggtcaggcttgtggtcgtcttcagtctcgagggttggtcggagaaagcaacgaattgcagcgtaaagagagagagcacaaatgagagcagagatgacaaggatgagaaggactgatgcattagctgtgaagtcagtagagtttgagtaaggcttccatctgcaagtatgagagttacatgttggagttgcagcagaggacaatggtgaagctgcttctgctactagcaaacgcatcttttaatggtttgagagagagcctcgtgagaagagaccttataaaggagaggagtgtagggacaatagtggcgcttccagtggagtcttgaagctgtgagagagtttgaaggattaggatggtttcgtctctattttgaggactgtaacactcgcttctctctcttttggtccacttcacattaatggatattattgcgatggatgagggattgctttctttgtcctgtggcttatcatcatccacatgtttgccacacgtcgtcctcacactacgttgcctacattctaggcaaattgctctttttttaattcgttttcatgtttgaatttgtcaatatatggatttagatgataaaagagagagaaagacaagaacaaaatacacttcattgtttctttgtctctttttatatcactcaagtttacatcttttttctttaacgataaaaacaaaagaaacaaaaccccaaattagaaaaaagggtgaaaagaaagctataacaacaaatcaaaatagtaaaaagtaaataaaagctttaagctttttggtaccaataatttttttttttttaataaacttttttcctcttctaaaaactctcttctgcaatcatctgatctccatggtatagatttgtcacttctctaagctgcaattcctgcaacaacaccattttcatatgatatcatcagattttctacaaatgcttgaattctcggatagaaaaaaggcgttcattcattcattattcatacctccgtttggttgcctgttgatgtatccagctggtcctctagacatgaagtccaatggtcccattcccaatccttcctctgcctttgcaggcagcgaaagccacatcgagtcgctgtacagagagtctgcctccaagatgcttgagccgctgctgtaaccaccaacatgaactcctctcattgcttctaatcctacacctcctctctcaccgtggtagctactgcgtgcacgtgcaactgttccccagttgtcaccaatgctgcctagtgaagacattccagagtttccactgaagctgcttcttgatatcggagagtttgacatgtaacctagaccaccatttccccataaatggttctttggtgctgcatttaggacagaaccgttcccaacactagctcctcccgactccatttggctaccgaacctgccgagactcgcagcatatccagggctaaagggtcgtccaaagcctccactggaaccagaaccgtagttctgagtctggtttggctcaaaattcagctcgattccgtatccatgtccaaacggtgagaatcctcccctattacctactgctggactgtacctaacttcaggtttcactccataaccagagattggactcgggctgaatccctgggtgtactcattcagtaatgaactgattctactagtgccaaagctatttacattcatttggttccgcattgtgttgagagccatatccttaggaacagccagtttgacctccaccatcttaccattgagttcgtggaatgtcttctgcagtactttgtcaacagcttcctcagagtcatatgaaatgaacccaaagcctctaggccgctgggttctgtggtcatacatcaccacaacatcagtgatcatcccaaactgagcaaaatactttttgaactcagcctctgtcacggatgatgccaaacctcccacaaagatcttcttggagtttgatgggccaggtgatccctgaaggctgctgttacttttattaaatactacgtgatcatctcttggaacagccttctttgcctcaacctgtatatcatggagaaaatcaacacacgacacaactcaaagaaagcagtttttcattcattgtgaaccactttctttcacatgaggatatgaaacgatccaagttttacatttttatttgtgagtgtgaaatgaacaacttctgacaaagatatgcatttatcagagcggcaaagctgattgtaaacaatagagtctactaactaaaacaggaaggaataaaagtgagtagctttgctttgctttgagaagcagcaacctcaaaatgaagcaagtaagcaggaagattgttgaaattggaagcaatgtatgttggtatatagcaggaggaaacttacaattttaccatcaatgatatgtttaagcaagacgactctttcagcaacattaggatcagcaaagacaacgaaaccaaagccacgagcacggccagtggcacgatccttcataataacagcctctaaaacctcaccaaaactgtgaaaatagtcacgaagacgatcttcactggtttcccaagatataccaccgatgaagagcttacatgattccatttccatttctgccaaacaaacaaaaaaaggtttgtttttggttccagattctatatcgatctaagtgagaaggagaatggaatcgatagaaacacctcaagggaagcaaaataggatgaaaaagagcagatgggtcgtgatcggattgtgtaaaaaccgatcgacccacgatcttggattcctgcagaaacaaaaaaaaacacaaatgatcaataaaggtgtaagcttggaggaaggaaggaatgaaaaacccagaagacagagaatctatgtatgtgtgtaataccgaaaataaagaaacggagaaagaggaaaaaaaaaagattttaggattgagaaatcttcagatttggagaaggcaaggttttaataagagggcgagaggccctcctctctcttttctgcttatcgtccaaatttttagtcttttcttttcttttctttttctgcaatccaaatcgaattaaaaggaacaaaaatggatggaagcaaataagcaatgctcagcacaaatttcagaaaatggaaaaaaaaacactcacaaaaaagaatactttctcttacgtttttgtttttatatggcaatgtttggctatccttgtaagagacgagggtattttcgtcacttccgtttcttctctgtaataagtaattaatttattaataaccaatgcgtgcacctttttacccataagttaaagaataaaatctatcgttaataaaaaatggctaattggcttaagttgatcatgatttcttcctagttctagattttagttgatcatcataactttaatttgaagagaggtctatgttttttaaatggttcgttaatcagatgattatgaaagatgcaacatgtgacaattatttgattgcatgaaattttaagattaaaatgaaaatggcatgaaactctaattagagcttttggggaatcaaagtgggcaggaacatggggaatggttgatgacgacgataaagattgccatcccacagttttttttttaattatgtcccttcattttgctttcaaataaactaatcaaatttgttatgaattgaataatcatttttaaaatcattcatcaaccaagtggaagatgtttacaagtacacaaggcattacttgtgcatccaaattattattaccaactttcataagcttacttttcttctttacattaatcactttcttgccgtccaattattttatttgggtttttttacactctttagaaaacaaaaacatcatgttatgtcggttttatcctattagaaaacacatcgacaacatttaaccactaaattacatatatatatatatatataaaattacaactattgatcgtttttgtattattctttacaagtcaaatttccaccgttgaaattttgatttacaacattaatccagagtttaaaaattcggatcatctaattcatacataagtgaattaattaattaaaagcgtgacatcaaacgttagacacatgtggagatgagattgaataatgaatatcatccactaaccattataggttagagtcttgtagcctatgtaccaactatctcttttatactatttaagtttaactctcatcttgcaagaatccaagattaagcagccttactaaatcggggaaataaacttaggtttataatcagtgcaatcacatggccataattataaatgagcaaaacaattgtctgaaaaggccataaaatttgttgggcctacaatttgattaaaaaagacgaagcgccgcatatattttatcttaaagcccaataatgttttcggcccagtaggtgttctctgtactcctattctctgctataacttatcattgtctcccgcttcagaggaatcagacctaagaagaatcctcactcgtaaagtcgcaggtatggcttcgaagagctctcgatctattttgtggttggaaattaatagtccgtgtattaaagtttcaatttttatgtccttgaatttgatttcttccatatcagtgtcgaaacattaggcatcaccagagggaatatttaaggtttttctttaaaagctgaagacttgattagaaattagtccactttgattgaaatgttcatgtttgtttcagatgcattgcattaggagctcaatcctgcaacacttgagactgagagtctctgtcagacccacttcgcttcttcagaacgagaatggtttcaagagtattggtatttttaatttcacatcagaagcagctgcagatggaggccaagatcaaatattgagcagggttattgaactggtgaagaaatacgacaaaaccaacacctctgaggttagggattacaaaactgctgctttttctttgtgtataaccttttattttggtgaatggttgttttgtaacacggggcttgtttacttgcaggttactgaaagggctgattttcagaaagatttgtcgttggacagcttggacaagacggagctagttatggctattgaagaagagttctcgattgagatccctgatgagaaagctgataagcttacttgttgtggtgatgttgcaacatacatactctctgaaactcctaccaaagcgtctgagtcctgagttgtatctctgcctttctgtctctcttgttttcaatgtttagttaatgcaagtttagagacatgctctgtgtcagtgtgtctttgcttcagccaatatgatcatttgggtttttgctgctaaacattttatatgatatatattctaatgtgatcacactacttttgtaccaaaaacatgggagcctttatatacatgatgcttacagttgtttgttcttacactttgggaacatgaaacacaatgtagagagactctaactcggttctgtgactggagcgccagctaagcaaacgaggaccataacaaaaaaaatgcttttcacatgaaggaacttgaagaatcagctgtttgtgttcaaatcttttggttgaaatgttgtctcaacgagcttgctatgatctcgaactgtggccctgtaacctgattttccctgaggtgtagacacggaaaccattggtagaggaaacaagtttgataggtttgtgtatattggtagaggtgttatagcatctatagggcctaggcacatatactggcttgatgaaacaagtgttttcaaggtgtggaatcgcatggagttgggagggaagatcgatttcaaactctcccaattcatcagtaacagccttaatccatttggacctccttttggatccagtgtggcacttgatggcaacggtggcacctgcgaggatcatgttagtatatattcggacggaagacaagaaacatgaagaaaaaaggtagagaaacaaatacctgggatagggatggagtgaaggtgaggacgtgaagtgtcgcagagaagagatccggtgatcacgacagaggagagtttctgttcaccgtagccagccatctccaccatttccgttctggtccataaattattcccaaatgctccggtgaacaagaagaaagagagtaacaagaagcaacggatgatgaagaagcttcccatcgttaaaaacaaagaaaagaggtttgtttgtttttctttgtattttgttaaagaaatgaaaatagcatgaatatatagagaagaagaaggaagctaaagaagaggaagagaccctttgcgtggtggcttcaggtcacacagctctgtacggcagtgtctctctttataccttgtagtagcctttttcttttcagttgtatcttttctaaatatattaaaaatcgtggctgacttgttagggtcaaatttagagctgaatcttccaaatgaaacaatgaaccgagagcgaaagagaaagagagatacggcacttggaagcaattactgagtggttcgcctactctttcactccttgtataagtattattttaataataatatttggtgcaacgtttttgtatctagtgtgacgtttctccttttctttatttaattaagccaattcagttagagtagtcatgcagtaaccaaaagattcaagcctaccctcaactatactcgcacacattcagctttgaacacaacggcttcaacatcgtgggtttggtcgtgtctacgtgctcagaatatctagttgatggtgggagtcagcagggttttgaccaaaccacagtttctcaagtcctcattacattgaaaaaagtatgggcttaaaagaagcctagatattgataataggtccatcacctttaatgggccattcagtttgattatcttaacggcccattaggattctccaggtgggacaagtattagctatgtcattaagagcttaatacagctggaagctggtgattattgttaatgttaactaatcacacgcttagaaaagcgacaatggttggacccacaggagaagatcgagaccgtcaaaagtggacaaaactgggacgctttttgtttccaaacagctgtctgatctgattggtcgatgcagttttgatggcaatgaaccccaccacagaccacaccctcatgatccaacccaattcgctcgtaacacaaaaaaaaaaagaagtgaaaaattgaccgaagggtcgttgagtggcagttaccctctgtctccctaacgcccacctatcttctccgtgttttccacgcgctatctttctctcttctgtgtgtttaccacgctcctcttatgcgcgtcggctcgtgacaaaagtgtgccgggtccactaactgtccacaacacgtggcaaagccttaaagggctgtctatctctcaaacaagatcaattccaatccgacggtcgagcacgtatccagttgtcagaatcttatcagtaaacggacggttcatataagatcacgtgtcaagtgagcagaagtcgtgcgtcctctctttatataagctccggcgactccttcaccactgtgtacaataccagccgacacttaacaattcacacctgctctttttactctttctaaaaccctaaattttctcgcttcagtcttcccactcaagtcaaccaccaattgaattcgatttcgaatcattgatggaaatgatttgaaaaaagagtaaagtttatttttttattccttgtaattttcagaaatgggggattccgacagggattccggtggagggcaaaacgggaacaaccagaacggacagtcctccttgtctccaagagagcaagacaggttcttgccgatcgctaacgtcagccggatcatgaagaaggccttgcccgccaacgccaagatctctaaagatgccaaagagacgatgcaggagtgtgtctccgagttcatcagcttcgtcaccggagaagcatctgataagtgtcagaaggagaagaggaagacgatcaacggagacgatttgctctgggctatgactactctaggttttgaggattatgttgagccattgaaagtttacttgcagaggtttagggagatcgaaggggagaggactggactagggaggccacagactggtggtgaggtcggagagcatcagagagatgctgtcggagatggcggtgggttctacggtggtggtggtgggatgcagtatcaccaacatcatcagtttcttcaccagcagaaccatatgtatggagccacaggtggcggtagcgacagtggaggtggagctgcctccggtaggacaaggacttaacaaagattggtgaagtggatctctctctgtatatagatacataaatacatgtatacacatgcctatttttacgacccatataaggtatctatcatgtgatagaacgaacattggtgttggtgatgtaaaatcagatgtgcattaagggtttagattttgaggctgtgtaaagaagatcaagtgtgcttgttgaacaataggattcactaacgaatctgcttcattgaatcttgtatgtaactaaagccattgtattgaatgcaaatgttttcatttgggatgcttttatgttttggtgagagttatgtagtgattcaagtgtcaaaatgcttacatagagaggcagcaaagaaaccagcttcgttagaatctgtgaggaaagctctgtttgttgagaaagaaggtcaattgcgcgaatgtaagtcgcgggtgttgtagtacaagttgccttgttgatcaggtgcagagacgcggagaggagtgaagccttcgtagtctccgttggttttagcagagcaaatgtctgtcatatacctcaatagctcataattttgtacaaatggttgatttatgtattcctcccaaggcatccactgcaccaaattcccattttcagaaagagaagaggtttatgagtgttttagtggatgagactggagagtcgttgaagtgaggagcaaaaactgttacctgagctgcctcaatctctgactcctgtgcgttgatctccaaagaaaggggctttaacatgcacacgaagaacaaatctgactttccaaagaacgctttgtgtgtttgtctgccagaattttaaaacagacgagaatcagttatgttgcaatatagaagattatgcagttggagttgctacctgaaggccaatatttggtcgaattctgtatccacctgaaaacatacgatgcagaagagtgggattagctcttggtctcatgtaaactgtaaagaggacagtgaaaagttgaggcatgaagaagccttactccggtctcttctttcacctctctgactgagccatcatgaatgtcttcaccctgactcaacacaaacacaaaaaggcgaatcagagagctgaacctaaccatgtaatgagctttaataagaaccagcacctcattcacaactccggtggggaacttccagataccttgaccttgaaatctccctgtcttctcttgaaccaccagcacctttggattcaaatacagaaaagaaaagagatgtgatccattcttggagatgttccaaaaagacacactaaaaatctcatctcatcagtaatcaaacctctttgttgtggttaatgacaaaggcacctatgccaacacggtgagatgcattggcaggaagcgtatcgtcttctttgggaatccaatagacaagcatcaagtagtctttctccgcgtggtgaaaccagaatccctcctacacataatacacaaccagtaagtgatatgaagactctccaaacaataagcaaaagggggtttaaagatatctgattgcgcattaggtaacaaaacaagaccttaacagcagtttcagcaagaccaataagctgctttggcaacttgatccacactccctttttgccctgcgtacataaaaacgtttgtaaacatttcacagtagatcggttcatagtcctattcaccgtctattactgtagtggaaaagttgaatttaattttttttgcagcaaagtgaaagagagtttctggcccgcattagaatacaacaattttcaagcggaatagtgacactaacacttttaacacccaaacttttacaatgattcttctatgtaacaacaaatcggtaccagtatcttgattcggataacaaaatttgtcattttgatcgaatccaataagatcaaatttaacaagaggaagaaggaagagagaacctgaagagtccaggtagatagagaggatcggagaagtgtggagaagagagaaggatccatgggatgagtcatctcggtcatcacgccaccgtacttgtcttgaacagacggaagcagtgttgttgcgtcctcacgggacatgggatttgtggaggaactagaagcagacatggatctgttcctcgtggtggagcaactgtgaaacgcagagaacccatcagccggaggaaaacgaagacgacggccattattcttattacacaacaacaatttgattaaaccataacttttggccaaacggcaagtcatcattacgagagaagaaaaaacaaaactctcaactcaatttacactaaagatttgtcctaaataagtaacagacaaaacaaattctatataaatctgaaagtttttaaattgctaaatagattgatcactcgtttgaaggatttgagcatacaaaacctgttttttcactttgcggttccctttctacaacgtatgatgagtgaaataataataaaacaaggaagtaatctatttttcttctaaaatatgtcaataaaggccaaagaaaatattctgttactgtatatttctatcacaagaacataaaaacttcaatattttctgtttaagaaggttaaggtcaaaggttaatacgtacgtggaatagtttctctggattgtttgtgttgtgacacctacgcttgatagagaaattaccaatgattttcttctaatttttctcagattcccaatcttaatatggattatggattatgatataaaatatgtcggtatctccgcggctttcgctgagccacacggggctaaagtgttttttgcctttacacaaaactggtgtagatacaaattacagaacatattcagctcaggtgggctcgggtcgggtcatataacgacgggtaagaaaacgactgaagtgaagtgaggataaaatggaggttatgttactcctttgagggtataaaggtaaatatagagttttttaccctttgaattgcttttactttgggcagtctcttctggatttcacgccgcccattttattttttttaccttttcccgaaatggaacttctcgccggcgactgtcggaaacgagtcggcgacgactttgaggaagatattaacccattcgatggttcggacggtggttgcgggtggatgtacggtacccgtcaaatgggttctaacggaaacgacgacgctttggctacgctcgcagacttggcttcgcctcctcagaaattgaaacctataaggtgtggcgttaagcttccgtcgtcgtcggaggatcgacatcctcttgatattctcgccggaaccctagataggctgccggagatgggttttggctgcttcgaagctcctttgggatcgaagattgctgacgtggaggaaagtggtcaattgactcgtgggttttcaaaggaagaggatgattctcttcctcctcttcaaatggagtttcaagctcgaaatcgcatctcttgggatggtctctctctcaggtataaatctcaccattaaaaatgtgagctttttgttcaactttggatctgttactgtgaaaagttgttactttttttctgtattattaagagtctaattttttttcacgtttattagaagcttgtttggtagagacctcctaaacacattctcttcctcttgatatatttgagctttgcggtatcatttgattctagattggttgactggtgcatcactgaacactctcagcttaaagcattaaactttgcagatatcaatcagattggtgtgccgtcattacaagcttttacagtgttggtttataccacttctaagcagtgtttgtctatatattctgcggaacttttggattattagttcttagatagtgtaaccatgttggaagctttgagtttttgataagtactttccaatttttgattttgcagctcctctgttgatagcagcgatagtgactcatctccagacgttcgcaagaccgtcacgggtaaaagaaagcgggaaacaagggtaaagctggagcatttcttggagaagcttgtggggagtatgatgaagcggcaggagaagatgcataatcagttgattaatgtgatggagaagatggaagtggagagaatacgccgtgaggaagcttggaggcaacaggaaaccgagaggatgacacagaatgaagaagcacggaagcaagagatggcacgcaacttgtctctcatctctttcatcagaagtgttactggtgacgagatcgagatccctaaacagtgtgaattcccgcaaccactccagcagattcttccggaacaatgtaaagacgagaaatgtgaatccgctcagagagaaagagagataaagtttaggtactcaagcggcagtggcagcagtggtagaaggtggccgcaagaggaagtgcaggcattgataagttcgagaagcgatgtggaagagaagacggggatcaacaagggagcgatttgggatgagatatcagcaagaatgaaagaaagagggtacgaaagatctgcgaaaaagtgtaaggagaagtgggagaacatgaacaagtactataggagagtgacggaaggtgggcagaaacagcctgagcacagcaagactcgctcatactttgagaaacttggaaatttttacaagaccatttcctcgggagagagggaaaaatgagtgaaagattttaaatttaggtgtttttggcacgcaaaacgggagaacttgtagatgattacctcgagtttaatttttatatctttggtgtagtttataatttaaaactctacggctctgtatttgtagaaggttcgaataaaaaagacaaatacgttggggtgattgggattttgtaacggctaagggagacgaggagaaggatcctcggtcacatcgattatggctgccacgttgttgaacttgtgaggtctgaaattacaaatgctgacacttgccaacactattagctttattccaattactctttcttctctctcattccattctcttcttcaaatgcttcttaatttcgggcattggttattattatttatagggatattcacaaacacaaaagtcgtgtatttagaacaagaaagatatggaacgtggaggcttccatggctaccgcaagctgtccgtgaacaacaccactccttctccaccaggtagtgccattctctataccccctcttttcacaggctctcttcatttcagttgcatgcgaaaccattctctgcaatccctccattgtcatgtctgtactcttttcatgacgaacagttaatgaaatagcttttcaatcttataaaccgcgcatgcagacgtcatcgaagccattatgcactaaaacttccatttttcttatttttgttaggattagcagcgaattttctgatggcagagggcagtatgcgtcctccagaattcaaccagcctaacaaaaccagtaatggtggtgaggaggagtgcacggtgagggagcaagacaggttcatgcctattgccaacgtgatacggatcatgcggaggatcttacctgctcacgccaagatctcagatgactccaaggagacgatccaagagtgtgtttcggagtacatcagcttcataacaggggaggctaatgagcggtgccagcgggaacagcgcaagaccatcactgctgaggacgtcttgtgggcaatgagcaagctcggttttgatgactacatcgaacccctcacgttgtacctccaccgctacagagagttggaaggtgaaagaggggttagctgcagtgctgggtccgttagtatgaccaacggcttggtggtcaagaggcctaatgggaccatgaccgagtatggagcctacgggcctgtgccagggattcacatggcgcagtaccattatcgtcatcagaacgggtttgttttcagtggtaacgaacctaattctaagatgagtggttcatcttcaggagcaagtggcgccagagttgaagtatttccgactcaacaacataagtactgagaacaatggctaataacatagacagctgacagagtcataactgttagtaggtgcaagctgtagcttatgaattcaagtttaagcgaaaacaatgctgctttttctttgtttattatctatctagttgaaagaacattgtgtttttcatctgatctgtcttgtggtaaagtatgtcaataaagcattagttttgcaaaccgcatgcatgtgatattacaaaattcacggtgaattcgtaatgcgtcttggttcaaaatagaaagagactaaacattccagatttcaattctcagctacagaaatgagtgtttaacggatacagaaacaactctcacaatcttcattcatttcatttagctactactttccaaaggaacttcaacgcatacctttttcctctccagaagatcatgtttgtctgcactctcgtttgcctcagtatctttctcctgatgctcttcagatatatgttccaatttcgaacaatcaacaggatcaagtccggttcttttcctctgaggaatcacagtgaagaaggctgttttccagtccctagtctccagaaacttgacgagtatctccaaaacttggttcacagtgagaacctaaatcaataaaaaccacaaatcttacattaacaaagtacataaagtagaggttttttgtgttgtgcccaatgagacaagaattgaagtggccatttagttacctgagaacttgacattttcatatactctcctatgggaagcttagctgttttaatgccttgttcttgagccttggtcatggtgatccctttgaaccggtttcgatccactaagccaccgataatgtagatatgcttagggtcaagatcatccaaaacagtttcagaatcagccgtaagatacaccaaattatctttctgatcagccatggcttcaatgtaacacctactttccttttcaatgaaccatttctcaaaaccaggaagcttgtcaagctcagtactcatcttcccttggactcctgtaagccatagatgacaaggtgaagtgcttctcccattcaccgcatagcaatacataatctgctgaacgaggcttgagatctcagactcagacatgagatgagcaaaatcaacatctactacgatcttttgacctatttctttagcttgattcagcctctctatcttcttctccttctcctccgatctcttctccattctctccttccgcagactcttcctcgactcaataagcttcagcctctcttcctccgtcgcgttcgctagggtttcttcccattccttaagctttctctctccttcttttctcttatgctccttctcctgtgccttcttctcagctttcttcgcttcgtatctttgctgcttcagctgcttcttctgagcattcttcgacaggggaggcgaaacgttaaccggtgccggttcagattctggtttatcgaagcagccgttgtcgtcatttcccgtcgccgccgccattgccgcgagaaagcaaagcgagagagcaaagaagaagggtcaaaaaactaaaattgaaactccactcaaaacgacgtcggtattcttacactaatgggcctggatgtttaaaaaggggcctgttaaacgatgggctttaagaatggggaaaaagggtaaagagaagagaaagtgagggaccatcaatataaaataagagaaaatgaggaagcgatgagagacacaaagccgtcgtaagtcagctaatcggggctcttgttgtgttagagagagctcagatcagatgtggctttcttcttcttctccttcttcttccgcatagtgactctgagaaccagattattcaagaaaataccctttttgtttccttgttcgtttattgtggctcgtctctaacagcttcggtttaagagttctctgtttcactccccatggctcagaagccggaggaacagttgaaagagctgggatcgaagcttgacctagctcctgtttctaaagattcattgctcaaactcttaaaggtgtgattccccatctctacttctcattgtctcttctacaatttctccaagtttcgatttttcgtttggagggaacttttttccatctttgtcccctgtttaaattctgccaaattggaaccgaataaagttttcagctttgtagatcctcttccgttctgggtaatgctcattaattgagccagtgttttcttctttcgagctgcgttagggttagtttgtaccatctttttcgtctacgctagattgttcttgcgaaattaggtcatgcataaaactcgggactgttcctaggagaaccaattcagtgtctataattgcttagatttgcgacttttatgatgtctgctgttagaatgtcgagtttttagggttggccctagtatttttctgtccctggtcatgatggaattgaactgcgctatcttcaccagcaatttgactgatgcagtagttaccccaatgttcagtttctacattgactaagatgtttctttatcaaccacctttgtggaaatgtgatttgcttttgattggtttcattggggtgaattggtcgggttagtttactaagatatctctctccttaaacacttttccgtgcaatactgtgactgatttatcaaaaagactttccttaacttgtgtgttgctacatgcaggaagctgctgtttgtctttctgagttggagcagtctccaccacctgcagtgctcaagtccattcagccttttcttgatgcagttattaaacctgaaattctcaaccatcaagacaaggatgtcaagcttcttgttgcaagctgcgtttctgagataactcgtattacagcacctgaagcgccttacagtgataatattatgaaggttgtttgtcctgactttcctctggcaccgtgatcacagacatgtccattactgatttcttctgtttcctatcttgtttcaggatatttttcaactaattgtgagcgcttttgctgggttgaatgatgtcagtggtccatcatttggaaggagggttctcattttagaaacggttgcaaagtacaggtcatgtgtagtgatgttggatcttgaatgtgatgatctggtgaaagaagtgtttactacatttcttgatgttgctaggtgtgtttcactttcaacctagatttcttttctgagtgattataagttccgctgatttacaaaacatcttcaaattttctgattttcagttgtgcttttcgttggtgttcttggctagtaatacaaaatatgaatggtttctgtgatttttttcttttcttttgggcttcatactgaaagattgttttatttctgtatgtgcagagatgaccatccggagattgttttctcatcaatgcaaaatataatgattgttcttttagaagaaagcgaagatgtgcaagagcaccttttactaattttactctctaaattgggccgcaatagaagtgtgagcatactcacgttgctggctctggccactgattataatccaatttaggattcgttgttttatggaatatcagacagctcatattctgcatttatgatggcaggacgttagagatgctgcaagaagacttgctatgaaagtcatagagcattgtgcgcccaaagttgaatctgacataaagcagttccttatctcttcaatgtctggagatagccgattttccagcagtcaaattgactaccatgaggttatctatgatttgtaccgctgtgctcctcaggccctatctggagttgcaccatatctcactggagagcttttggtataattttatttttggtcttctgccactatcttgcacgtcaaatgtcatcatgactctgccatgcacaatacttttattattatgtattttgtttgaataatcactcttatccatttgttgtttcaatacttttcatgtggtatgagcccatcttttcaagtagattggtattgaataatacataatgcatactattaacatatacaggcggataaactggaaactcgtttgaaagtggttggattggttggagagttgttttccttgcctggacgtgtcatctctgaagagttcgattcaatttttttggagtttctgaaaaggctgaccgatagggtagttgaagttaggatggccatccttgaccatattaaggactgtttgctctcagatc

SEQ ID NO: 851 - DNA, 82503 bp, Arabidopsis thaliana
gatcaagacgttggttaagagctatttaccttttaaggatgctcaacttcgtgcgggtgttgatgatcttcttggaatactaaaaaacattctttcctttggcgaagtatccgaagatctagaatcaaggttggtagatgtgttatatatgctaagaggtcattcttattttaaatttgaaggcactcatgctcaacctctccacagttctgttgacaaggcccatttgagacttgctgctgcaaaggctgtcctccgcctttctagacattgggatgataagatacctattgagatcttccatttaactttaaaaacccctgaggtaccatccaccaattttgttttccattcacacctctcatccaatcctttatctaatctgggttctattttgactttaaacaatttttcttaacctcttctgtagataccatttcctacagctaagaaaatattccttgggaaagttcaccagtatgtaaaggatcgggttttggagatgaagtatgcctgttcattcctatttgatatcactggatcaaatgttctcgaatcagaggaggtatgtcatcgcccttcactcgaaaacttatatatgatgtttctgagtcgataatactgataatctggctataaactatgcgtctgtattggcatacaggataaacacaacctagctgatatcatacagcattcttatcaaacaaaagtgcggaaaatttcggctcagactgatgcaaattcagttactctctaccctcatcatatcctcccttatctggttcatgcacttgcgcatcattcttgtcctgatgtcgagaaatgcaaagacgtgaaggaatatgaaatgatatatcggtaatttgttttcccggtttacctctatatgccaccactttttgctttctataactgtgaaattagtaatttcagttttttgtttttttctattgataatttatgcctactatttctgattgtttatttcagccaattatacttgatcatttctatgttgctccataaagaggaagacgggaagactgaagatattgataaggaacgtgagtacgttcccaccattattcttatcttccatagtataaaacagtcagaagatgtcactgatgcaacaaagtcaaaggttggtaaaagactttcttcagcttgttctattttacagcagtcatgtcaggactgctttttataatgattctaagcatgccggtataatgaatcacactacttgccactgtcgtggtgccatggagctaacatctcataacttatattaacagaactcacatgcgatctgtgagcttgggctgtcaataatcaatcacttaactcagaaagagcctgatctacaaggggaaatcacacctgtatcgctgcctccgacgctgtacaaaccttctgaaaaagttgaaggagacaagtctcaggtaaaaactcagaaattattcatggttgtgggttcaaattttcatgatgagtttgccaagtattctttggcaacctgagctgtatgtcgtatttgcttatagatttgctgtgttgaactcatatattgttctggtttgtgttttctaacccatgacaggtaggtgaagaaaaattgtggctagctgatgagactgtcctgttacacttcagggctctcaagttggagagtcatgctgatgcatctgtatgttattcaacttaaaaatctgtgttgcagtacctagtgatttctgtattaatccataatttccttttcaggtgatcccccaaacttcagaaaatgaggttatgattgatggggaaagtgatggaaatgaaattcctctgggtaaaatagtagagcgtttgagagctcagggaaccaagactagaaagggcaaaaagaataaatctgtaccagctgaagatgagaatggtaaaaatgatgtcgatgttttgaagatggtgagggagataaatctagatcacttacaaatgctggataaattcgaatccagtaatggacacaaacattcccctagtgagagagcagagatatgtcaaagagatcagaagggtaacaaaaggaatgttggtgatgcaacatcagtagtttcagtccctaagcgccggagatcatcttctggccatagtccttacaagttctcaaacagtggtcctaaagttcaactgaaagcttctgaagatgagttgcatctagagagtgacatggacaaaaatgtctctttggactcgcacgatgaaaattctgaccaagagaaaatgttagaaagcatctctccccggaagagaaagaaaagcttatcatcaaaattaaagattacagaatctgattgggctctcaccgatgtggagagggtaaaaatcatcaatagcatcttatcctttgttttttttcattctagttcaatttattgatattcaatcaatatgcatatttttcagcagagtaggtcagcaggaggtggtgatagcaaattaaagtctgcctctggatcaatgaaaaagcgaaaaaacgtgtcaggactggcgaaggtgcggagctttaccttccattgatgtttatctctgtcactttgtggtaattgaacattgtgataacaaatattttcttgtcggaccttatttcttgtacagtgctctacaaaggaaaataaattggtaaatgatgaactgatcggttgccgaatagaagtttggtggcctatggataaacggtaaggatcttttagtgactttcattgtctttattcaagttttactattctgacatccatgcaagtatggagttaatttgttttgttcccattcttagtctcgttttgttacgttgaatccatctgatgcaatcaatcattttcaacaaaatgtggttatctttttctacatttatctcaccagaagttgcatcttggtgaaataaataggttttatgaagggacagtgaaatcttatgattccacaaaacagagacatgtggtaagctatcagcattttgcttcttttttgtccttttgttgggttagttgttcaagccaactctgtactttatccatatgatattgcagatactttatgaggatggagatgttgaagtacttaacctaaagaaagaacagtgggagctcatagacactggtggaaagaccgcaaaggtatttctggtttttgggttctgttgtcaatatctatcttcactatttctagtcatctgccgagttcgttcctttgagcttaataaatattcttacaatatttgtacctactgcagaagtccagaacatcaaagggaaattcgaagaagaaaaggtaacattctctctgcaacataggacagttggccttgtattcgtctttcacagcaatcttattattttgtttagatcttctggaagtaagcctaagaatccggatggcgtacagagggatgaagacccagttactactacgtaagcggaaatctgtcattagaaatccaaatacgagtcatgagtcattctattgttaaccttttgtttttggactgctatcttctctaggccaaaaggaaaaagaactccaaagaaaaacttaaaacagttacacccaaaagatacaccaaaaagtctttctttagaacatgagaaagtagagagcagaaacaagaaaagacgatcttctgctttgccaagtaagctccattgggatccactgttctgttagcaatccccactgtttctaaattctttcagcctatttacttccatgcaaacagatatacagcaacggtgttaatcttattacacaattcaatattctttgtttgtagctgagttattctattttgaaatgattcagtagagacagaatatagtggggaggctggcgaagaaaaatcagagtctgaaggaaagtcgttgaaagaaggtgaggatgatgaggaagttgtaaacaaggaagaagatttacaggaggcaaaaacagagtcgagtggggacgctgaggggaaagaagctgaacatgacgactcagatactgaagggaaacaagaaaacaatgaaatggagagagaagctgaagagaatgctgagacttctgacaatgagactcttgtatatacctagctttctcttaaatctttcaagcagcatagacaaaaagatgagtagagagttctgatatgtgtttactttcgaatgtgtgtacagggagcttggaagagtaaagtgggtaagtcaatctcgaggacagcaatataggtttgccgtatgccgtaatgtagaagaaattgcggtgattgtcctcaaaaattggtggtctctggattgctgtggtgtatatgtggtaaaaatgtgagacttgtagggttagtgatacatacttgttctaaccaccatgttggaaagaataataggcagaaagaagctcctccagaagcttttgtggtcatgtattgtagcctctgtgtgtgtttatttgtaggtttgttttacgttttttctttttctgtaatatttacaacttatattcctttacccaaagtactattctcttgttgaacttaactgctttgccaaattttttttgtaaacttcttttgtttattttatcgcttgtcaaatcatgaaagcttttcggtttttgggtagaaaggttcagaatgatccgatctggcaaaaggaaaagaatgtatttcctttcaagtccaaatttagctgcttgtctggtagtatcactctcttatcatcatataggggctattgattaaggaaatgacccgagagtaaaatgatgtcaactacttattcttgcgacttaaaaaggatgaaactgaattaaaacaatacaaaatgttgttcgtcaacccacacgcctggccaaacggagcaggttcaaaccactcaccttttacacacacatggttcttcagggatataatagaaaaggaaataggaagggctcaaccatagtgattttgtctaactaagctcgtaaaactcctttccgttgggaagatttatcattttatcttctgattcgacgagcctagactaatatctcgaatgaattaaaaaaaaaagaggtgacaaaatcatttctaaggaaagaaggagccgatgggtttgcttgaaaacttgtgtcatacaacatatggttcagaaaacaactaattatagttcttcagccagaccaaaacaagtaatagctcgatacgaaaaaaaaatagtctcaaatcgaagaagaaaaaacaagtaaaatgcacttaatcgaacaagccaaaacccaaatctccatcactctcttctgctggttcgtcctgcaacagtaaatttacaaaacaattagataaatataccagatcatgcttcgttagggaaaagctacgaattcattgttatataatttaccttcttcttctcctcggcagcaggagcagcagcggcagcaccaccgccagcagcaggagcagcagctgcaacaggcgcaccacctccaccaccagcaccaacgttcatgatgagatcagtgacattacgtttctcagccatcttggcgaatagcattggccagtatgactcaatggtaacaccagcagctttcaccaaagtggcgattttgtcagcctatcaacacaaattcaacaaacagaagcaaagatctttaaattaataagttataacccaattcaaacatatatagacagaaacaaaaatacacttgttcaattactgactctataactctactaatccttatcaacgaaagattataactattcacttagtttctaactatcaagtcaccagaaacagctcaaaatccttaaactccatgagcaatgatacaacgagaccaatcaaaattaagaaaatagtaaagtagaaaaggaagcataccgtgatagcaataccctcatcctcgaggatcataacagcgtagctgcaagcgagctctcccactgtcgacattctctgaaaccatcaaagtaacataacaaaccaacattattcacagatcaaaacaacactgaaaatttaatgggagaataatcggaaggaatatatctgcttgtaaaattcgaaagaaagaaatgaagaatcatcgatagagtaccttagactacgattgaaatgctttcgcaacgcggctccggctcgagagatgaagtatcgctagggtttttgattcagtgatgtgacgcagcgtttataaagaaagctttgtatcaaagcttcattagggctttcaaaatatatatattcattaggcccatttaaagatcttctggacattttcagatttattgggctttgagtatgtattgggcatgtctatttggtgtggtcaacgaattcttgtatttcaaatgttaatgtttatgttttaaataaaatgaacacattttgaaagttaagggattaaaataacatttttaccgtttaacattatgctgcataaaaagtgtgagatgtttattacacaaattcgcatggtcctatattggagctttaatggttagaccgagtcaaagcgtgtcagaggccacctctgatttcaagcatataaacaatttttaaagtttttttttttctttttcgtgtggtaaagggtcacacaaaagtatttgattcactaatttattataaccaggattaggtttacctaacttttgtagtaattaattcattaccgttactgctacgttgttcaagaatcaaaggagtattcgataacttgtagaatatgatttggataattttactgttttcattagttagataccactaaattactattacggtcaaaacgcatgttaagactttgtttggtcaaataaaattctttatagcaacctcgagagtcgagtcgagaccatggaatttgtctttaagacaacatttgtataaaaatgtttttcaactaaaaacaaaaaattctgatgagaatgatagtcctcgcctcctctacaaaggtgtaagtaagtagctgctgcgttaatctcaaagaagacgaatacaagtctttctgttttgctcaattcatcacaaccacaagaagacgattttttattcttgtttccaaactggtaaagttgttcagtaattttctgtttcttatttattagtttttttcttctaaagtttgcaaatttctcagtgaaacactgaaacttccttttcagttcgtaccgttcttcgctactttactcattctttagggtttcaaggttttctattggtcttgttgtagactcgagtagcttctgggttcaacccacaaagtttgagccttttttgatttgcagagtcctctgtgtttcttggtttgtctcttgatcaaggtctgcttgcgatttttgtttctttctctaccttactcgctagatagatgtttctgtagattggcagcatttggtctctctgtgtggttttattatttactgatataagtgtgaatctttcccagaatttcgttttctatatcaagaagctctcagaaaattttgggcttggcgtagttgtttagatatatcctagcttcctagagattgaatgttgaatgttgaatgactagtacttccttctctttctctgtgtcttggttgtcatattcaactgattgtctaataaagacagttgctttagctctgttattcacgaggattgtctcaagaagtttctaaagttggtagcatgtgtttgtagaatctgagatgggcgagccactaggactgctccaggtgactgttattcaaggaaagaaactggtgatccgagatttcaagtcaagtgatccttatgtgattgtcaaattaggaaatgaggtatgtttggtcagtgtttttcattgttcttggcaactagaaccagtgtttgtgtttctaccaaggaaacaagtatctcgttgtgtttatttgtctgttgatgtgatgttttactgttttgaaaaccagtcagcgaagaccaaagtgatcaacaattgcctgaatccagtgtggaatgaggaactgaactttactctgaaagatcctgcagcagttctcgcattggtatgtctacatcttcatgaatctttccttttgtgaccatcatgatcatgatgctgagattgttaatggggtggtgcaggaagtgtttgataaagataggttcaaggcagatgacaagatgggccatgcctctctcagccttcaaccgcttatctcagttgccagactaagacacgtagtccgcgtgtcctctggtgagacaacgcttaggaaagtattaccggatccagagaactgcgtatctcgagagagcacaatcagttgcatagacggagaggtggtgcagagtgtgtggctgaggctgtgtgctgttgaatcgggtgagattgagttgaagataaagttgattgatcctcctggaacaaacaagtagcaatagggtattttatgttagtttgtaacacgagacccgtttgtgactagtataattgcaacatcagtatggtcttgtcttgtttccaagtgtgcctttgtgactactcaccaatttattaggaatctttgagatacattgttctgctctcatcacttagctcttccttatttttcttcttgtgtgtacattttgatggaaactccaggtaaactaccatcaatggcagattctcataactctctaccttcttaataataaaacacctggaagaaattatctggcaacaaagctatcacgcataccaaggtggtggtggaaccgacactgatattggtatcttacgtcacacacacactttgttgttatctctatatccacctttttctttttggctcaattatgatctctctctttctcgtttcctcgtaatcttaacacaagcttgatcgtcctcatctgccaccaaaccaaaggtgatgcgttttcttagccaagaactcaaacttgtgatatttcttttgattctcatcatctctgcattttctgaattggctcagacataatttcttcggtgacttccatggctccgcctgtctctgatgattccctacagcctcgaggttctttctgtttctccttcttctttttgttctgtttcagtttctactgttttctggttggatcatgtatttatcctttgatccagcagtaatggctacttacagttcagttccggtgtgtgcagatgtttgtgttgtgggagtggcgcgaacgcctataggggacttccttggctccctctcgtctttgactgctacaagacttgggtccatagccatccaaggtagtttagttatacgactactctctgtctctctctctgcttcggccaagttttcattctcttactgtttcttctcatagccgcacttaagagagcacatgttgatccggcccttgtggaagaggtcttctttggcaatgtcttaactgccaatcttgggcaagcaccagcaagacaggctgcacttggtgctgggattccctattctgtgatctgcaccactatcaacaaagtttgtgctgcaggaatgaaatgtaataaccttttattactcttcttctactccagatgatcattcgaacggtgtatatatcactgcttttacttcacttgtaacctcagctgtaatgctagcgtctcaaagtatccagctcggcttgaatgatattgttgttgctggtgggatggagagcatgtcaaacgtacctaagtacctcccggacgcaaggtgctttttgagtttcctaactcaaacttgtagaaacaaacccaagagaggcatattccatctgtttttatcatctcgtttattctttactctgatttctgttagcagaaggggttctcgattaggtcatgatactgttgttgatggtatgatgaaagatggactttgggatgtctataatgactttggaatgggagtttgtggagaaatatgcgctgaccagtaccgtattacaagagaagaacaggtcactcatgttcaaacttgatctgtctttccagtttgttcccatggactcatgactgatgtgatgatgagactgtctcgctgattctctattccttgacgtacaaaatttttctctttgtaggatgcttatgctatccagagctttgagcgtggtattgctgcgcaaaacactcagttgttcgcttgggaaattgttccggtacacctctcctttccttgcattccaggaattcactttatggcattgtaatggaatattgttcataaactcatattgataggtcgaagtttccactggaagagggaggccttcagttgttattgacaaggatgaaggattggggaaggtaaatagtttaggaaccactgcttctcttgggatagccttgattgatcttaactttgtttggcatgaaccagtttgatgcagccaagttaaaaaagcttagaccaagtttcaaggaggatgggggatcagtcactgctggaaatgcatcaagcataaggtcatcttttatctctcaattttgtttcttcatttgtaactctgcatgcattttgtcttgtttacttccaacagccacttattggctctggtttacgttggtggacagtgatggtgcggcagcgttagtgctagtgagtggagagaaggctcttgagcttggactgcatgttatcgctaagattagaggatacgctgatgctgctcaggcaccagagttattcacaaccacgccagctcttgctattcctaaagctataaagcgggctggtttggatgcatctcaagtggattattatgaaataaacgaagcattttctgtaatcgcacatgctgagctctcagtgttctatagttgttcggtatgtataaagaggtcttgactgttctggcttgtttccctacaggtggtagctctagccaatcagaaactactgggattagatcctgtaagtcatgaaacaagtacagttgtggatgtagcagatcttaattttcagtctctgattatgtatgtatacataaacaggaacggctcaatgcgcatggaggggctgtttcactgggacatccattgggctgtagcggtgctcgtatcttggtcacattattgggggtaagtcgtaagatcaagcgacaatagtgttgaaattaatccacactgaaaatgtggttgaatacttctgattcaggtgttgagagcaaagaagggaaagtatggagtggcatcaatatgcaacggaggaggaggagcatcagcacttgtccttgagttcatgtaagccccctctttaactctggtaagcgtagccttagcacaagcaagagattacatgtcaattaatgcttccaacacaatacttttaacttcaacttgttgacaggtcggagaagacaatcggatattcggcactctgaagctaagagctgttgttttataacgcaaagcttatgtatatggttcatgtgtgtgtcacaagactgtaactttgtacttgagagagatgcaataaaagtgtgttagaaaatgagcggtagatttcccaagacaagtgtgcaatagctgtttcctaaactgttgttgttcagccaaagagcagatcaaacaccaaaaacacagatgcttagggaaatgagaggtagatttcccacaaataaatttgctacattagaggatcaaataatactatacataaaaccagaagtgcattcagttcaagatttattctcttcttttcgctttacatttgcatggctagggagcggacacagctcagtactcccttactcatttgaattgctagctcacctgtaaaatatatatctcagttgtggaggcactgaaggaattccctcagaagcattcagaggtcaccatttgccagtgtttcatgactggattttctgtcatcaatggacacggccagaccgttgcggttctcaaacttgtgcagctccgattctatggttttggctatcacacaacgttcagcttcaggctcaggaaaacccacgtggaatgatccttgctttgcaggttctgcttgtccttgggtttcataatggtgcttcacatagttgtatagctgttgatggaagggatgattgatagaaaaacaatttgcgctctgagtgtggtgagatgacccagagcttccacttctacagaaatgtggcagggatgtgaagtccataatctacaagaaccacaagatttttagacaagtttgcattacacagcaagatcataagaaatcagatgcatatatgtatataccttcaataattcatcccttccgcaaccggataagacatgaacttttttccttgtcctctcttgtaaaagaggttttacaacctgtaaggagctcaatgagatacacatacgtgctaagtagctaaacaccatgagttactaacaaaagagaatcaaagaggcttaccttccaacatgcggaaaatatatatggagcgttcacaacatagtacgtgtttgtcttctctggatagttgagatcatcaatggtcgatatgatagtcactaactgcattaatgtgttaacactaaaagttattaataaaaaactatgtcaatgaattgatcaacatcttgcagtatcattattcacgaagcaactttgtccgcagacattgactatcatcataccttgatttggcttagagctgaaagcttcaaccccgtcatgtctagaaccttgacgcaggtggtgattggcctcccattcttcttagaaatagaaggctgtaacagtgtttactcattacataaagagacagaacctcaaaaagagagagtgtaactagccatctgccatttactcaccagtaaaacacggtctctatattcattgatttgtatgtgagattggacatagtagtgaacctatatgtggaagaagagaatcacattcattttttgtttctcatctgattatcaaaagtacgagaaaacaatgaagcatcttacagaagctttgtcaaatgtgctgaggccgacgccaatagcaaagaccggcaagccctaaacatcaaggcaaaagcaatcaagaagagagaatctgtttttaaacagaaaaggaaatggaatcattatggggaagctacctctttggtgtaacctgacattcctatgagttgagaatctcgtacatccctatacaactcagtaggaacaattggtttctacggaaaccaaaaaacagaaaagatcaaaattcagctctcaaatctgaacagattaaggaaagagggaatgaatttaactcacagataggatactgtcaatttcattatccaccctccaacgcaaacactcaaccagctgaaagtgagttagaaacggtgtaatcagacaagatagacattttaaagtcactcaaacaccataagagttttggagacatataccattgtgtgagctttgcatacgttccagtctcgtgctttcagaaaacgacccaaattctcccttagatatccctgatggactctctgcagattcacaaaaacacctaactttaagattcagttttaaccactattacagaaaaaacaatcatagattcaaacccagatcaaatatgagtaaagattctcttcacaacctaaacttaaaaatgagaactttatgtgatctgctaagttgaatgggttttgacccatttccaagaacagctctaacataaaaacacgaacatacctcataagttttcttcagtggctcctcaactagcacaaatttaccagattcagtaattaactaattagaaatctcaaagtagaaacagaggaaaaggtaagaggaaaaggtcagaccttgatccatcagctcttggaattcatcaatggcttcttctgaaacgatccccattgttttgactccttcctctgaaaccaaacagaattgccagaaaaagtatgaaatcttcaagatcgacttttttttttttttttttgggtcacttggcaccaaactatgagtccatcattaaaggtcaatgaggtggtaggagaacagaaactcccaacagaaatatacacttttaataacaagtaggagacgaactactttgattaagactggtcgtgaccaaaaaataagaagcagcttctgatttcttctgtgggatttgctgaataatcaatcaatccatcaaactcccaaaaaccatttgatttcctcctctttgtggttcttggtcaatggcacaagtaaaaagtctgttccttttttctcaatgaaccaacgaagaaaacagaggagcattcaaactttgaaatagtaaagagaaaattcaattgtaggatgaaattcgacaacttgctaaagctttgtaccatgtatgaacttggtagctgatttggtgagccttgtcaaaagataaataatggtattcaaagttggtctctttttgttttttctttactgctttttgggtcaaatattcaaagttgtctttttttttagaaacgttttaattactttttaagtggtttattagagggtgttattagtttgggatttcaaaataaatttagtgatttaaagtgttatctagaatctgttatgttattcaatcaagattttttaaaaatttgttaaagtcttttgttatttatttaaaatttataaaaaataatttaaaatcttcataaatttagggttattggttttgtacttttataaagttagtaaaagttttgtgttattcaattaaaacaataaaattgtgattgttaatgaattaaattattatgttattggttcatgacattctacacttttctttacaaaataaaatcatgaaaagtattatcaaaatagagattttgtttagaaactttacaatattataaaaaattaattaacaagattgtaaaaaactctctagcaatatccttcatttgtttactttcaatgatttgattaaagtcatctaatctttttttttaacaaataacacaacatccgaagagataatctaggggccggagatgacatggatgagttgctttatggttattcaaaagtcaacatctttgtatggcaaaacaggcctatcaggctatcacacaaaaaagtctctttgatttgccattcaatagacacaacaactttggtttttagctatttgctttgcttctttgatcgatctttgttctagttgtggccattgaatgtgagtataaatcatggacagagaaacagactgggtgggccacttctcatttgggcctaaaactaagagcaaacacaaaactagccgaacactttgcccataacctaaagatgctagctttcatctttgggtcaaaacgatctattaaaggcttgaatctttccggttcccaccatgtcaaaaactaaacatggaaggattcttaaatgtaagagacaaagcacaatagctgctgatgtacaaaggctttgttgttgcaatttttgtgtgtttgacttttgattattaaatataaagattcctgcttgagattcggatattcgaccttgtacacatatgacatatgcatctttgattgtttatgcttaaacagttgccaatacacaaagagcaaaggacgttgacccatcaatagtttcaaattcttgaccacaaaaactatatgtatatttttgcaaagttggatgatgcacatttataatcaaattttgtttactttacgcaatttattttattataagttgacacatacgtgggtggataaaccttgtttatggaaatcgtcatgatatgtaaaaggttcaatgtcttgaaaagttcaggctttcataaacctcacacgcaaaaaacaccaaaatcaggtcatacattccacaagcacatgttcattgcatataaatattaaaagaaaggagtacggtttgatgaggcagagagggcaaaagaagagcaaaaaaagtcaacgagaagaaaacttgaaatgcaacggaggagcaatgagatagaggaggaggaggaacaagaagatggaaggagaagactggagagcgtgagagagagccagttggaagggagaagcagcggaacagtgtccatgaacggagaggacaacgtctatgttggggttgggaaaggagactcaagtatggaggcattgcgttgggctattgacaacctaatgacttcttcttctactcttcttttcctcatccatgtcttccctgagactcgcttcattccttacccctgtctgtatatatcctctcgtccatttgttaactttgattaaatgtgcgtccgcactcaagtgtatgtatgattcgtgtagtggggaggataacgagggagagagcaagtcaagaacaagtagaaagctttatgtctcaggaaagggaaaagagaagaactctgttgctcaagttccttcatgcctgctctgcttctaaggtcccatctctctctctttctctcttttggtgttgtttggatggttaagagtggatcaagatagttagctaacatatgagaaagtgaggaacaggtgaaggtggagacaatactggttgagagtgactcggtcgctaaggctgtacaagacctcattaccattcttaacattaggaagcttgttcttgggatcgacaagtctaatgctaggtatatatatatacacaaagatgaaccacacaactttttcagttgtcagatgacaagacaccgttctctctttatggctttttgtaggaaagcatccacaatgaaaggaaacagtgtccctgaactgataatgaggagctccgcagcagacgtgtgtgaggttaaagtcatatgccaagggaaagagataaatatggagcagacgatgatggagagcagcccagctaagtccccaatagtgcagcggcaaaagaaagatcaacctgttgacccttttgcttgcatttgctttatcagtaagcccaaaactaacagataatgtaaagagagatcaaagatgcagagacaatacatttgatgtaatgttttgtgtttggatagagcgagtaaaaaggaactctgataacaactaataaggttacgagaaacagttacaacatttttataaactacagcagcttatgcatacaaacaagcttacaattcatggcaatctataaagagcgaaacatcaacacctgatcatcttttatcacatagtcttctaaggaagaatagagtaccatatgtctaaccgtaacgctagaagaaatcaaattccaaatagttatcagaccctttctgagcattcagaaccaaacccgctgctgtcttctggcttgatggtgcctctgcaacactcacagctcctttttccagctcaaccggctttggtatttccgggggagtcgcacaccgaatcaaagcccagttcacaccttcgaagaaagggtgctgcttaacctcagtggctccccgtttgaaccccagccgctgctgcggctccttcatgagcaagccccggatgaggtctctcgctgcaaaactcaccacaggcgtttctgggaaccgcagaggctgacccaccacattgaacagtgtttgtcggtttcctgagcccttgaagggcgttctcccaaagagaagctcgtaaaggaatatcccaaaagtccaccaatccactgcactgccatgcccttcgcctttgatgatctctggggccaagtactcgtgtgtgcccacaaatgacatggaacgtgcatcggttggctcggctaccagctctggcaatggcctaacttgatttgcggtgtcattcttgggtttacggtccttcttagatttgcttgagaacaaacgtggggagaagcaagtggtggggacggtgcaagacggttgaatgcaggagggctcaatgcaagcgggctgcacacagtaaacgtttttccgtaaaggatctgactcgatggcggcagatttcactagagtcgggctgacaagacatcggagagaaaggtcaaaatcagagagcattatatgtccgtcttctcgaactagaacgttttcaggcttaagatctcgatacacaatcccaagcatgtgcaggtattccaaagctaacaatgactctgctatgtaaaatctgccacacattgaaaacaaaatctttagtgagatgagaataagaatgctctgcttcagccgaaatgagtatgtcttttgtcatctacccaatactttgaaatacgataaaatcaaaggaaatgctaatcttgacagacgaaggaaaaatgactcactttaccgcttgctcagaaaaatgtttccccggctggcgttgcctgagagtatgcaaatctcctccgggacagaattccatcaccaggcatgagaatttctcagtctcaaagtgagtgtagagggtagggagaaatggatgatccaaagactggagaatctctctttcagtctgagctcggagaagcttcttgcgactggcaagggatgtcttgtccataaccttcatagcaaagtaacacttagtcccgctcagctcagagagataaacactcccgatgtccccgcagcctaaccgcttaaggagcctgaaatgactaagacctaaaagcccatcacgaaccctaacagcctggattgcttcccatcttaagtcattggccttgtggggtttgttgacagtgctactaaagctgctgcagctactctcgtcactcacatcactgcttgtgcttcctctgcagatactgctcttgccactctccatgaaatcaaggcggccacttagcttggcacttccactagtcttgccaagactgctcgtaccatcactcaatttggctgaagcagagctggtcttgacgctgccaaagccagatgttttcttttcatcaatggtcaatgaatctacatgctcaagaacagtggatagggagctgaaatcgggtttacaaacagccgggtcgctagatcgcttcctaaaagactctggcaaccgtttactctccggaattccaacagctcttgggtttgttactgatctttgtaattgcatcggctcaaaagtctcggctttggctgacttagtactactattcgaagaggagcgcttctgagcttcgacttcagctccatgaccactgggtttacgagtggacgccatcggacacaaaattaattatctttagctaacgggaaagacccatattccttgaaaccctagtaagatcatacacacagggcacagagatcaaacagcagaaaactaatgtctttgatgttgaagtaaaaaagcagatcccaaatgggagaaacgtgatttcagatggaagaagatctaaaatgagaagaataagaggagagagagatctggaaacaaggtaaaggcagtaactttagggagaaaccctagaaaagaagagagaggaggaaggagatagataccttgggtgtggattgaagcagagaagattcgaaaagtagaaatggttgctgcttcaattacatgcactcttagattgagtgagtgatcaacttctcagcttcacctctgtttgctctacacacttctcatttcgccggatacgcacgacaagaacccggaagaaagggggaggatccagtcacagccaacaacacctttcgctttgtttttgtttataatagtaaaaaataatggactttaatgccatctcgatttcaaacaaaaaaaaaaaaaaaaaagtgagaaagaatagttaattcctgaatttcttagaaaagacaaatgttatgcaaatgatgatagattatgttttaatttcacggtgcagacaaactagacatctgtgttagtaaagcatcaatggctttgagaagaaagagagaacaaggcatgctaaaagcaaatattaggacaagtatttgatttgtactctcttccctcattatgttcctttgcaaagacacagcagaaacatccaaagtgaagatgagtttcatcatcacttgcaggggagcggaatattcgctgacaatcacatcacatgccgtttggattggaacctttttttattaacttaagtcgagagctctgtgttcctcgatttacatttttggtttctattatcaatacgcatcacatgtttctggactaagcagggctataaaggctaatactagtaataaacaatggaaccagcctgtgcttttggactttccccatgataatcttactatttgcttattaccattctttcaactcttcatcgacttctcaaatcctttattcagcaacataacaaaatgaaatcatgttttctgatgcttcatcagattactaaccaagacaaagaatcagaaaaatttcatcttgcaacaggacgtaaatcactgttccaaagtgtaaagcaagatgatgaatgatgatgcccttacttactagggggactccatcagttttatgatatcagagactgtgcttgtgtaatagtctggttctatcttgttgcccttatctagtagattagattcacttgtcacccctgttttgacatacccaatcactgtcagttcaccccaacactgtccagatatcgacttgtattggcttgcaaaaactcaaaagagtatcaaacagttaatgataatgacctgttaggacgaggagagttttgcagccagcattctgcccaaacaagatatcagtatctagcctatcacctaccatgcacattcttgacgtttccgtcccaaatctgcaacacaagaaatacacctctttatcactctatcctgtataatgcacactatgaactgagacaggctttcatgtgcacatacttttgtagcagaaagtccatcatgaaagtagatggtttcccaacaactattggttctctttcagtcgatccacacatggcagcaaccatacacccagcacctagaattacgagtaagaatttgatgctgtgacaaccaagctgctattctgggcaatgaggcctaagagtctagtgaccataccaggccactcttgcagatccgtcatatgtcctactgcatcacggttggtcgcaatgaagagacatcccggattctcgcgtacacagagagtcccgtacctgccatttccgttattgtgttagccaaaactctcagaaactcaattaaggcaaccgacttgcatgcaatagtaatccatcttactgaagcttatagtagttaatgttggggtctagtccaactacaactgctcccacctgtcacaggaagtcatgaagaaatatacaacattagaacctagagcaaaagagaataagaaaaacgcaagattggagaaggaatcaaagtcttatggcccattacacttttatcatgttcaaagagagagtttgatttccattgtgccttcttttcaccatcttcctgcatggaagcaaatactgcttcagatagacagaggaattcaaattatacaattttggttggtttaaaaacacaggagcagtaagtatcaaacatcttgtacaatgatatgagtcctcagagtgaccaaaacatgacctgatcaaaacatataacaaaaggaagactacttacaggaccaccaagacctgtaaaaccggcaatctgcagctcctcaagaacaccctctccaccaatcacataaacctacaaaagcaaacacgaaaggaaaaaaaagtgagaaaaagatgacgatagagagacataagccaatgtgtcagtcgaagtagaaccttcttgtccttaggaaagttattgactttgagatacatagctgccgcaaatgacgaagagaagatctcatccttccaaagtaatcacatttttttgttttagttttaatggtaatcacaagtaatacgaagaaggagaactcaaagtttacctgagtaatagaagtgacacccaaagatcggaacttttcagcgtattgcctcctcgattttacggaattgttggtcacaaagacaacatttttaccctgaaaatcgcaaaagatcagagagagagagactgaaaaggaatagagagtggggaaaagggaaagcaccttagaacggataaggtcgagagtttgggagacgccatcgatgagcgtttcacccttccatataacacctgaatcgaatcatcatccatcatcagagtagtaactaaagaggataacaatcgaatggaagaaagtagaatctaccatcgcagtcgaagaggaacgtatcgacagagtcaaagagagatttgaagttactggaggagagaagctgaggcgccattggaggagtgtcttcttcttcttcttctgggaattgatcactctggtaaagcacaattggcacgtccaaaacgacaccgttccatcgaaagaggccacattgtgattggtgagcccaattaggaaggcctattttactaatgttgaagcacatgttgtactataaaaaaacagagtttattatctgtttctttggcttgacatgacaaatgtacaactgggagagaaagtcagtccgattgtgttggggatgacgatggcaaaagtagtaaataaggaagaaacaggaggggcgttttcgggagaagaaggaggaatatgagtgtgagttgttgttgtaggaatctgggcaagacaataaaaaaggcaataccttcacatcatttgcatctgagaagtcttggtgggagtctctatcgtcgtcgtatccaaagctcttcaatggagaccgatctcaagtcaacctttctcaacgtttattctgttctcaagtctgaccttcttcatgacccttccttcgaattcaccaatgaatctcgtctctgggttgatcgggtatctctctctcatcagtcagatcccacatatatatccttcgaatgctggctgattctctctttctttgcagatgctggactacaatgtacgtggaggtcagacttgtctacaacagcctctttctctctctctctctcgcttttcatcgatctcctttttttttctcacacttacttcttcttctccagggaaactcaatcggggtctctctgttgttgacagtttcaaacttttgaagcaaggcaatgatttgactgagcaagaggttttcctctcttgtgctctcggttggtgcattgaatgggtataccaatgataaagacttatcctttcaatctctattagtaatagatactctcctctctctctctttatgtcgctatcactcatcatattcattatctttgcagctccaagcttatttccttgtgcttgatgatattatggataactctgtcactcgccgtggtcaaccttgctggttcagagttcctcaggtaaagttttcatattttttgtcacgctgcagtccactagactattctaacacaatgttacaggttggtatggttgccatcaatgatgggattctacttcgcaatcacatccacaggattctcaaaaagcatttccgtgataagccttactatgttgaccttgttgatttgtttaatgaggtaatctgttttggcagatctactattctcttttccacttttgatattttatcctcagtctattattccatttgctgtctaggttgagttgcaaacagcttgtggccagatgatagatttgatcaccacctttgaaggagaaaaggatttggccaagtactcattgtcaatgtgagtcaactgtgggcattgtctaaattttagatacggtttcttctgatggttgattagatgaaaggcagtattctgacctgatgcaatggttttcaacttgcagccaccgtcgtattgtccagtacaaaacggcttattactcattttatctccctgtgagtatggattctcttcttccctagtcatatttggggtcaaaaacaatcatgttattccttttgtctccatcattgcaattgtagatcccgtgacaagctgtgtttttctattcaggttgcttgtgcgttgcttatggccggcgaaaatttggaaaaccatattgatgtgaagaatgttcttgttgacatgggaatctacttccaagtgcaggtagattgctgttaagtattcatgagagctatatgataggtagtgttgggatgttgataaccattcttttgtgtaggatgattatctggattgttttgctgatcccgagacgcttggcaaggtttcactcgtgctaacacttggtttctcaggctgatgtgaatgtattcacttggttcagcatattggttttttataatgcagataggaacagatatagaagatttcaaatgctcgtggttggtggttaaggcattagagcgctgcagcgaagaacaaactaagatattatatgtaagaaccatatcatcttgatcaaaaaggtttgtatcctgtttggaacctgaaacatgttttgttctgatttactaggagaactatggtaaacccgacccatcgaacgttgctaaagtgaaggatctctacaaagagctggatcttgaggtttgtagcgaacctcagagatatgatgttgtaatacacaactaacatttttgctaattggacatggtttgatctgaacatgatagggagttttcatggagtatgagagcaaaagctacgagaagctgactggagcgattgagggacaccaaagtaaagcaatccaagcagtgctaaaatccttcttggctaagatctacaagaggcagaagtagtagagacagacaaacataagtctcagccctcaaaaatttcctgttatgtctttgattcttggttggtgatttgtgtaattctgttaagtgctctgattttcagggggaataataaacctgcctcacttttattcttgtgttacaattgtatttgtttcatgactatgatcttcttctttcatcagttatatgaatttgagattcttgttggttgatgcctgtgactacatacataatattgaccaacagaagaagataactcgatacatacattgattttataacactgagatttaagcaactcttcttcttctctaatgcctacattccattccaaaggcaagaaaataaagcttcaagcgcaggcctcgacacgtcaccttgtcgcttaatttaatacaacaactagagtttatttataaataatggctgtgaagggtaaaagcgtcttatcctcaacgaccaccatcatcatccagctagcagcaattggtttttcactcacacactagaaacaagaaaaagaaagatgggagatttaatggctcggtctctctcttgatctgacgacgacgatgatggtgaagcttcgcaatcttgttcttttcttcatgctcctcaccgtcgttgctcatatccttctctacaccgatcccgctgcctccttcaagacccccttttgtcagtagttctctctctctttctcaattctccgatttgaaatttgcttcttatcatcttctttgtttcgttctgtagctaaacgcgatttcctcgaggacgtaaccgccttggtccgtatcttcttccctctatctctctctctcttttgatcttcccttccattgcgtcacattgtgtgtttccttttcagactttcaattccgatgagaatcgtttgaatcttcttcctcgggtaccttttctttttccagttacttattgattcgcctcactcagatcttagctcgtttcttcactttcttcttcacattcatctttaggaatctcccgctgtgctcagaggaggactcgtcggtgctgtctattccgataagaattcacggcggctaggtaacttcaattctctcactcgcctctctctgtgatgtcttccttacttgacttgattattttttttaacattctcagaccaattgtctgctcgagttctttccgccaccgacgatgatactcactcacatactgacatttccatcaaacaagtcactcatgatgcagcctcagactcgcatattaatagggtacgtgttttccggagaatcagattggatattccctaagttgattggctccagatttgaatttgatgcttggtaatagtatatatttggatccttgtaggaaaatatgcatgttcaattgacccaacaaacctctgaaaaagttgatgagcaaccagagcctaatgcttttggagctaagaaagatactggaaacgtgttgatgcctgatgctcaagtgaggcatcttaaagatcagcttattagggcaaaggtttatctttcccttccatctgcaaaggccaatgctcattttgtgagagagcttcgactccgtattaaagaagttcaacgggcacttgcagatgcctccaaggattcggatctgccaaagacgtaagtgtttctcacctcttgaaatatatgtttcttcctctttaactgatatttctctgccatttttttgaaccccagtgctatagaaaagctaaaagcaatggagcaaacactggccaaaggcaagcagatccaagatgactgttctacagtggtcaagaagctacgtgctatgctccactccgcagatgagcagctacgggtccataagaagcaaaccatgtttttgactcaattgactgctaagaccattcctaaaggacttcactgccttcctctgcgcctcactacagactattatgctttaaattcatctgaacaacaatttccaaatcaggagaaactagaagatactcagctgtatcactatgcccttttctctgataatgttttggctacgtcagttgttgttaactctaccataaccaatgcaaaggtaagaattaactttcttcttttgtttgaacatgtaactgtgtttctttctgttaaacttacggtcttaatggtttattggcagcatcccttaaagcatgtcttccacatcgtcacagacagactcaattatgcggcaatgaggatgtggttcctggacaatccacctggcaaagccaccatccaggttcagaatgttgaagaatttacatggctgaattcaagctacagtcccgttctcaaacagcttagttctagatcgatgatagattattacttcagagcccaccatacaaattcagacaccaacttgaagttccggaatccaaaatacttatcgatccttaatcatcttcgtttttacttgcctgagatctttcccaagctcagcaaagtgctcttcttggatgatgatatagttgtgcagaaggacctttctggtctttggtcagttgatctgaaaggtaatgttaacggtgctgtagagacgtgtggggaaagctttcatcgctttgaccgttatctgaacttctcaaatccactcatttccaagaactttgaccctcgagcttgtggttgggcgtatggtatgaatgtctttgatctggatgaatggaagaggcaaaacatcacagaagtttatcatcgatggcaggatctggtatgcagaaaatatatatatgctaggtcgcatctgttttgatttcaagaatgtttgctaatcatatacacgaacgattttaaactgcagaatcaagaccgagaattgtggaagctagggacgttgccgcctggtctaatcacattttggagacgaacatatccgctagaccggaaatggcacatactagggcttggatacaacccgagtgtgaaccaaagggatattgagagggcagccgtgatacactataatggcaacctcaaaccatggctagagattgggattccaagatacagaggcttctggtcaaagcatgtagactatgagcacgtttatctcagagaatgcaacatcaatccttagaattagagtctgttgtgagggcaatattatacgtttataatctgacgagatgatcattacatgaaattgtatatgtcacggtaaaaggagttccaataggcacgaccgatgttattattgcaacatatatatcaacaagaggaatgacaacgaaacaatgaaacaactacttttcgtattcctttttgtcgctgtttatgtaaagcaagtgacaattgacataggtctataggagactttagactttaatcaaatttgccaaagagcaatacaacataaatagtcaagccgattatcgaaccagagtagcatgaatattagcccagtgaagacgaaaagagattcgaatcggaattacgtgaatgtgatttcgaatgactctgacaatacgttttgacttgtgtagtttattgtatattcagtttaactctgtcacccgccgtgttcaaccttgctggttcagagttccacaggtaagtttttcataattttctcacgctgcagtccacttgagtagtactctaacacaatgttacaggttggtatggttgccatcaacgatgggattctacttcgtaatcacatccacaggattctcaaagcatttccgtgaaaagccttactatcttgacctagttgatttgttaggatatgaaattcactgatccataaaaaaaaacataggggtacgtttagaagaatacataaagtatagggactgaagctgcaaatttatgttctcagtagatgttcgatctttggacagaattgaagaaaggagaaaccctagactgagtctggttacttgaaggggatcatgtgaatacgtcgactggtaaagaaagaaagattgctgctttttagatttagattcgagaatgtatggaagatctggtcttgacaggtttaagaagtcccaaacttcggaacccttctctgtatcagcaaatcctcctccggtggtacaacaacatctgtctccggaggcattgtcggggcaaaaaactcagattggagctggtcaatcaaactggcatccccctgattgggcgattgagcctcgtgccggtgtctactctctggaagttgtgaaagacggccagatccttgatcggattcatctagatagacgaaggcatatcttcgggagacaacatcagacttgtgattttgtccttgatcatcagtctgtttcccgccagcatgccgcagttgttcctcacaagaatggcaggtttgtcatcgctactcaattctctcatcacagctttggccactgttgacatgagtcttttttattttttgtagcatctttgtgattgacttgggatcagctcatggtacgtttgttgcaaatgagaggttgactaaagatactcctgtagagcttgaagtgggtcaatccttacgatttgctgcctccacaagaatctaccttctgagaaagaacagtgaggctctcttttctcgccctccacctccagctgagattaagcttcctccacctcctgatgcttctgatgaggaagctgttgttgcttacaataccttgctgaatcgatatggtttaagcaatggagaatctggtggtatgttagggaaaaggaaagagaagaccggatcagaagcgggagtggctaagaggatgaagaaagtgagagtgagcttcagggatcaactaggaggagagctggctgagattgttggcatgtctgatggagcagacgtggaaacagagcctggtcctataaatgtcaaagaaggaagcctcgttgggaaatatgaatcactggtgcgagtgacactcatacccaaaggcaaagtgaaggaagagaaagcctttacaggaggaacaagaggaggtgtaacagatcgactccaggaagctatgaatatgttgaaacggggtccaaaaacagggatttacgatgacctttacggtggtgactcacttgccaaggctgttggtacgtcatgggcttctgtgagtcaaccagcagctgaaactgaatgtggaggggttggtgaagaagatgataacgacgatctgtttggtgactaactgattttgaacactgagattcctttaagtaactcttcttcttctctaatgcctacattccattccaaaggcattggtatgttgtttcctctttgtctatccaatggctgcagcaagaaaagagagcagctctaagcccaggcccattgtcttgtgttataagtaagaaccctgaaatttgatatgagcttgagcctggtcagtggtcattctagttgtgggtcttaacaggagatgcattacatagatagtcattacaaatagtgtggagagtagagagtagggccaatgcaaatggagtgcatttgattagaccactactgacttacagattctctcctcaaggcagaccaattccatcagaagaggacatttgtactcaaatacctctcctctcattctttttcacttttgcctttttgcattattaaaacagcacactaatgatgtgggttgacttccctctcccccacaaaaacagagattccatggggggaaatggacaacaagtaaaacacttgtaaaaatggtaatctgcctctgatgctttaagatatgatttggggatcaatgcatctttgctttgggatttgctttgtgacagttagtataaagaagagagaagctgaatgtgctgcaaccaaattaaaactctcttttgagttaagcctatatccaactcctactcttcctagtgtggtccattgtatttatcataagagtaaactcgcttgtaataaattatagtagggaaaggtggaagacccacttttgtttctcactttctttctgtttggtgagaagttgttttccttatgcaaaagatggaatgcatgaaggacacttgtgtctggctttttatttattttggttgtggatactttcatgatatactttacgacctcaaccctttaataccacacaatctacctccattcatcttttctcttctcttaattttcaccttatctcccaacgagaccatagaggagttactgactccaacttatagctactagctatgctgcgtaactctcttaaacactaccttggcacctatgacaaatatgttagtgagccaacttttctggctttgattttcaaaccaaacaagtatgaaggaaatacatatcagacaccatttggagacttgagtccatgcggggagcaacaagtgacgaggccgggacccttgttgccattcaactctctctctctcttgggatttaatttcactaacactttatgtcaatttgatcattaccactttcacatctctctctcttctccttcttcttcttcttcttcttcctccctcatatcaacctttgagcacaccagttttcatggtaaaatcaatcatccttttgctttatctttttcgtttttttttctctctcttttggttttcagaattgtatcataaacagactacatgtgagtttgtatcatttaggaatacatataataaaatttcagcttcatcaatatgtaattatcttcctgtgtctttcccacttttacctaaagatttgatcactttctcatcatatgtatatatatattcctcttgaacgcagagaagtctaggatgaagttcatgaaaatcggaacaaagcctgacactttctacactcaagaggcttcaaggttgttccttgatctctttgcctctaaatttcccaaattccatttctctgacaaaatttttacactgcaggattttgataacagacacacctaacgatcttgttattagaatcaacaacaccacttatcatctccacagggtatatatctcgattgactctcttatcatagcagcacacacatatatgtatgttaatagtggtttccatctttgtctgcagtcttgtcttgttccaaaatgtgggctgttgcgaaggctttgcactgatttagaggagtctgatactgttaccatagagctgaatgacatacctggtggagccgatgcttttgagttgtgtgctaagttctgctatgatatcacaatcaacctcagtgctcataaccttgtgaatgctctctgtgcctccaagtttcttcggatgtctgattccgttgacaagggaaatctgttaccaaagcttgaagcttttttccactcctgcattctccaaggctggaaggactccattgtcactttgcagtccactaccaaattgccagaatggtgtgaaaatcttggaatcgtcagaaagtgtatagattcaattgtggagaagatcctcactccaacttcagaggtctcctggtctcatacatacaccagaccaggctacgcgaagagacagcatcactctgttccaagagactggtggacggaagacatatcagacctcgacttggacttattccgctgtgtcatcacagcagccaggtcaaccttcacgttgccacctcagctcattggtgaagctttgcatgtctacacttgccgttggttaccatacttcaaatcaaacagccattcaggtttctcagttaaagaaaacgaagcagcactggaaaggcatcggcgtcttgttaacacagttgtgaatatgattcctgcagataaagggtcggtttctgagggttttctgctgagacttgttagcatagcgagttatgtgagagcatctctcacaacaaagactgagttgattagaaaatctagtctgcaactcgaggaggcaactcttgaagacctcttgttgccttcacactcatcctctcatctccatcgctacgataccgacttggttgctacagttcttgagagttttttaatgctctggagaagacagtcttctgcgcatctttctagtaacaacactcaattgctgcattcaatcaggaaggtggcaaagcttattgactcctatcttcaggcagtcgcacaagatgtccatatgccagtttccaaatttgtgtctctttctgaggcagtgcccgacattgcacgccagagccatgacagactttacaaagcgatcaacatatttctcaaggtatcagatgctctggcctgctcaagggcaactagctatggttgagagtctcaccaacctactttcagaaatcatacattttgcatacagtacttgaaactgataaaacatttgtaacatggcaggtgcatcccgagataagcaaagaagagaaaaaacgactatgcagaagtcttgactgccagaaattgtctgcacaagtacgtgcacacgctgtgaaaaatgagaggatgccattaagaacggtcgtccaagcactcttcttcgaccaagagagcggttccaagggagcatcaagtcgatcagagagccaagaactcttcacaagaggtaaagagacacccactgatgaacatagcatgatgcacaagcttcacctaggtccagcttctacagggaaagctaagaacgtgcttgaagagggatgcaaaagaggagaagagaaaaccagatccagtacagatcctaagaagatagtgtggaaaggaacagggtcagaacataagcatcatataagtagagacaggtagtggggactatacgtcttaggccacagagattcagtttcttgtttgcactcgccagatttctggttcttttatttttctttctaaaaagaattgatgatgattgtagatggttaatgtaaacccagtggcacgatctgtattaatacaatgcagagctcaagctcctgctcaaccactctctcttatgtgcttaagaaaacggttcagcaacaagcatgagccatgggataatatgtagtaatgtgcttattaggataaataggttcaaggatcacatactttgtttcaaccttttttttcctagaaatcaagcattgttcccttgttgacaattactgttatttagataaggacataagattgccttgatagtttcattgtatacataataagattattacttgcttacaagattttcgcctcacgctcgttctcagggtgattaacccttaacgttcgtttcaaaatcaggctggtttgtgactgagcgcacccaggcccacttgtggtcacgcgtgtttacttggttcttagtctgtgccacctcctctaaggggatataagcatagttcccattgatcgggccagggacgaaccctgtgtaaccagccatgactccatggatagccgagtgggccaagagtgtacaatacaagttatccgtagcatttgcaggtacagctcttatcatgtaagtcggatcgatatacttgacagtgaagagctcgtctggatgctctcgctcccaccaggccttgagcacggacttaaaccagactcccacatccaagaaaactgcgttgccagattcatccctctcttgtttctgtgattcatttcttgggatcatctcttgacctgccccttcagccacaacaagaacagcatgcccacgttcttttagtctcttctccaaaaactcaaagagcccacctttgccttcaaggtagaagtccatctcagggatcaaacaacagtccacatcacggctgctaagagtggcatgtagagcaatgtgaccagtacttctgcccataagcttcacaagtccaatgccattgactgcactctcggcctccacgtgagcagcagatatagcctcctgagccatctctacagccgtttgaaagccaaatgatctatcaatgatgccgacatcgttgtctacggttttgggaataaccgtgattcccacctccagtttcctgaggctgatttccttgaagatctcaacagccccacgcattgtgccgtctcctcctattatatacacctgacgagggcaaaagaggaaacatcaactttgaacttccctatgataatgttacagaacaagtaaaaatgaatcagggaagagacctggttataaccgttgagatgaatggcatcgacgatcttttggagatggaagccacctcgagaagtggcgaggacagtgccacccttcttgtgccaatcatgaaccgccttgggatctaacttgacggctttcatggaataaaagcctctgtaaccagctggtatcccatatatctctctcacaccgtacagctcccaaagacccaccacgagttctcttatgactgtgttcatgccagggcacagcccaccgcacgtaacgatcgccgccttgacagctgatggctcgtacatgatctcacggcgaggcccagccctgtggtaggccacgcgtgattgggagtgggcggagtggtcgtaggcgacctgggcgaggatgacgtcagaaggagtgatgtagaagccattggaggggtggaagtagggattatcttccagtggattacgtcggtgacggaggccggagagagatgggagcttcctgatgctagtttcggcggccattcttcggtgatgagtgacaacatcggcaaatttagttagggtaaaagaatcggaggaggcggcggagacgtggcaaacgcagtcgcgcaggcctcgacacgtcacctagtcgctttatttaatacaactagagtttgttttatttaatacagctatgagttttttacccgcgcaagggaaagataatttcaccaaaagaaacataaattacagagattaaacatacactttaacaagtttaatatatgccgaaattattataaacgatcaaacataacgtgtttagtacaaacgatttatctcttactatataactcaaaataataccaaaatcatcaaacattttgatagcactatacagaaacactcaatcacaaaaccaacatttttcaaaaacaagcaaagttcatcaacgatcttttgctcatgagcagatctgagggcgctttttaggcgataattcgtatcattatctccacctccggttggcctcacgccgtcggtgagaactctcacctcctccgtttctctccgattcaaagtgcctactttttctgttctgcagcggcagcgtttgctgcggcgttgcttgcctgtcccggagtcatcttcatatctctctctctccatggcgaagaagaaatctgtgaagaagtctccgtcctcaatttcaaaagggaagaagtcgaattcaaagctggctcttcgttctgtctctagatctactattcccatggcttcggatctttcgaccaagctaagtacttcgccaaatttagttgagaattcaggcattgtcctgccatctccttattcgatgaacgccatcgacaaccaattgactgtcccctctatagtcttggttgctgactcagatctgattgttgataccactgttgtcgactcagagcttattattgtttcgccggaagatgttgacgccactgtgaaagttgtaattccaactgagccagtcgcgaccattgacgaggcaaaccagaaagatgatgaaccgattaaaatcaatcattccattcctgtgaatgttgcgtctttgccgaacacagagaccagaaagactgaaactaaggatggatctgacttatgggttaatctcgtaaaaggatcctccaaaccgttacagaaacaaggtacaactttcacgcttgattctggtgaagcctgcatcaatattccaaactatatcattgagcgaaacaaaaaagcgtgggattgctttgttctgggtcagttctattctgatcccccagctcagggcacaatccacaatattgtgaatggtatttggagcaagaattttagagatattgttgtgtcaaagatggcaggaaatgcgtttctctttcgcattccaaactcctcaactcgaagtcgagttttgaatcagcgcctttggcagatagatggccaaactatgttcgttgcaaaatgggatccaggagttgtacctgcaaaaccagaattgacgtcagctccgatctggcttgaactaagaaatgttccgcttcaagtttttcatgaagaagggcttcagcgcatagcgggtcttgtaggggatcctaaattcttgcacccggctactgctaataaaactaatcttgaagtggccagagttttcactctcattgaccctcgtaagccgcttcctgaagcggtgaatgtccaattcgattcgggtgcggtgcagaggatcttagtttcaagtccatggatgccgcctgtttgtgggttctgcaaagcaattgggcatagcttgaggcactgcaaaacagcccctattacttgccaagagtgtctttcctcttctcactcttcgcttcaatgtccaaagcagaaaactaatggcccgaaaaagaaaagaagttctagcagaagacggtctagatcgccgaaaaaggcctctgttccgaagcaagatgctgctccagtccttgttcaagatacctctgcttccactaaaggtaaagaggtctctggcaagatttgggctgttaagaataatggttcatctcagccgtctacaaaggacgtgagtacttcagggtcacttttggctcagtcttctgggctgaatcttggtcttggaaagcttcaggtaggtgaacctagtattatcaatctggatggtaacatttcaaattctggtaataaggtttcgggtcagcggtctgattctaattcagaagtggatgaagattcttctgatgtcgtttcatctgatccggaagaagaggtttttataaaggtgttgtcaaagagacaacgtagaagcattcgaggcaagagcctcaaaaccccagcttaagtatgtgtactaagctcttttgttggaatgtccgcggttttaatattttttctcaccgacgcggttttaaaaattggttccaagtaaataaaccactttttggcggtattatagagactcatgttaaacagccaaaggagaagaagttcatcaacgatcttttgccgggctggtcttttgctgagaattatcaattctctgttttgggaaaaatttgggttgtttgggatccgagtgtgcaggtggttgttattgcgatatcacttcaaatgattacttgtgaagtcttgctccctggctctacggcctggatggttgtttctattgtttatgcatcaaatgatgaaggtcttagaaaagatctctgggaagaaatggcacagcttgctatttcgtctactgttattggattgccttggattgttcttggggacttcaaccaaatcttaaatacttgggatcattcaaatgaagctagtcagaaagttgatagaagaatccgtgatttcagaaattgtttacttgactctgagctgcaggatctactctacaaaggaagcactttcacttggtggaacaaaagtgattctagacctgtggcgaaaaagattgacaggatcttagtcaatgacaattggctttctctttttccttcagcttatgctttgtttggagagccagatttctcggaccacgctgcttgtggtgttgttatggatggtttgggccagaaggatagaagacctttcagattcttcaatcttcttttgcagaaccctggtttaatccctttaattgctgagtattggttttctctcagtgttactggttctgcaatgttccgggtttccaagaagttgaaactcctaaagccgcacattaaaacgttcagtagggataattactcagatttagagaagagagttcttgaagctcacgagattgtgcttctctgccagaggaatactctaaattccccctcagttcttcacgcttctcttgagttggaagccactaggaaatggctcattctggttcgcgctgaggaaagtttcttttgtcaaaaatcgagaataacttggctcttggagggtgatagtaactctgcttactttcataaaatggctgacatgagaaatctcttaacactattcactttctgtttgatgatagtggggaaagaattgagtcccaacaagccattaaagacattgttgtgacttctttgagtctttacttaatgataaccaaggtgagcagtctttggagcagagtgatatgaacttattactttcttatcgctgctctccggaccagattagagatttggatgcctcattctcagatttggaaattcaagaggctttcttctctttgccaaggaataaaacctgcgggcctgatggctactcttccgaatttttcaaaggtgcttggtctattgtgggtcctgaagttattgatgctgttcaggaattcttcagatcaggtcaactactgaaacaatggaatgcaacttcactggtccttattccaaaaatccctaatgcttctcgtatgactgacttcgggcctatatcatgtcttaatatcttgtacaaagttattgcaaggctattgacatcgagacttaaaatcttattgtatcaagtcatctctccttctcagtctgcttttttgccaggtcgtcttcttgctgaaaacgttctgcttgcaactgaaattgtgcatgggtataattggagaagcatagagcctcgtggtatgcttaaggttgatcttaggaaagcgtttgacagtgtaagatgggactttatcatctctgcccttcgcgctcttctagttcctgaaaaattcataaactggattcaccaatgcatctctactcctacgttctctatatctgttaatggagcttctgggggtttctttaaaagcagtaagggtttgagacaaggtgaccctttatctccttatctttttgttctcgcaatggaggttttctcctgccttctgaagtccacatttgatgctggttttgttcactatcatcctaaaacctctgagcttcaaatatcacatttaatgtttgctgacgacgtcatggttttttttgatggtggaagttcttcccttcatggtatttcagaagctcttgatgactttgcttcttggtcagggcttacagtgaacaaagataagacgcacctttatttggccgccactgatcaatctgaagctttggccatctctcgttacggttttcctacaagctctcttcctatcaggtacctagggctgcctcttatgtgtaggaaactcaagattttggaatacgagccgctcatggagaagttgattaagagattcaggtcttgggcagtaaagagcctttctttcgccggtcgggtccaattaattgcttaagtcatcacgggtttggttaatttctggatgtctaccttcttgctgccattgggatgtattaaaagaattgaatcgatgtgctcgagatttttgtggtctggcaacattgatgtaggtaaaggtgttaagattgcctggtcgggtgtgtgcttatcaaaaaaagaaggaggtgttggactgcgcagattttctatgtggaatagaactttatgcctccgttttatgtggctgttatttgctaataatgggagtctttgggcctcttggcataagtcccagcacatcaaaaacaagtctttttgggaattagaggagaataccagggactcttggacatggagggcgcttctccgtctgcggcctttgggagaaaaattcttattgactcacgttcgcaacggacataaggcctctttctggtatgataactggactcctttcggtcccttaatcaaatttttgggtcttgacggtcctagatctcttcgcatccctatttctgcaaaggtcaatgaagcatgttgcagatcaggttggctgctcccttcgccaagatctgaaaatgctttactgcttcacacgcatttaactactcttaccttgccaagccttttgacttgaggatgctgattgtagaggtttctcttcttctaaaacttgggaggtccttcgacctagggagagtgaaaaacgatgggctagctctgtctggttcaaaggagctgtcccaaaacacgccttcaatatgtgggtaaccacgttaaacagactcccaacccgacaaagattggcttcttggggagtcatttcttctgccgattgttgtctctgttcctcattgcctgaaacccgtgaccaccttctgctggtgtgcgactactcatctcaaatttggtctctgatattcgcgaggttaactccctctcatcgcctcatatgtacttgggatgagcttctctcttggactagactttccaccaaccaagctccgtctttgctccgtaaagttgctgctcaagctgttgtgtaccacatttggcgtcaaagaaacaatgtgttacataatgatcacaggatccatccttctgctctctttaagatgattgatcgagaaatccgcaacaccatcacgggaagacgctctcggaagcgttggagaccactcatgcttctttggatcagataatttctatcatatttttcaaatattgtaaccttgtttttatttctttttgccaaggttactctagattaggtattgcttttgtaatacttccacttcatttttaatgatatttacaagtttagcaaaaaaaaaaaccccaacattttcttaacatttagatattctacgaaatgattccatataaaattgtatgggtttcttaaatttgtctttcacctcaagcatagaccttgtttcttctagcatgttctccagttgttcaacattggttaacagggttacaatctcgtggtgaggtgaacttgcgtcgctgacttgttcatgatgttgtggcattggttcattcccgacctcttggaattactgaacctctgcaaatggaattttataaagagtcacattaaacatcataatcattgttcatatgatgttattagttgattccaacatgataatgcaggcttataacaagaaataagtatgtaacatctgaaaaaataatgcaactttggatacaatccgcaacaaaaataataatcagaatatctacctttttcaagagcatcttgcaaggccaagaaaccgtcgatggcttctgttaatgaatccagttcctcggagtaacgattcgtcgtgtttatcgactctcctccttctcctctgattatcatttctctaaatccataccagctgaaaaaccaatccctgccacaaacctagaattataaccactactccctagtatatcaaatcatagaaatcaatctctcgtagatcagtgatcacatctccaaattggaacaaattttcacaaccaaattcttcggataatcaaaaacttaacatgttcactattcgcgaagattttttttttttttttaataagatttatcctttaaatcccactattaacaaaaaatctcattttttctttatttttgagattttctttaaggacctcatacctttagagaaccatgagagatataagatattgttagagttggacttagaatccgtccgtgtatattactggtttggattcggatttggttttgcttttttgattagtttctgttattttcttggatccgaacattagcctaagagtagggagttccttcccataaaagccgataaattgggacccatcgctaaagccacgtgaccacgattcctccgccagctcgcattgtctctccttgtggacctttctccaaaagtcgtccgtgttttttttctcttttttttttcttttctaattctgtgcaactgtgcattaagctttcagaaaaaaagaatgacactttttgtcaacgatcgtagccacaatttgcattcactgtttgttcactttcatatctaacatttctttaatttctcttttagtttttcactgcagtaattatttagttttttcatctgaatataaatataaatatacatatataaaaataagaaaataatatatatcatagccgtctttgcttcataattacgtcaacaacccatttttttggcggtgtctgttttcttacctaatcatatttaaataccaaactgacactataaacaattgtagtttagatgtaaacctttaaaccaatccgttggtcatagcttgtgagacataactccacaaaggtattgttagttgcaaatataaggaaaacgaattaaacttaaaacttacagttgtaatttaggtgaacacataattgctaaataaactctaaaaggaatgtattcaatcaaacattttaggtgatttgtatttaaataacaaattttatgttattcaattatggatttttgaaaatctcattagattagattctaaaatctatttaaaaatcattaaaaacattttaagaattaaatttttaatgactataagagacttaagtgaattttagtggatttccttagttaaaaatacagaatttgaaatttcatgagtttagatagaattttagaaaattttacaataaatcataacaacttcttaaaatttatccaaattcttgaaaattgtataaaaattcaaaataactcaaatcatttaaaatataagattgaatacgatctcctaaaactcttttatgtaataaattttacaatcatttggtatatgtgtacattacaacggcacatgcaataaagtaaagaatttgacctaattttctctctttgcttaaatattctcctccaccactttttgtcagaagtcacacttgaaagatagaaagagagaggagaggttagaaccgggaagagtgaaaggaaagtcacgtcggtccgttttataagaaaagaaagagatagtaaggactaaagagtgtagcctaagggaagttaaaacagagtgttattgtcgttgcggttaagctctctcctcgataaagttttttttttcttttacaaaattccatttctaccctttccttttttccaagtctctctctctgtccaaacacatcatcaaaccacatttgtctgtctgcctgcaacttcactgtctctctctctctctttctctcttcttcgattctagattacttcttcttcttcttccaatggaatctacgccgccaccggatgattgttccgttaaggttgctgttcacatcagaccactcatcggcgacgaaaggattcaaggttgtcaagattgtgtcactgtcgttaccggtaaaccacaggtacagttgttttttcttcttcttcttccagtttcgttaaatgttaaagctctcttcttttgttctgtctgattaatctgaacttgtagaagaataatcttttttaggtgaaatatatttcaactgattagcttttttttttttttaagcggaattgtctctccctgagatctagatctcgcgacgtttttagaatcagtgactttttatcagtgtttactttatgcatgtttgaccaagtacttctgtttttagtattattgcatcattaatatcttttcctttattaattagctcactaatcaattgtttttgttgctaattctgatcactgacctccttaccaaaaaaaattctgatcactgacctttttactcaatatgtgaattggaattggggttttggaatatatataagttttggcccatgcttgttaaattgttagttagaaatttttattgtaatcataatcaaatatttctttgaaaattggatttttgtgaaataatgctgcaggtacaaattggatcacattcttttacatttgatcatgtatatgggagctctggttctccatctactgaaatgtatgaagaatgtgctgcccctcttgttgatggtttatttcaaggctacaatgctaccgttcttgcttatggacaaacgggttccggtaaaacatatacaatgggtactggctgcggagacagcagccagactggtatcatccctcaagttatgaacgctcttttcaccaagatagagactttgaagcagcagattgagtttcagattcatgtttcttttattgaggttctttttaaacacctttctttcttctgaccgcgcgttgattcattcgtaacacgactgaccattaatgattttatttggttagattcataaagaagaggttcaagatttgctggatccttgtactgttaataaatcagacactaataacactggacatgttggtaaggtagcacatgtccctgggaagccaccgatacagattcgagaaacatccaacggtgttatcacactagctggatccacagaagtaagtgttagtacgttgaaagagatggctgcttgccttgaccaaggttcggttagcagggctactggtagtactaacatgaacaatcagtccaggtgacttgtgatatttgtgttattattgtttttatgtaacaatctaaaacctcaagtagaacgttgcagtcaataactttaaacacttataaaagttttgtctttcttctttgggtatatgcagtcgttcacatgccattttcactatcaccgtggagcaaatgcgcaaaattaatacggattctcctgaaaacggtgcttacaatgggagcttgaaagaagaatatttgtgtgccaagttgcacttagtagatcttgctggttcagaacgagccaaaagaactggttcagacggtttgagatttaaggaaggttggcgttcttctgttgaatttggttttagactagttttaagcgtttttgatcttggtgctgtaatggaagttgattcttttcatcaggagttcacatcaacaaaggcctccttgcgcttggtaatgttatcagtgcgctcggtgatgagaaaaagcgtaaagatggtgcccatgttccctacagagacagtaaacttacacggcttttgcaggtatatttgttttcaaatcttcttgatattactctgttcaatgtttgctccattctcataagctttgcatgttaatttcttaggattcccttggtggtaacagcagaactgtgatgataggtaacctgcagttttctttttttactttttctgaggaagttctgctttaatccctgtccagtttggttaatgttcgtttaatttctctatgcttgctatgcgggttccagcttgcattagtcctgcagatattaacgcggaggagacacttaacactttgaaatatgcaaaccgtgctcgaaacatccgaaataaacctgttgtaagctattcggatgtgtcaatcaaagaaactaattattcactgaaataaaattactctaattatctcttttttttgtttgattcttcaaaaacaggttaatagagatcctgtgtctagtgagatgctaaaaatgcgtcaacaggtagaatacttgcaggcagaactctccttacggaccggaggatcctcatgtgcagaagtacaggtatggccagtcttcccagcagttttttcaggagtataaagattaagatttggtgtgattgtgcaggctcttaaagaaaggattgtttggcttgaaactgctaatgaagaactttgccgcgaacttcatgagtaccgtagcagatgtcctggtgtagagcattctgaaaaagactttaaagacataagagctgtaaaattctaactgatacctttttctctatttttgctagatccttgtaactgttatgaaatgtcgagttatttggttgcaggatgatattgttggttctgtcagacccgatgggctgaaaaggagcttgcacagtatagagtcctctaattaccccatggttgaagccacaacaggtataagaaagataactagttaaagggtaaaagacagtaatgttattaaacacaagagttttcattatttgtaggtgattcaagggaaattgatgaagaagcaaaggaatgggagcataagctcttgcaaaatagtatggacaaagagttgtatgaactgaaccgccgtctagaggaaaaagaggtgtgttttatttgttaattatatatagaaatgcctcggagttccgttatggcttacagagattatttattcttgattataactgcataatcaatgcatgaaaacagtctgaaatgaagctgtttgacggctatgatccggctgcgttaaagcagcattttggaaagaaaattgcagaggtggaggatgaaaagagatcagttcaggtggaatatcttttgcattggtgcttaggtttcattataacaaaacatattatgagttgttgaactgttttcttttttttttcttcaggaagaaagaaaccgtttgttggctgaaattgagaaccttgcttctgatggtcaagcacagaagttgcaagatgttcatgctcagaacttaaaagcgcttgaagcacagattctagaccttaagaaaaagcaagagagccaagttcagctactgaaacagaaacaaaagagtgatgacgcggctcggaggttacaagatgaaatccaatccatcaaggcacaaaaggtataaatatgatctttttgttttactctaaaaaatgcatctagaccatgtcatttgcatataaactcatgtcatatcctctctttgaaagtgcattagtttgattctcttccttgcctttctaggttcaactgcagcacagaatgaaacaagaagcagaacagtttcgacagtggaaagcctcccgagagaaggaacttttgcaggtacacattacctttttcttcctacttaagtctttcgttgatattttctttcaaaattcccaaagcctcttagattctaactttaccttttactacaacacagttacggaaagaagggagaaagagcgagtatgaaaggcataagctgcaagctttaaatcagcgccagaaaatggtaagcacaagattggtaacatagaattttgttagcttcaaccttgagtattttccattgtctctgaaagaaagttcaaaaaaataaaagattcagttgtgaaactaaagaaaattttcactctcaggttcttcagaggaagacagaagaggctgcaatggctaccaaaaggttgaaagagttgttagaagctcgaaaatcatctcctcgtgaacactcaggtatgaataacaatactttaatggaatcatgtcactgagtatttagctgattgttgtgattcattttcatagtctactggaaattgcacgtaaagtagtttgtagctgaatatcttgtgccctgcaagagttatcccgtatttcaaggaataggacttttattttttaagcttttgagattctaagttaaaacactattgatgcagctggtacaaatggctttggaacaaatggtcaggtattgattgaacacagtcccatttttctttatcttgtgtagtttgtatcattgtggttcctaagaaatctaattcaatacctactcttttagacaaatgagaagtcattgcagcgttggcttgatcatgagttggaagtcatggtaaatgtgcatgaagtacgtcatgagtatgagaaacaaagccacgtgtatgtcccgaatgcatttaacctctccgataattttaacgtcacaacaaccattaacttctttgtggttactgattatgcatataatgataatttcagacgagctgcactggcggaagagttggctgttttaagacaagtagatgagtttgcagtgaaaggattaagtcctccaagaggaaagaatggctttgctaggtacttcttcatgaattctcaccgctttctaagttttccttggtccttatctacaagtttttgtttcagggcttcatcgttgtcacctaatgcaaggatggcccgtatatcttcacttgagaacatgctcgttatatcttctaattctttagtagcgatggcatcacaactttctgaggcagaagaacgggagcgtgcttttacaaaccgtggtcgctggaaccagctacgatcaatgggagaggcaaagaatttgcttcagtatatgttcaactctcttgcagaaacaaggtgcctccagcattgaagaaaaccgttttcacctttaaagttaaacttccaatcaacattttcatccttttctttttttatgccaatgcaggtgtcaattatgggagaaggatgtagagataaaagaaatgaaagatcagttcaaagaaattgttggtcttctgaggcagagtgagttgagaaggaaagaagcagaaaaggaattaaaattgagggagcaagcaattgcaacttcattagtaagactatgccatgttttatccatatttcagtatacttaagttttggttggtgaaagcagcatgaaaaataaaatgttggtattatagggtacgccgccgagttcagtgaaacatgtagctgaagacttgagcacaccttctccaatgaccgtgccagcacagaaacagctcaaatttacgccagggattgctaacggaaaagtgagaggaccggctgcatttcttgatacaaacaagaaggttaaattcttttactatacttgcttaggattatggaaatacatgtttcactctatagggattttgagtcctatatacttttgttgtgtgcagatggtaccgatgggacaagtatcgatgagaaaactatcagccgtaggaaaacagggtgggagactttggaggtggaagagaagtcatcaccagtggattgttcaattcaaatggaaatggcaaaagccatggagactctctgagtggattaggacaagtgacgaaacactcctcaagtcaaaaccccgacttaaggctctacctaataagatcatgtaatcaagttgcttgccgttttctgagagaatcttttagttttcaagctctctctgcctgtgagtatgagacttttatggaaaggatcatacaagtgggtgcaggtaatttatcaatccttcctagattatttaagcaattcggagaggatatcattgtgtttctctaacgtagatcagttcatgcacgacagagattagacttgctgccgtgtttcatttgggaggaaaagtctttaaggttttgtgtgatattggaaatttcgttattaggcgtgtctaccgcatcaaggagaaccaccaggacgagcggcgggtgctgctgattgcttgttgtagctaacagatagctgatggctttttaggagtcagattgttcttttcatgttgatagaattgacatcttatacacatcactaaatgagctcatgaggaaataaacctcatcctcaagttgcagatatttgtatgaacaatacaggttttatttgttctttggtttgttgtaaatgataaaatatttgtttagtgtccacttttgttcaagtaccttaagactgagacaagaaaccagagcagaggcaaagcgcaaaaagatgcaaagtcttttctttaagcgttaattgataagcataagacacattacaagtaaaggttaagacaaatttgaagtgttgtatatctcccattccattcaaagatcaacaacatttagcaacaaaatattacagtgaaggcaatttgccgcagattctcatgtaatggccaacaaaatagcatccttgtattacatattgctacaccagtacgcatagtgttcatctctcctatggatgctcaccagaccaccgcattgcagacagataaaactgcttccgtcagcaaaggcatcgagcatgatctgtgacctcccacttttttccagaatagatatgccatgagcatctgctgtaactgtttgtttggtaccaaataagtcttttgacgttgtaggctcatcaagcgcaagaggctgtgcttctgtaatggcacactctgcaaatatagaagccagctgatccatactagctgtttcttgaattctacgcttgtatagttcacgggtacggttcagtatctgaagaaccgcctcatctcctccttggtttctcatcgccatcacgacctgttcagaacaagatagactgactcagagaagggttttataaagaaaaaagttcaatgcagtctatatacataaagtgaacgatcttgccatcatacatttccacaaatgcgacgaacactcaaaaactaatcccaattcaacaaggaagatacttttatcattctaaaagtctaaaagaagataaagaataaaattgcaatcttatgataaagaaagagatcattcttctaagatgttatatctgcttaatatgatataggcaatggatgaaggcgatgtgataggattcaaaccagtaaactacttctttattcacatccccaatgaagagacagatttgaccaagggatgtagttgatgctgctgtatctgttggcaactagacgaaggaaatgaatgtaacagatcaagcttatgatacagctataaaatctgtcgttataatggtaactaatgatcatagggatagaatcacgaaacaaaatctatctttgtgattcatcaagcaatacacaagcctccaaaaactagttgttcatccttatgcgagaaaataaatttaacttctaagtagtatttaatttcgattctgtgacttaagccacaaattccaacgaaccctaattctaaagtccaaagatagcaaaaagagcaccaaagcaaaaccgtatagatatagaacaattggaagaagaatgtttgaaatgcaaaaatagggaaaatttcggagatggaaaagaaacctagaagaaatcgaaaataccgcttggagagcttgagatggttctccttgatcgacgagcctacgagcggcggagaggaaatctctggcggtgctgggtttgtcgagcatgaacgtttcggtggagtcggcatccatcatctgcgtctcgggatcactgttcatggcgtaatgcatctgcgaatggagagaatccaaggaaaaaaaaagacaaggagagactagtagtgatgaaaacgccagaggattctagcaacttcttgtctcattccctaatttctccgacaaattatacctcttatgtaattcggaacactttcaatcaaaaaataaataattaaaaactaatctgaacattttcaagcaaaaaaaaagaagaaattcggaacattttcaagcaaaaaaaaaactaattacaaatatatttaacaaatcatggaacatagataatccttagaatacatattcaaaaaaattcacagcaatagggtaaagtgtaaatatatggtcttaattttgtagaacatatcaaattagaatttctgaaacttttagaacatgtcaattttaaaatgagtagaacatctacaatgtataaaaatacatgatctaaaatatttagaatttagacaaaaattagagaacatattctaaactttttagaacgaatttcaactattttttaaaaaaccagttttcgacaaaatcataaattttcttctctaacacttcttcatcattattggtcaacatatgttttctgatctgaacttggcataaatgttaccttctttttcggtgatatattgtgataacctggtattcactaaaaaatgatgaagcgtatagctctagacattgaagtctcaaaaatgggaaaggatcaacattgctttatcatcacaacgacaagatttttccactacttagcaggatttgcaggacaaaaccaatctctgttttcaagattctactttgattaatataaaaacatagctgttggttatttgttacttaacataaggcgttttactcatttttatatatatgagaatgtcaatgatctatccaaataatcaaacaaacaaaactctatttacatcatctagatgaattagcaaatgatcaaataaacaacattcacatgctggatgcaaataccaaatgcaaacgaataggcccttaaaacaattcaagtataccaaatgatcaaacaaatagacccttaaaataattaaagtgagtccatttaggtttgggccctccactaaattatcggaacagtgaagtcctctggtccctctgtattcaccaccacaggctcattgacagaaagagagtgggagagagacatgacgggctgtgtgaattctatttctccgccgccggtgactttataccggcatcgtgcctctccgtcacggtcgtccttctcattatccggcgatgccttacactctctttaccggcaccgacgtgtatcaagatctccgtcgattatcgctcccaaatttcaggtgaatgattgttttgacctccgatttttgaatgcgatttgcgagcttgtaattttggattttattgtgtgtggaaggaatatagattgtggcggctgaaaaatcggagcctctgaaaattatgatatcaggagctcctgcttctggtaaaggtacacaatgcgagctgattactcacaaagtaagcttattgatcttgttattggatactattctcatgaacccaattcaatttgaaaatactttgatcgattttgtcaatgaaccttaactcggccacttatagcattgcatgagctgattcagggggttctctagtaatgatatcaagcattaaaccatttttttggctgtattttgtgatgatgactacgttttagtgctcttttatgaagaggttaacatgctaaagtaaagcttaggttgttgaataagtaaggaaaatcgtgctcttaatttaaaacaaaaacccgtgtttctgcagaacttgctactcatttttacggataatttttatgtttctgttttcatggaagacgtcaagctttctggtttagtaatgtgtctggtgtttgtttagttaagaatagaagctcaggctgttgaataaataaggaaactcgtttttggatatactttgatcgattttgcgaatgaaccttaggccaacctaagacaaggtttagtaatgtttttggatatacatcagacaaggttttggatgtaccagacattgttttggatgtatcatgtgaataaataagggctttcttcagttatgatttcaagcatcagacaaggttttggatgtatcatgtgttgattcctgcaattttaatactctttgataaagaggttatcatagtacatgttttagtaatgtgtctggtgtttagttgagactagaagtttaggttgttgaataggtaagagaaatcgtgctcgtgattaaaaaaagcggtgttgctttcgaacttgctactcgtttttacttctaatttttaggctgtgtttcagtggagaagacttcatgctttcttcatgatggttaattatgaaataaactactacctctttgctgtaatgtgtctgatgtttagttgagacttaaaagcaaaggttgttgttgaataaataggtaatgaaaattgtgctcttgattaaaaagcagtgcttctgtcgaacttgctactcatttttacttctgtttccatggaagacttcatactttttaagttctctttgctgcatgagattttctcatgaaacagaagcagattgaaaattttcctcttttgttggtatgcagtatggtttggtgcatatctctgctggagatttgctgagggctgaaatcgcttctggaagtgaaaatggaagacgtgctaaagaacatatggagaaaggacaattggtccctgatgaaatagttgtaatgatggtaaaagatcgtttatcacagacagattcagagcaaaaaggatggcttttggatggatatccaaggagtgcatcacaggcaacagctctcaagggatttggattccagcctgatctattcattgtcctcgaagtaagcactgttcttaatttcaatgttccttatctctcatctaaaggctttctctagaacttgctagattttacctatacttgtgagttcaatgcaatggataaactcttacttctttgcaccagttattctgcaacagattgctgaaatgtttaattctggcaaatcagtcttaaaatccggacaactgataataaaactaggttcattagcttctgtcacattgctttgactctttatcctatgaatactctagcctcatttgattctcgcctactctgcttttgggacaggttcctgaagaaattctaattgaaagagttgttgggcgtcgattggatcctgtcacaggaaagatctaccacttgaagtattcgcctccagagacagaagagattgctgttagactcacccaacgttttgatgataccgaagagaaggcaaatcaatacttcttatatatctcttgaaagtttctcattcgataattatttctacacatgagattgactcttagtcaaattatgtctctgaagtttttctctttcgctgtaggcaaaactgcggctgaagactcataaccaaaatgtgagtgatgtgctttctatgtacgacgatataacaattaaggcatgggatctcatccacaccctttctattttggttttgctatctcttctttaatgttttcgtgaagcaaaatcacctcatttcttattattatccagatcgagggaaaccgctcaaaagaggaagtgtttgcccagatcgattcttctctgtccgaattgcttcaagagaggaacactgctccaagttcacttttaagttgattcgttcttggtacaaacctgatgaagtgcttacccagatcgacactactatgtccaaattgcttcaacagaggaactctgcttcaagttcacttgtaagttgaatcattcttagcaaggacctaaccagcggtaaatatcctttcttgcatttatcacactcgattgatatctcttgtatcgcaataacgggttgttttgtcgccagtaagacaatgtacctcacacctcagaaatatgcagaccttcttcttattacctgtagatttactgaaaataacccattgtgttctcttgtcgcaatcatgaagaatagaactgagttactaaaagtttaggaccttcaaaatttctttagtgtttcgtatcagtcaaattttgaccattggcgtctaaattcaatttgacaattcaaaccaattattcaccaactctttttcctagcaactaatattagaagacttttagacttttcccatggagtataatataagttggtaagctttaacaattctttgtcttcaaacaattaacttggaattaaaatgcgtacaaaaagaagcagcgaatctcattggcttttgctttgagcttttcacattaagctacaaaaagaaattgaattgtgcaagggttttcgtcgaagaaaatattaaaattctgtaccaattaattaaattcctaatccctagaaaaataaatacaattacagttgaccacaagatttaattaagctaaacgtggctaataagtgtttgatcgagatacggtctccgtctttggagccgtcaaacaagcggccaaagcactctctagtttactgactacctccaccattgacggccttttccgactacacggcatcaaacactccgctgccaagtatccgacatgagccaccgcctcgatttcgtaaggggtcggcggtggaatcctctggtcaagtattctatgagcctcatccagcaaaatgtatggtacaacatattccactaagtttctagggttttcgtcttcgttattgtgtatcgctttgtgaccagacagcaactccagcaacaccacgccaaagctgtaaacatcgctcttggttgtgagctgttgaaacttgtagtactccgggtcgatatatcccaatgtaccggcagcgtgtaaagagagatgtgagacgtcatcttcttccgttggacccatttgagataggccgaaatctgaaactttggctgtccatgtggcgtccaaaagtatgtttgatgactttatgtcacggtggatcaccggaggcacgataaactcatgaaggtattggatcccacgagcagcgtcaagcgcgatcatcaagcgtgtttgccacgaaagagggtcaaattgaggattgtgaaggtgatcggctagagatccatttttcatgtactcgtacaccaaaatcctctcttctgtgtcctcatagaaacccagaagtcgaacaagatttttgtggttaagccgcgacatagactctagctcgttcacgaacgctgaatccttatctgctcgtcggtgtctcatcgttgtcccagacaatgtaggatttgttagctcagctcgtttgattgcgacatgacgtccatccgacaaaacaccttgataaacagagccgaagctgcctataccaagatgaaaccggacagagaaaccatccgtggctagagctagctcgtcaattgagaactccattagctgcccaggattacctaaacttgctagagtgcacagcctcttctcgagcttgggtatgtctattgtcctagtatcatcaagacgtccagagtcatggacacggcatcgacagtggcttttaaagatcaagaaactgatgacaaggagcaaggaaaacgttccaacgcatccgaccactagaaacgcaatgtttcttctgctccaagttttgttcttagagttttgagccctagtatcaggaaactctccatcatttcttttcaaatcgcaaatcatcaactcattgccgcataaggactgtgatcctgacaatggacggtaagggcattctcttctacacggtcctggcattaccacttgagaaattaggccttggaatggagtgaaaacaccggatttaaaattctcattcccccaacaaattagagtgtaatttcttgtggcaacaccgcaaaacattggccctttagcatatattgatgtaaaatgaatgtccttaagcgtttgaggcaaactaaagttgttgttgttgccccaacacaccacagttccattagaccatctaacaccgcaaccacggtcttccccaaccgctagtgctaagaacttttcacgtggcagcgactgtgtttgtccccaacactcgacatcattgtcaacagtgatcgcacacgcttgtcgtgatccagccgctatcgcgatgtagtggtctccactcggcactttggctataccttcacaactgatcataccaggtggctgagatagcccacagaaaaaattatctcccaaggcaatggaacggtaattatccggccgtggcagatagtacggttgccagcaacggaggcgccttgagactctttcaactccacaaatgcggaaattcccggcttctagctcttcgagctcaggaccgtggtagattcttttgtgcaacatattagttccatcaacagagaatctccaacaaagaagtgtggaagtgttggaatccagccgcgatatcaatccgcacacaaacccattccctgaaacaacccccgaaaaccttcgatttcgaaggttaccggttaaagaaaatggaatcgaatttaaagggaaactggaacattgaagataagagtggttgttgagagcacatacaagagtctgattagagatgtgggagatggagacggtggagagggagaagcaaacaaaggagaaggaagatagaacaagaagaaggagagacacaaagtaagaggagaaacaagagattgagatggtaagtgccattgaagaagagttctcatggcgtgtgaatgttttatgtttgaggagttgtgtttttaagacggcaaatcaacgcggttagagagacatgagacagagacagagacacctccttaccaagagaccaaaactaagtcttatttacttcattcatagtgatttttctctattctaaattatttttatggtcaactctttgaaaatttcaacacttactttcagtggcatcgtcgtatctaaaaactatacttaatcctttggttgaaacaaaataaagaatgactttcgtttatatattccaagatcttttaacattcataatagggcttgtacaaatccttcatgagaggatgacactcttcgtcatttaatgaaagcaaatgtggcccattaagtataattgaagcccaattacctttcacacagttaacaattaagtttttggtctgatcacaatgtttgcgttagctgcgaaacaagatgctgttacagtcatagaagtcttatgcgtacacgactccgatttcaaaatctgaacggaatataaactctcgacgacgaaaatctcaaaaaccccaaaatctcctccaactccgagttatggctacatgttccctcttaccaccaccgtctttttctccgcgccggcgattctgtagtttttctcacaatcgccggtctctaccttcaatattcagtttcaacaaagagcgtgtctcacgaagagtcttctgtagctccaaagagaacgatataaacagagatcggaatcagtctacaggaattcaagtctacggcgaaatcgagaggtaaagccactcttgatttttcgcgtagctagcttcatctttaagctcactatggtggaatcaaatttgattttcaggttattaacagagactgtaaaaaattctcagagtagctccggtggatcctctgattggtcagaagttgaggtgtgtgtttttgtgttatctcaatttctctatgtgtttttggatatgaacattttaggagcttatcttcaaatgttgatttgaatgtttaatggatgattcttagaatctaagtcaaatttaggagaattgtctggttttagaataagttttttgtttcagatttatgttctcaacgattcggtgaacttgttttagggagcatgggtgctgaaaccaagaaactcgaaaccgaagatggttgttcatttcattggcggtatatttgtcggtgcagcaccacagcttacttatcgattgtttctcgagagattagcggagaagtaagtctcatggtgtagacaatttcataagatagatgagcaaacaaaaaaatgtactaatgaatctggcttatctaactctagtttgtttcatgaatttatgataacgttgtgatgtttgcagggatgttttggttattgcgacaccatatgctagtggttttgaccacttcaatattgcagatgaagtacaatttaagtatgatagatgttgccgatctctacaagaagaagtgagtgtccttttgtgatcctagagaaacaagaaatcttttttgttctagctttttctatgatccaggagaagaaaaattggtgtcaatgttgaatagtagttcattttctttcaacaggtgcaggatcttccgtcttttgggatcggtcattcactgggatctgttattcaccttctgattggtaactaggtttaaatggttgtgaatgtttaaaactgattcagctcattagtttttttattgagttggttttcactagtcattcaggatcaaggtatgctgttcagcgaaatgggaacgtatttatggcattcaacaacaaggtaaattggttttgctatcttaccaaagtcaatcagagttgcaatcagaattgtttggggaaaactgatctaaagtaatacttttttttattgtaaagatattgtgaatcctgttatggaatcacaaaacctgtaaaaagtgatatctttttggaaccctacatttttgcaggaagcaagcttagctattcctttgttctccccagttcttgtcccgatggctcaaagccttggaccactgttgtcacaggtggcaacatccccaacaatccgccttggggtaaggttttgattcatttgctctactctttttaagatgtgcagctcttagctagtttcccaagtgatagtctaacttcttgctgttggtgttgtatatgatcaatttgtttggtaactcaagaaatgctgtcataagtgcacttagtccctatagattttgttctctaattatgtttttaaatggcagtaaatactacctttgaattttgacacatgaagtcataatgctttctaccttgtaatgtctttcatcctttgtcgtttatgttctcctacatgcaggcagagatgacgcgaaagcaattagaaacgcttagccctcccatcatgaagcaaattctgcctttagtggaacagctccctcccttgtacatggacttagtaaagggaagagaagattttgttccaaaaccagaagaaacaagacgccttgtaggtgaaacgcataatgttattgggtttatgtctcatcatggagccttatctcgtcctaataaaccatctatcttattccctcacactaatcgagattcttcctaataatgtacagataagatcctactatggaatctctaggaatctgttgataaaattcgaggatgattcaatagatgaaacatcaatcctagctcaggtgcttggtgtggaatcatccataagctcaaagctagacatgtctatccgtacactgcccggagatcacggtctccctctgcaacaggtaccgagttctgtttaagacaaactattttgcaactgtgatttgagccatcaccatggagatagtcataaacaaaagcagattgaacatgcatccttagttagaatcaatatggagacttttttgttgctttcgataaggtggtaatgttgaaagtgggttatattactgtctggacaggctcttccggatgttccaccaggaatggcagaagcggtgaatcgaggaagtgagtttttagcgaatattgctgtcgggactccgtgggaatctatggctaaagaggttggaggttcgctgggaatggactcgaagatccttcgtgctgacatgtccaaagatcttgcgcagctcgttgatgcaatcacttcttggatgatttcaaatatgggtccaaagcttctgagaccataatgttttctcatgtacacaaaacatacaaaaatctattaacacagggcgattgcatactatttaatgtaatgtaactgtatatattataacatgaagagtttggttatacataaaaactcctgttaattgcatgttttggtactctagataacacaaggatgtcaaaaagaaggaagaaaaaacaaacagatcacggaattgagggtcttgaaaaacagtaaggaaacttgatatgatcggtgaactattcgtggtatagatacaagccgagaccaaatcgagcacatgctctgcagaatgctatttcctcagctgcagtaactggatcctcgatgtgatcatcagtcgtcgttactgtcccagttgattcacgatgtgcctgcattacataaaacttcaaaacttagtcctgtcatcaatggtacatatgttggttcactaatctacaacttcaacaaccaatccaactcgctctccacaaaacaaccttctatcatatcaaagtcataaaaatgggattttgctggtttaggcattgccatagatgaccaaagtcataaggctcgaggacttccacgatcacattacctttggtttcaatctaccaaagcatatgcttataatcgttgttatactcgtgaaatataccattagcaaaatgaacctctagaaaggtttgattttgcacaaaaacaagacaaacaagcatcaatacatgaactagaatcttttccttaatcattaataaactcttgaaaactaccatcaaagttttttcctctacaaagatacaataagagagacacaatgtatgcaatgcaaaggtttaatttttcacaaaattagtcaaatcagacataagtttctttgcttacctactcaatcacacacaactacacccaaggaaagaaagaaagaaagaaattgaggaatgttgaagaacttttacctcaccatcagagccacgaatagtgagacgataaacaacagtaacatttccattctcagagaaaataacatctctaacttcaccacaccaaccaggagcatagaagctaagcatccgatttgcatggtacctataaattaaaacctcagatcaagaaccaacaagaatcttcttaacaacaaaaagataataaaaaaaaaaagataattaataccaagggataaaaccagaagtagcagcagaagtagaaggaggatcatgactcttaacaatgttatcaggaatcttcttattaaggtcacgaagtatctcaatcaaaggcctagtaatcgacgaagaagacgagaatttgtcaataggaactacataattcgaattaggaactgcttttttcttcccggcatctccgcctccgactccaccgccgctgcatctaactccgcggttaaccgccacggttctgaaaggggagagtttgatgcgtgcagcggcggtggatggtgaggagattgtgaaggctgctgaagtttgctgcacttgcaaagccattgattttttgtctgagcaaaattgagagttggggaagaggaaaacaggagaagagagtggtaaattgtgagagacatgacgttacatttagtagtaggtgactaggtgaggtaggtggaagctctaaaccaaaccaaccccttttttggtctttgaatttattaacaagtttttattacaaaacgattttgtttgggatattattcaaggcaacttgttttataaacccaagtgtggttcatgccaaatgtttaattataaattttctcttttttttaactgaagaaattccaatgccgaattttagattaattctttgaacttatagaatttaggatttaattaaggttttaaagacatccatgtaataaaaacccaaattctctcagacaagagtattccaattctgaaataaaactgaccaaagtaaattattaaagaaacaccaactcaaaataaaactccataaatgtctaggcaccaacaacgctaccaaagccaaggcttcttcactctccacatgttccttcattcatcacctgttttaacaccagtatcgagattaaggtagggttttcaaagaagaaacctaagtttaaagagatcgatcatttaccttcacaaaagatgcttcttcaatttattttcaaattcttcagcgcgaccccgacagcccgcgcaagctggttcaggcatggcggagcgccatcttccccaaccagcgatggtgaggatttgattgattgtcattccgaatcatcatcaagagcttctccatcctcggaatcaaaggcagtcatgtcaagctggtaacgaagtattcctccgattcctccaaaccctctgcaaaactgagaaccttcctgtgacttgttggtcacaaactctaacgcacaaccaaaacgcctgtactcattggcaagccactccagtaacgacagcttctcctccacgtccaaagccaagtcactgtcggctactttgaagttctcagtgttggcttcttgttccttgttcaggtgtttgatcacagtttcaccagtcgcactgttcttcatcacatatctgttgatatcgagattttcccatacaatcagtgtctcaatagcaccagactccaaagcgttcaacgtatcttccacaccaaacacatacttccccgtgtcctggcttatctcctcaaagtacttcccaatcagacgcttctcttggataaacttcacattcgcaaggatttcagctgacagctcaatagcttgattaaaaccattttctcctccatatgatacatccaccacattcagtatcttcgcagccagtcggggatcaaacatatcagactgactcaactcagtcttgaaatctgctgaaccagcaagaatcagtccagacacattaggctgacttgtagcaggattgatgtagtactgtgtggcgagctcagcagtcttcctaacataattgtgacgcttctccatacggagacgggcaaaacgaagagcagactgtcctcctcttccgtgtttcttcggaagatcaacagagaacttgtgaagtacctcacgggtgttaccactaagagttccaaagagagtcccgtttccatccattacaatgaaaccaaacttgtcatcagactccaacaattcattcaaagcttccgtgtgaaacttgttgtcacaaaggtagagagaagcattgatgggtctgaaaggctcaaagtcaatagtaaccttcttctccttaccatcctcattaacaatggttccagtatagagtacaagaccattaggagggaccctgttgtaaagtttcaacctttgctgagcagaagttatggcccccaaaacagattgacgattgactctgctcttgatgtttgacgcggttccatactcatcacccaacatcttggtaacacgagagacctgatcacgcggaggcatgatgagtgagatcatgctggttccattacccctagcagcttcaagtgatttgatcagcttcttaatcttccatatctcaatgttcttgtcgtcatcgtttttgtctcccatcttaacaatagaacaaaaacctacaacaacagtacataagctagttaataccgaaaacagagtaatataactcaaaactggaatacggatataaaatcctcaagaaacaataaccgaagctgtaataatacaaagtgtgtcatgtaaccttaatcatacaataaatattgtgcaatttaccattaaaaaaatcagccataaaagttgaattaaattcaataatcttaataacatgcgttcatcagtaatgaataatgatactaataaatcttaaaagaaattaataatacaaaaaatattacatattaatttcaaagatcaagacaataatagatttagctgatggatctgtcttacaaaaaccaatctcttcaattctatattacggaataactaatcttaattcagattaaaattaattcaacacacgaaatcgattgctatgatatcaaaacgagaaaagccgataaacaagtatacttaagaatctaaaattcccgaaacctaaaacaacgataaccacatgcaaaacaaatcagatcacagaatcaatcgatcaaatcgaataatcaaatcaaacaattacgaattcataaggacaaattaaaacccaaaaaaaagatgaagatcaaaaagtacctgaagaagaaggaacaacgctcaagccttcgacaacttattatattctttactgtatgaagacaatttgtggcagagaaagagaatatatataacctagtttttttttttttttttttggtctaaacctaacaaaaccgactcatttaatgggcctaagcccagtaactttccgactcacttaatgggccgaagaccaataactttacttaattcattttcacatgaacacaaagttctctctggtctttgattctttcgttgtgtggcatctgaagagttaagaggaagaagaagaacgatggcatggagaggaagcatatcgaagtctatgaaagagcttaggattcttctttgtcaatcttctccagctagtgctcccaccaggtttcaatttgatcaaagcaatctctgagatcggaattttttttcaatgttccatatccgttttgtgatttatagggtttttgtttcgttgtttcagaacgtttgttgagaagaattacaaagatttgaagtctctaaaccctaaattaccaatcttgatccgtgaatgtagtggagtccagcctcagatgtgggcaagatatggtaaatttgctttatctcttatctctgtgaaggaaaattttgactcaaattgtttaatttttagagatatgaaaattaattgtgctcttttaaagatttgatatgaatgtagttacatatgtgacttcttctattgcttctgcattcatattttgtatggaggtgtctttataacatcttgtgttcacccattatacactcactatcgagccttgtacatcttgtgatgaaaatgtttcttgttgtgtttgatgtgaatgctgaaatttatggtttatgggattttctaatgtgggttgttctttttctttctcgcgattctgtttgttttgaattttctacagtgttaaattttggtttgtttgtttttaaaaaacttgacatgaatgtggtcattggtaataacagatgtggcttctttcttttgtttctgcattaagttttttagggaagagtcttttaacactatgagttaaccaattacacttaaagtagtacactcacactcacccttagagtcttggtcattgatgataaggaattgtgtataaccgctatgtatattggcttgtgctttataagatgaggattgttttcccttgtcccttgttgtgttttatgtgaatgccaaaatcttatggtttatgtgattgcctactgctgttgttcattttctctctctcgtttttgttttgttttgaactttatggttgtcgcatatcagccttaaattttgagtgagttttaacatcttgagttactcttaaagtacacactcacccttagactattggtcattaatgaaaatgcatattggcttgttcttttgaaatgagactggtttccctagttccttgttgtgtatttatgtgaatgccaaaatcttatggtttatgttatctcattagctgatccattttatatggtttccctgaccaaacatatcagtgtcttcagcaacttaaagtatttaagcatctgtgttgagtgaactttgaacatctttaaactatgttcccacactccgataatgtagtaaagtataatactgtaaatatgagagaacaagatgattctttttctttttggtgataaacttgttttacgcaacagtcatatgcgttaaaattgtcatcctcgattctacttcggaactagtatttataaatgtgtctgtttttgtattgcgttaattcgtgcttggcttgtgcagatatgggtgtggagaggtgtgtaaacttggatggtctgacagagccacagattctaaaggcccttgaaaaccttgtgaaatccggagctacaaaggcctaagtttgtttgtttgtttgtttttctctatatgatcccgaataagattaaaccgcaaaacaatcatttgacatttcctgtcattctactactttgtaactccgtggtgtcatatcgccttgcatttgagttggtttttttgtgtaatccttgaacttggaattaaaccattccgtataattgaaatcacagaaaggagaaaaataaaccatctctgtttaaactttttgttttaggggatgtgggcatgtcggtttttgaccgtgttttccgcaacaattcccggtccgatcagccggttcagtccggtttcaaaaacattgctaagagcgaatcaagttcgcaacctcaatagggtccaatcccaacacattcacgtgcgaagctcaagtgatctctctcaaccgttctcgttaacacgcatctgtttcttttccatattcacaattttacttacataatgtttttttaagtttttccgaatttatattccaaaataaatcagatttgatcttctctatgagattttataattacactacattttataacaaatttgaaaagttctttatttatatttatagtacagtaaaacctctataaattagtaatgttgggactgcgaaattttattaatttagagaggtattaatttatctataaattaatatttatcaatttataaaaagattttcctaatttggtaattttttgaaaatttctacaaaatttctttattatagaaaatatctttctagaaccagttacaagtaaaacataataataatgtctaaaaacagcaccaaaagtattgatacaataaaatatgaaaactatagtcaaacaaataacaaatatgaatttaagcaaaaaaattattataaatatattataaagaaatcttttacatataatatatatatatagttgatacatttatacaattattaatttatgatattgatggaccatatatttacataaaatttttttaaaaaattattatcttattaatttatcgatttgtgtcactttttacactggtcccaattcgggaccagaagaatttattaatttataaaagttattaatttatagactattaatttatagaggttatactgtaatttgaaaacatttttttatatattgaaaatgcaccataatactctttctatttatttaagcattttaaattttaaatatattatttttaattaaattcgtaaattatttattaataataaaaagttaagaaaattatttaatatgtttagattaatcattatctcaaattttgaatatatagaaatataaaatattactattgaaatattatttagatattaattcattaaaaagtaaggaattcaaaaaaaaaatgattatataataagatatgtctccaattctacaaaattataatacaaatttcaaatttctgattttaggtatatacaatctaattattcctcttccatgattcttttacaatcttaccttctcttccgattttagttcgaaatggaatcattagtttctctggcgaatccaataaaaaaaggatatcatcggtatgttctcttcttcttggcaaaaacacattctccaatatgtatcggagattttacttttgtttcttttcaattttaacgaaatatgcattagtcttcgtagaagtagcataccagtaaaaagatttttatttttaaccttatcacttcagcgtgggctttctcttatttgcaggcccataaagcgagagagtaaaaaagagataaagtcgctgcgagcgaatcaagttcggataaggtccaatcacaacacagccacgtgcgaatcccaggttattgaacagtaaaacaaacggctcaagtggctcactccaaccgttctcgttaaggcaaatcaagttctgtttctttttctgacttttgataattttggatatattttcctaattatatatagacgacgcctgcgctagatgaatttgttgtgatgcgaacgaaactaacgatgtacgaagcaatcaaagacaatgatgataatgatcatcaatggcgagagaagaaagacattgagtctgctcttcagatttctcgttcttcctctcttcctcccgacaaggaacgattagtttcccttgatgtctttcgcggtcttaccgtcgcagtaagtttttgttctaatcactttctaatacgtgatcaacaatgtaattagagtataattgttgtgtttaaccacagtttatgatacttgtggatgatgttggagggattttaccatctattaatcattcaccttgggatggtgtcacactagcggattttgtcatgccttttttcttatttattgttggtgtctctcttgcctttgcttacaaggtaacttctttttttgtttattctatgttggagtctcattcttcaatccacactagcttgttgactcactacatgtttgtttatagaacttgtcatgtaggtttgtcgcaacaagaaaagctttgattcgatctttgaaacttctattacttggtctttttctccaaggtttggttctaattttatattcttaactccaaaggtgttgatgatgtgatatatgacattcattattgtttttaacttttcaggaggatttattcatggtcttaataacttaacttatggaatagatgtagaaaaaattagactcatgggtatattacaggtatacatatctagtgttttctctagaactagcattaaaaattatgtgttccaacattcttattgtaatagtattagtattttcttttgtttgttatgttttcagagaatagcgatagcatacttagttgttgcattgtgcgagatttggttaaagggaaaccataatgttagctcagagttatctatgatcaagaaatatagatttcattggtaagtgtcttaatcttgagtttgtacacatatgatgttcatgcacttgtttgattttgtcctggtatttgacagggtggttgcttttgttatcacaactatatatttgtccttgttatatggtttatatgtacctgactgggagtatcagattttaaaagaagaccaaggatcaacattgacaacattcttggttagataatggtttcttccttctacaacaacttagttacatattctgtcgcggtcataatatcgaaactgtttagaatctgaaggtgaaatgtggggtacgaggtcacactggaccaggctgtaatgcagttggaatgcttgaccgtatgtttctaggaatccagcatttgtacagaaaacctgtatatgcacgaaccaaggttctagattttaacccaagtcctgtttttctcaatctttgttttatgtccatttcatttgatctcttatatattctcagcaatgcagtataaattatccaaacaatgggccattacctccagacgctccttcttggtgtcaagcgccttttgaccccgaaggcctcttaaggtctctgcttctactctccaagaaaaatattaaatagtaagttgtgttttatcattgttcagaaaataacttgcaagtttgtttaattgtagttcgttgatggccaccgtaacatgtctagtgggtctgcactatggccatattatcatccacttcaaggtaaacatatctttttatgaagaagttcggctgctctgctcaactcttagctatatgtctcctctatgtagcatattagagctgttgtgttttggttagagaaatggtagtaagggacaggtttataacgagccttcaattagcataagacgtacgttaagcgtctcttgttagtctagtccctatggttttggtgaattggaataagaatatcagttgtatagcatttttttttatcttatcagaaacttacttgttgctatatgtaattaactttttacaggatcacaaaaagcgtttgaatcaatggattttacgttctttttgtcttctgatgttaggtctcgcactgaacctctttggtatcttccttgactcttatagctctcatttacatcatttgttgtcctaattcattgcaagatcaaaataccttagtaaatcacatgtcattcgtttttttggttgcttgcaggaatgcatctaaataaacctctatacacattgagttacatgtgtgtcacctcaggggcctcgggatttttgttatccgcgatatacctaatggtttggtttgctattatcttgagactcctaatgaaagcatcactcatggttaaaatgtaaatctatctctcactatcttcacaggtcgacgtttatggatacaaacgagcaagccttgtgttagagtggatgggaatacatgccttaccgatttacgttctcattgcttgcaatcttgtctttctaatcattcatggattctactggaagaaccccattaacaatctcgtaagttttactttcgtttttttttttaccgttattaacgttttgtgttggagttcaaaaatgttattgttgtttgcagcttcatttaatcggaatcggaaagtaaagaagagaagagaagggaggtgaagaaataagtttcatcaaccaaaaccttaattgtttttgttagaaataaacaaatgccatcttcatcttcacatcccatatggaatccaatttatgctatacttttgtaaacatacggtatatcgtagaaaaattaaaacttcatggctatataagcaaagccttttgtcgaaaatacacatgttggcaagttgtgggagccaccaacataagcatattatattcaaacaaatgttcaatcgcacatgtgatggtttagcgatttagctaccgcacaactgaatcaaaagacttgttaaattgctctcttagtcttatcataccttcatctcatatccattataatcatctttagcaatactattttatttttaactacgaaaaataaaccttgttacgccgttattaacagtgatcatttttttcgttaaagaaatttaacattcaaaaaagataaagaatgatcaccaataagcgtcatgatcttccgtatggtgatgataaacatcgtttgcagttttgttgtatagtacaacgtatatgtagccgtaacgtgtgaatagtgtatggttagggtcattttatttgtgaactaccacaattttgatagcagtggagataagtcaaaggttcgtcttctaattaattaacagcgattattagactatctaacttttcttcttttcttattttgataataactatatatcttctttagccaccttactttctcatcgggttctatttaaatagggacaaagaaaacaaaccatcgatttgtactatgtgctcaattatatcatatgttttgtctccatctatgtatctatttctcttttccatttggtaaattatttaagacccttaaactgacttttctcgtgggcggcgtcgaagttttggttaacagacaaaacatctgttcatgatgcctgcataactctatgtttttatactactcatttgccctctatttcatgctactcttaaaaatagctaaataaaaatacttcaatattagaaaaaaaatcttcttgatgtcaaaaatacactttagatatcccctctagttcttgtgatgctaatatattacaaaattgtttatatatatagaaatattacctctagcaatacaaaaatcttgttatatcaattaaatataacactatccgactagtgtttactaaaataacacataatttttaattatgatctttgaattttagtttatgtattacgctttataattttgttatcaaaaactataaaagctcaaaagtgagcatctataccctaattccgtttttatgcatacacttaggtttatttttattacgagaatctgtgtttagtatatataaaatagagtttatgaatgactaagttaaatacttcaatactaattaaagtaagtcgtattgatgcagacaatataaactttagatatctccgctagtttgtataatgctaatagattcaaattgtctttatgtagaggaattacctcaaataacataaaattttcattttattaattaaatctcattttgtcatttcaaaagtcattttaattactgtgttatttgtctaaagtatactccaaacaagaaaccaaagtagaaggtcagtgcccaagagacaaataaacttaagcatgtccactctttttagcgatcggatcgcttatctgttcttatccattatggaacatgaacgatgttcctttaagactaccacattcaaacgaaaaataagtcatcgatgatagactggatagttatagtttgatgatctagctaattgactttcatatttacataaaacagaaatgtgtttttatcaaaaaagaaaaaagaaaaaacagaaaatgaacaatacatctcacatggagtttgtacaagaatccataataattttttgttcggtacagtaggttagatatacatttgaatacagtttacaagccaaatgttagaagcaacatatttatatagtatcatcaatatacgatccaaaatgaattatagattgacttatggaaaagttagatactatatgcatgattgccaaatacattgaaaaataacaatttaagttcttcaaacaaaagtttataaatgactcggtgtttgacataactcggggttgtttttctttgttaattcacacacggggttggtgtataaatgacttcggtgtttgaaatgtatgacacggtataaataaaaaaggtaaggaagaaatgaagaatagaagaagaacaaaaaaaaaaggaaattaaaaaaaagtcaaaataaatggtcagtaaaggattttgaccagaccggagcggtccatccatagtttcccactaccttccctgatttagcacagaagaatggcaatttgcatgccatttatttcatctattcctccttcactctataaatatattttaaacaaaatcaatttcttccatacacaaaaatcaaacaccttttgagagcggttattttttctctatcaactaatacagtaaccttacgggtgtttatttgtatagatctctgtggttttcttggccaaatctagtgagatctttttggtttctcgaattcgatgaaaatgagacgaggcaattcaagtaacgaccatgaacttgggattctacgaggagctaactcggacaccaactcggacacggagagcatcgctagcgaccgtggtgcctttagcggtccgcttggccggcctaaacgtgcgtccaagaaaaacgcaagattcgccgacgatcttcccaagagaagcaatagtgttgctggcggccgtggtgatgacgatgagtacgtggagatcacgctagacatcagggacgactcggtggccgtccatagtgtccaacaagcagctggaggtggaggccacctggaggacccggagctagcccttcttacgaagaagactctcgagagcagcctcaacaacaccacctccttatctttcttccgaagcacctcctcacgcatcaagaacgcctcccgcgagctccgccgcgtgttctctagacgtccctccccggccgtgcggcggtttgaccgcacgagctccgcggccatccacgcactcaaaggtctcaagttcattgccaccaagacggccgcatggccggccgtcgaccaacgtttcgataaactctccgctgattccaacggcctcttactctctgccaagttttgggaatgcttaggtaagtaaatcacttcttactaagcaattctattagtactatatgtttccatttttgtgttagtctcatttttgttttgttttttactctaggaatgaataaggaatctaaagacttcgctgaccagctctttagagcattagctcgccggaataacgtctccggcgatgcaatcacaaaggaacagcttaggatattctgggaacagatctcagacgaaagctttgatgccaaactccaagtcttttttgacatgtaagcttttttttacatatcttcacctaacccacaataaatatataacgcgtaatcactatttgtcgtttaatattgactcttaatgaaaattaaacggtcatcagaatttaaggaccaaaagtagtaatattaatcatttgtggagttttggtggatttgtaactaatatatgacatcactgtttggtcagggtggacaaagatgaagatgggcgagtaacagaagaagaggtggctgaggtgagaaaacacacacaccactcaataattatctttttcaaatattttattatatttatacattttttttatcttatatttattcatattcctggttgaattttttttctcttattttatacgttattcttggttgattattttgacaattttgtccacgcgcaaatccccactgactttatctgctgacgtttactattaacatcatcaatatattaacttcatgtgaacacgacaaaatggtaatagatagatagagtagtagtctttgttactttagcttaggttattaatgtttcaaatactttagcttttgttttctaatttgttggtaatttattgcagattattagtcttagtgcttctgcaaacaagctctcaaatattcaaaagcaagccaaagaatatgcggcactgataatggaagagttggacccagacaatgctgggtttattatggtacgtgtggtccactttcacccactcaatcacactaatggtattatgtacgtcgtaaatttaaccactcttaaaatactagaaaaaacgtggaaaaacataacgttctagaagtctttagtggtcaaaattgggtcaccatgatgttttttaatttccaacttattgggccatcttgaactttttaccaaaccaatcaacaaaatctcgacaatgggtggttagtggttacgatatgaagaaatgaccaataaaattgtaaaatatatgaactaacactataatccaagcttagaaagtcttaggcggcttccgatagtatattgttttttaattattggagaaacctatgaaaagtgtttttaagaaaaacagtttggaacattaatgttttattgtaacgttttagttaattatatgatatggacattggtgaaacagatcgaaaacttggaaatgttgctattacaagcaccaaaccagtcggtgcggatgggagacagcaggatacttagtcagatgttaagtcagaagcttagaccggcaaaagagagcaaccctttagtgagatggtcggagaaaatcaaatatttcatacttgacaattggcagagactatggataatgatgttatggcttggcatctgtggtggcctctttacttataaattcattcagtacaagaacaaagctgcctatggtgtcatgggttattgcgtttgtgtcgccaaaggaggcgccgagactctcaaattcaacatggctctcatattgttgcctgtttgtcgaaacaccatcacttggcttaggaacaagactaagcttggtactgtcgttccttttgatgatagtcttaacttccacaaggttattgcaagcgggatagtcgtcggtgttttactccatgcgggtgcccatttaacgtgtgattttccacgtttaattgccgcggatgaggacacctatgagccgatggaaaaatactttggggatcaaccgactagctactggtggtttgtgaaaggagtggaaggatggactggcattgtgatggttgtgctaatggctatagcctttacactcgcgacgccttggttccgacgtaacaagcttaacttacctaacttcctcaagaagcttaccggtttcaacgccttttggtacacccaccatttgttcatcattgtttatgctcttctcattgtccatggtatcaagctctacctcacaaagatttggtatcagaaaacggtactctcttcaaacctcattttatctgttttaatttcttattttctttcctttttccggttaataacatttattacctgtttgtatgattcttgtagacatggatgtatcttgctgtacccatccttctatatgcatcggagaggctgctccgtgctttcagatcaagcatcaaaccggttaagatgatcaaggtcagatatatttctatttatctcttgaaaaccttatgtttcaagaaatatttcaactaatacttttaaaccatcttattttatagttctttttgataaaagtttgaaaattgcctttgaacttaatctatatatatgtaacaacaggtggctgtttaccccgggaacgtgttgtctctacacatgacgaagccacaaggattcaaatacaaaagtggacagttcatgttggtgaactgccgagccgtatctccattcgaatggcatcctttctcaatcacatcagctcccggagacgattacctgagcgtacatatccgcactctcggtgactggacacgtaagctcaggaccgttttctccgaggtttgcaaacctcctaccgccggtaaaagcggtcttctccgagcagacggaggagatggaaacctcccgttcccgaaggtccttatcgacggtccatacggtgctcccgcacaagactacaagaaatacgacgtggtactcctcgtaggtctcggcattggagccacgcctatgatcagtatccttaaggacatcatcaacaacatgaaaggtcctgaccgcgacagcgacattgagaacaataacagtaacaacaatagtaaagggtttaagacaaggaaagcttatttctactgggtgactagggaacaaggatcattcgagtggttcaagggaataatggacgagatttcggagttagacgaggaaggaatcatcgagcttcacaattattgcacgagtgtgtacgaggaaggtgatgcaagagtggctctcattgccatgcttcagtcgttgcaacacgctaagaacggtgtggatgttgtgtcgggtacacgtgtcaagtcccacttcgctaaacctaactggagacaagtctacaagaagatcgctgttcaacatcccggcaaaagaataggtaactaatctcgaccgttaatctcgttatgtacgtgatgttgtataataattaataaagtgatgaatttagactaaatactaatatgaattttgattgcaggagtcttctactgtggaatgccaggaatgataaaggaattaaaaaatctagctttggatttttctcgaaagacaactaccaagtttgacttccacaaagagaacttctagattaattatatacgttgtagaaaaataaaacaagaaacaactatacaaataaatatttattttaaattcttttcatttttatgtaaaattatctgagttatctttttttgttcttctatatccctaccgttttgttggttactttttcactacttagtttaatgccaaattaagtataagatagtagaagtttatatagttacagctttggtgttgtaaacatgtaatcatggagttatctgtactattattttgtacttatattcgaatattaacaactaaagatagttttgatattcaatacccattactcatttaacataatgaatagagatatcaacattagatacgtcttgattatttgctcaccaatgcatttgcgtgtttaacttgtttatatgttattaatagtgttcttttagttaaaatgacaaataatttcttaactcaaaagcatcttatatcacaactctagctagattagtttagcttttcataagtcttcttgcgtttacgtctttatttatgggttgataccctattcactactttaatttgccttgcacttgggatagtttaaaagactttaaaattatgcagctagaatataatcaaaacttgatataagtatcaaaataattaaatacaattgctatcgataataatcagaaacaatcgttatgaatggttaagtttgtttccttaaaatggttacgaatgattaattttgttccttaggtaaactaaaagttcaaaaacaaatccaacctactacaatctaagaaaactgacaaagtttatggttgattacagaataggtcgcttgagcgtcaaattaagataaagaaggagacttatgtagagccggcccttgggccaaccaggcgaagcataggtttgcagctgctaataatataatttgagtttggcttttttctagaaaactttctttaagtctagtggttcaattatggtgggtacatcatcagttcatgggtttgacttttgagacaagtgagaccgaatttttttgttttttcaacaaaattctaaaatagataaaacttatgcggcccatttcattgttcacttgtaggcttgtaaaactcaaggccgggtctggagtgtgatgtcaagactcaatattataacactctacttcatatttcactattttgtgcattatctagcttccaattttctttgcatttcacagtgtatcaatagttactttagtgatgtcaagattacacttttaacacattttaagtgtagttttacaacataaacttgtgtctctaattggcaaagtgaattgctaacgagatcatgaattctgactgttgagtctgagcgaatgaaacaaatggaccaacatatgattaaggcctggagtgacatataagccaaaaaataatgctctatattgtaacacttaaaagatcttacacagtacggtctcaaggaggaagaaaacatattccgcaaagcagatccttccttcaacttcaacatattaaatgaaaacagatctaagagaccgtaatatttcgatcctagaaaataagagaactcgaaggatttatcatagacaacacaaaataagaacgtacgttagcaaagatcataatatgaatctattattcatatctattgccaacatgtttatatatatatatggatatgggtttaggtgcctcgggctagcatttcttgatacctcttgaaggacaagagtttctgaagcttcatctgcttatgaaacctagaaataaagagatccgcgacatggtcgatctcatcttctagcttgaaattctctccttcttcttccttcgaggtcctcaccatatctatcacagaactaccttgaccttcctcctccaagtccccgaagtcctcctctccttcgaacaacgtgtgcctcagatcaggatacttgtcgctttcctcctcgtgaacgtcatattcctcatgatgagccattgtggatgccttgctgttgtagaggactatagccttgttcttgtcttggtcctggtcgttatcgtcgtcttgatccgcatggcccaagaggtggtgaatcttgttggaaatggaacggaacccgagtttcttgtgtttcactagagacaacatgagtactcgtgtcttgaaagcactcgttttgttctttatggctatagattttgccttcgccatggaactcaacaatgcaacgatatgtttcatcaatgccgtagctttcttcatattttttctttgtaagagcttctataatagtgttttacttatgttttggatgttgcttaattagcatggaaaggaacattggaggtgagagcccttcggggattatatagaccatggaaaggtacggccacaagtcatggctttatgagtcttgtcgtatgtttttaaattaacggctatatgttttacttaatggcgcagcaatcttctcacagttcgccacgtggaaataagccatttgatgtagtggatcacttgctttttctagttcaaactttatgcacgttctcttttatcaaatttcatcgtgcctacaatttacgaacgtaagcatttgatatttctatattacttctttctatgataaaggatctcaagaaattaagtttatgttgatttcgtataaaaatgtggcctaacgaggttgctttgccgatgagtcgggtatgttttttcttataaagtatcatgcgacataattcatgcctactatgaatttaaaatggttattatttttcgactagaagtcatgtttggtacgtcaaaaatatggacaaagtttttgtaaagccaacatggcgtttttaacattctaaatgtttaaagggactcttgagtggttcgggtgttgaggcctctagactccggatcatacgttccaacaattggagcctctagtcaacaagtggactctagatcgcattgttgcggtatggttatgagagagcacttctgaagagcttcaacataaagaatttcgagagtaaaacatctcaaacggttttatttacgcgttttgcatcccgatcgattaatctctgaaatccaaaaattcacccccaacgagtatagttgaaatggatcgattagtctcaagtggaataactcttctgtaacttctttgtttgatttttgtttttgtgaagaatgtactatttaataagaaagattaattagagcagttgggactgagattacagaatttgtaaatgacatagatacatccacaaggaattcaaactattgtccacttcttctttgaaaagatttgattgattagcaactttgtttttaaatgtgattaactttacatacgaaagcaattgtacagctaagttatctaaataaaagtgtcatttgttacccaaaaagaagttccatcaactttgtgtaaaaatatgtttttatagaaaaaaactcagaattaggaagatgcttcagtaaagttacaaaaacagcttaagagatc

SEQ ID NO: 852 - DNA, 19742 bp, Arabidopsis thaliana
caaacgtaaattcattgtacttctctcacaactacttttactttaatttttttaatagctattcttatttactttttctaaaaatcacaaagatgagatggagaaaaagcatttgatgtttttgtataattggaaagtgtttactcacttggtctctctcacatttcaaggcgccgcgaaattgcttgctcatgatatttagctttacaagattctctttcacttagaaccacacttcaatccctatacttttctagatttctagattttagatattatacattgtcgatgttgaaaggaaaacataagatattatacattggtcttgtcatttatcaattattagttttaagattgatgtcaaaaggaatagtttcattgctcagtatccaaatttgcacaaaacgaatcgagttgtttcgattttagacaatagagtacaaccgatattaacaaagagtttcttgcaaaaaatggggttcaattgttgtagtatgtcaatatgaccatagatttcaaaaaacttctccagctcagagttttagatctcagcccgtaaaacatatttccagtcttaatgcatgttagagcctcgagccatcggataagacattcccatattagattgcagaagagataaaattggagcattgtttagaacaattcttattccaattcatcaaaccagagactaaactctcaaccaaaagctaacatcttacaaacacgtcactcaccgatgtgtagcgttcagtcctaacctagttagctaaagtttaacaacttcatcaacttaacttcataaagcaggccgaatatctcatgttaagtcaagtctgagtatcttctagtcatagatagcaatattacaattcttttgcacaagtcattaaaatttaaccaaggttgtttgttcaaattaaagaattgtaaacatgaacaagaagccagacaactgatgcaatccgagaaagatttaaacttaaaatgaaagcatattctgtttcaacaagaccaagttctgaacaattactcagctagtagttttatcatgcattcaaaatcttctcataagcagaaaaacgtcatagatatcaaaactactaaagcaaaacatctgcgaacggatgaatgattcgtgagatctcaatctcacttcttcctgaaagagcatccctcttgtagcctcgctttaccaccggtgggctggcacagaactgtctgacagtttccacataccacaacagtttgagaatggctgaacacagtggttctgcaaaataacaacaagcaattcatcacaaagtgtaacctctttacaaattcacaatcaatacttatttaagagctggaaaaattctaccaataccaaacttctagttgataaaacagcatttaagctgagcaaaatcgacaattcacaactgattcaataagaaaacattcaaaataaggtatctaaaacactagtttcgtaccaatctatatattcaagaatacaacattcaaatcaatatgtttttaagtgtaacctcttcacatcaatacaaattcaaatgatgaacaatttcttccaaataccaatcaataggttcaataaaactttattcaaaataagcaaaaccaaaatcactactaatctaaaacagtgaaagctttcctctttataaaacaatctttattcaaatccaataccaaacaacattgttaagactctatacaaaattagtaaactcacatgttgaagcatccctgacacttaacatcctgaaaaaaatcacacaaacaatacagaatcagattcatttcatcgcatcaaatgtaatacaaatcagatttcataaaagaaaacagaaaacagtaccatgaagaaggagttgggagattgcacgagacgcttgagcttatgctttctcttctcaagctcaggtggcggatgaaggagatcgatgtcgttttggagcacctaatcaacagatccataaaaaaaaaactcagagattacagaggaaagtgaaagagagaggaaaatcaagaacaaggagagatatttcaccatgattgcttgtggaaaggcggcgaaagcgaatttggttgatgaaaccctagaagcgaagagacggagactgcagctttagcttcaatctaagtatatatgtctgtgggtgacgaaatgtgacacacaaaacattgggccttataggcccagcccattgtacatataaacaagtaggagtgggagaaattcggcttagcaatttgtatgctcttactttggaaaactaaaaaacgtaaacaaaaagtgttatgtatagttgaatatttatcaccattaaccccaaaagattaattgaaaaggatagatttgtaacaataaactagatatcctctcaatatgtacaacttaaacttaggtctcactgagagttgtctttatgtcacattagtgttccctcatagctccaagtcacgttggtttactctatgcggcagaccaactcccctaacccttcctcaagatggtcaattctttgctatagtctatctatcctaacaaatcgtactaagaagtcgagtggcaacgtactggtctgagtcctagcgcataactttttttctccacgtcattggatttctgccacaattggttctaatatctacacttgcatttgtcgcatatagaacacagtaatccatggtatcattaaagcttacaacttctttcaacagagtatagagtaaaaacttcgttgaaactataaactatactagaatttgacccgcggtacaccgcggggctaattttttaagaaaatgtatatattgagtgaaattcatattgttgaattgtagattatgtatttgggtttacggatattttttttggtagggtgggtttacatttataatatctgttttcttagtatattagttggtattacgattaaaatgtatagtgtatataataaaagcatgataaactatattatgtaaaattctaaaaaaaaattcatcttggattttagactgaataatttgtgaaaaatacatgacttttgtaatgtggtaagagtagtatgtgtttttagccgttatgtatcttggattctagattttaacccgcggtacatatcttggacgatttttctttataaagttagtatatataaaagtttgtaaattgtatctataaaatatttttattttatagtttacaattgttattaagtaacgtcctgccaaactcatcccgtaaaaataatctatttattttattaatgttgatcttatttatgatatgtttgtgaatcattgtctaaatattttagtcgatgcgggacgctgaacccacacattttttgtcaattggttaatatatgttcatttttaaaatttcgaattacaaaatatgacggaaaaaaattttggtgacggaattttttttgagatttttttaaactctatatattatatgatgatgtcaaaaaattgtgatatattaaactttttataaatttaaatattagtaatgttttataaagttgaaatatataaataataatatttaaaaaattaattttttttttgctttttaggtaatgacataataactctaaaaatgtacttcaattttttactatggataatgttataaataaatctttagtttaatcacaattagtgattgatatacttgggttttggattttttcacgtcatttaataacctaaatttgggtagttttgtaaacattatttgaaacaataatagtttacaaaatcgttcatgttttttggtttgttacaaaaattttgttttaattctttgcaaattattcgcagaaatttaattcaaataattcaaactgtggttgttttaagatttcgttgctagagaatatatgattttattgtgtgttgctagagtaaaggaaataccatatatatcgggtataatcggtttgggtaataagtattagtcgcaagattttaattcaagtaaataaattcggtagtatgtcattgtaaataagtgcaaaatagagaatatatttgcaaaaatagttccaaaaaaaaatatgtagatatcagaagaaaacaaaatgcgggctttgatgccgcatttaattttccctttatataagactcgcttctgatatttcaccattccagtgtataggcatctcgttcgtcgcatagtgattcatctccacagacgaaagggtatctgttggtggtcctttgagttcttcttcatcttccactgagactaagttatcatcaaaaacatcgttcttgcaatctacataagttttcgattcttctgtgaagagtacctcaaagaaatacttgctgtctgagtctttattctctaaattaaatttcacatccaggactggtgttaggaaatcgaccgaagaagtagtcggttgaaaacctagaacactcttcaagacatcatccattgaaggctctcctttgcattttgcggtagttacatttgaactctcgagctcgtgaatcagggaatcaggttccgtgggtttataactgaggttttccctttctgtgtaacaatcagcttttgtgcttgatgttaccgtctcttcatctaaagcattgtcgctgacgctaaccacagtctcagcttcctcatctcctccaaaactatcatccagttttttaaaaactccatacatcgttccatgagaatcgtctggagtaattccgggctctttctgtgacgaagtagagctctccaaggaagaagagtacctgttttcagactcctctgctgcaacttggctatcgtctggatgggcactcgtcccaggtttctcttctatctccacatcatcttcacttgaaaattctggggctgtaattacgagggcttgactgtattttccatcggtgatcgaatgtgaagacaataacccagcaagtgcagatgctaaagcatcatttatagacaacgaatgttttggtttctcttcaaatgaatgaccaacctcctcattactgatctcaggttcagcagaaatcatctcattccctgagattgagctattttcactctccagttccacagactttgaaagaatattatcaagcctgttcttcggtagtacaacagcacaatcttcactgttgtctatactagaggagtcaggaactacatccgtgtttttagtcaatccatcactctcatcggtatcaggagttttatcagtatcactgcgcagagaatcttgattgggtattttcgttcgaaaacccaaatcagattcaaatgatttctttcctagctgttcgagtttcttctcaactaactggagccttgcatcaatactattaataggtttcaacatctgatcttcaaatcttatcaagatagtttctatcatacttaccttgttaacaagctgattcagaatagtctccacattattgcaaggtatagcaggcttgctttctgctccagatactcgtgttgctgcatcaacctgctttgcaacagtatcaactaaaactggtgagctcactcctatctgatcagtatttcctatagctactggatctgtactgttggacttgtcggaaacttgtatatcccgttcttttctgacatcttttcctcgagatagctgcaaaagagcaggcataaacatagccatcaacgaactactagatgaatttcctgttccagttgcttcttccttctctgactcacttggatcaacaggatcagcaaatacataaacttcatctacaagtgcacatcttttatcctgaagggagaggagacgaactgtaatcgaagtgcaaggttccgcatcattgatctccgcagtagcttcataaaaatcctgaaaaaagcattaccacattaacatcaacaaatgtgattttacttgtgcaaaaatatttgttacctgtttttcattattcaacagagaatcatcactagctttcacttcaacccaatcatcttcgctcgtccgtccattaccattatctgcaaccttcctctcgatcaaatcctttactggtttagaatcagctgactctgtaagagggatctgaagcacttcttcatctctaattgcaacaccacatcgaacagtacacagatattccttatcatgtcgtcgctttttcgtgtaatacacttcgtatactcgtgcactacttcggatgtagatttgccttaattcatgttcttgtgcaaatgtaactgcaaccaaaaccacacacatttcacaaaacaccaaaaaaattatcatcaattttatcgtattaacactatcgatctacttcaaactaacaattagaggtttaataacaccggatcggagtgtatttttcagaatctcggagaagaacgaagacaaattaaggaccgtacttgtaatttcacaaggctcgccgttgggaaccggagggagaagaagtaacggggatttggttacatgatcgacggcggcagagatgattccgtcgtcagattcggggtttgcagtgaaggaggattcaaatgagatggcgtctatgagtgtaccgtcgacgagtttccagtttgtcgtagaattgaaatcgttatcgtgattgcttgcacccatagctctttctcgctttgattgatttgggaagattttgggtttacttattttaccaaaacaaagaaaaaggattttgggtttatatttgaggaagatttttggatccaataaaatgaagatgattatataaatttacattagaatttttttaatatgttaacttaacttagatactctgtttaagatagtttacaaaaggaattataaagaatgaagggaatcaagcattattgcaacaataataccaagtagaggaaacttaatttctcgagtggtatgactaaaatagttttttcttatgacaaacaatagttgaaatccttaagaattatttactaattttaaaactaaatttttttctccctctgtttttttatttgatgtttagaagaattttttttttctaaatttgatgatgtttcaacttttaatacaaaattaattagtttttaattggttttgacgatacatattttgcagattattttttattggttgactcatgaatttggttagataataaatgatgttttagtttaaaataaacaaaaaattaaataatttttaatatatgtattcttgtaaaacattaaataaaaaaataatggaagaagtataagaaaatatttattcatggttgagatgaagatcacttaagtgtggcagatttacattattgttactaaaacagctgtgcactgattatacgatcgttgacttgatattcaaagttatcaacttcaattattggtaatttaatattcatacaaaatcatcaataagatacgcacttgtttcaattttggttatttgagctagttccgatccagaactcgattcacaaacgcaaatcttgcattttcaactttataaaacgtttaaattatttttaatatctaaattctataaaagtttacagtagtgataataaagataaactctataaaatatatatatatatatatatatatatatgaaagcaaactgttaaattaactcgaattatacgattttaaaataaaagtattatttaaaataaaattaacaaagttactttaaaagcatttactttgaaattaattacttttcatttgtttttttctgaggtaaaaacctatgatttgttttagtatttttctattttgtctctttttaaaaattagaaaatatctacatatacatttttgcagttattttaacaaataaatcctgcagttgaacttatttataatagctgtcactggcatttattatttagttttacaaaataataaaacttttcataggactaatttgtttctaaaaatttctacacaatcttttcatatatcttcaaaagcaaaattccgtaaattttacttcacaaaatatgcataaatccgatttatagcaaatatttatattaacattttgcacagcaataaaaatacaaatttataataatgaaaatattcacataaaaatcatatacacatacagaaaaagaactatatatatcatcatttaaaccgttactttatttaaataaataaaaaacacaaaagcttgaaatcatatatatatatagtagaaatcatatagcttattatattaatgagttaactcatttactattaaacaattaaattaaatgggttcatgaattgaaaatgagttgagttgtgttgggttaaacattttgaccaagatagataagaagaaatttaactagagagtatcgtagatgatatcgagatgagtaaccagaagtttatttacatcttctttctttgaatgatttcaccttatttgtcttcttttaaactctttgatgcctctcgtgctattagtgttcatttataatcgtagattacacgagaagagagagaaaaaaggtgaaagtaaaaaataacactaaaaaaccaatttatctcctgaaccaattaatgctaaaatgacatgtataagtcttttacaaaccaaaaaaaaactctaaagtaaggtgctttcctttaacttaattaacaattttgatttaattgtttggctttgttcttaaggacacacctttctagagtttttctaggtcaccaccagacttttaaaaaaaatgaaagtaagaaaaaaaaacatgattgactatagaaaaactggaaagattttagaatactctcaaaatcttgaaagtcccttaccaaccattctacagtgttaatcgcccaaggtgacaaactaaaatatttatatcagtaggcattttatattctaagcgtgttaatcgcccaaggtgacaatctaaaagaattgcccatgattgtttctccgtctctctagctattacattcatatccagattttattgtaagatttgtcacaatactaaagttatatcacatcacgtaatggaacatgtataatactgaagaatgaaataaaaatcaattttaaaattgtgtttagagggaataactaaaaatgcaaaatttacataccaaactcttaacaatatggaaaataataacaacctaatcatttacttgttaataaatcagaaaatttatcaatatgtaatgttattgaaattgaaaataaagttttgttggaagagctataattatcaaaccaaaccaaccaaactcaaaccgatccaaaccaaactaaagtctacacacaatccatttggttgatcttttttcaatatgaatggtttggtttgaaaccaaaccaaaccaataaccgaaactgttttcaaatccattttcttcaacccgaattgtttggtttggtctaaataaataatattataactctaaattctaaaattgtacaagttttttttttttttttcaaaaactaatctgaaatggaccgaaccaacactatctgaactgaaaccaaaacaaatagttataaaatcctaatggataataaatttcctatctgaattatccgaatccaaaaaattcagaattgaatccgatctaaaatccgaatgtccagcctttgcccacccctacaacaaattacattatagatcttcaaaccaagatttatttaagcgcacatttcaaatcttcaacttcatcacttttcaatgcttttttcaagaatacatttttttttgtccattttcaaaaataatcccttttatctaaaaaactaaattgttcttgttttggtgagagcacataatgaattttaccaatactaaattgtttttgacactaaaattttattttctgccaaaaattatttttcccctaggtgaaatatcttccatcaaaaaattttctccacaaaatttccttccaagtttttcgtaattcgctaaaaaagtcttgtaaattttttataaactcttgtaaactttaaaaacctttttaaaatatttcaaacctcttgtaaatcctttgaaaaccttttaaaaatatttcaaacctcttgtaaatcctttgaaaacctttaaaattctttgtaaaatttttaaaaaatttaaatctttttaaaaccttttataagctttgtatatctcaagattttaagttttaataaaaccctaaaaatcatttcaaaactctaataaaaatcttttaaaacattgtaaattattttaaaacctttataaatacttgaaaatgttttaaaccagttgaacatcatatcgtttaaaatttttatgattcctttaaatatccttgtaaatcttttgaaaacttttggaatttttttcaaaattttgaaaagtttttgtaattcttttaaaacatttgtaaaatcagtttaaagcatttataaatccttttaaaatatttgtaaatatgtttcccaaaacgttcctcgcaaaaaaattacgggttaacttaacttttggcggaataaaaaaatattcttggaaattttttgacagaaaattccttttattttattttgttgacttatatatttttcaaataataattatttttttaaaaaagtgaaacgagcaaaaaagagacaattttgaaaggataccaaaaaaggtatttttaacaattccttttagtttatttcataatagctgtgtactttattatacgatcattgacttatgacttattattttcaataattattcatataaaatcagctattaaatacatacatgttacatggtgatttgatctaatctccaatccatcttttgattccatcattaacatattctttaactcgattcaaaaccgcaaatcttgcatccacatactaactgcttagttatgttcccacccaatcttgtatcgtgtcagtgattactccgatttgctacagaaatatggcaatgcttgtagcatgcaggcatctccaacacttaaaattagaataataataatagagaaattcacaaagagaaaagattaatcaggactactactaaaagtatcttcaaaattattattattctaatttttttttctagcttgttaaacctcggtgaactagaaacaaatataacaagtgactaaaattataatagtcaaatcagagtttctgcagaaaaattaatcacaaaatcagtggcacctcaatagaaaaaatgtatttgtaaactaaatttactagatgataaaaaatatgtttgttttcattaaaaatattttcgtgtttatacacgccaattttcatcgtaagattttcaaatctcagctttcattttgaatcatatatactggcttctcaaataagtgaataacttttgaaagatatacatcagcatatttaaattattccattacagctgtaaaatttattatatgatcgttgactttagaatcaaatatatcatcaccaattattattcatacaaaatcattaataaaatacacgcatgtttcatttttgcttatttaatcttgttccagcttttgatttcatgtctttaaaatatgctaacccccgcattaaaatattcagtaacgcaaatcttgcatccatatactaaccaatattgcttttagctttaggctttagcctcatccctcatgtagatcttaagttgaagccaaatagcgtaagagttgatttcatgtctttaaaatatgctaagccccgcatttagaatccaaatctgacttaaagcattaagttatatcgggtgatgcaatctgaataagatacaagtataggatatttcatttattataaaaacacttaaaacaaagttacatcttatggataaaattttgaaaacataaggttacatcttacggataacattttgaaaacatttaaaagaaagttacatcttaaatccaatcaacaccagctcagtaacagtaatataagaaattgacatatatctctcgtcattagatcaatacacttggatttggggaggcaaaggcaagcagttctgtgctctgctccaacagtaacatgttctcttgaggcaatgtcacccatgcttcgattccttgtccgtctttagaatcgatcaacacggttacatagtctagattcggagaaacagatccagctacccaaaccggagatccccacccgaagcaagcatcataaagaggaatcttgcaccagctagttacagaatgcatgtcatgatcttcgcggttaaacttggaattaatgatttcaccaaacaatctccaacctatagtcattgatgacccttcctcatcttgaaccaaaccggataaatcctcggctcttttttgtagttccttaacagtttctacaatatccatcccggctttcccatccaagattaaggagttaaacaagaggttaccgatttggttttcagacaaaagggaaggtatcttggtgcgcaagttagccggttggaacagagctttctcacgaattgtgtctgtcgatgcagtcacaacacatttccatataagtgaagtcacgctctggacccgcgtgggtcgaggcacgacatcactagcgactttgttcctgagctcttcgattttagatgctacaaacacaaatctcttcgtgacacttgttctgttaactacttcccctggaattttaatggcttcatttgctgcggggtaaagttttgtggaacaaaagtcaggactggccaccaagtcgctctctcctctagctgtggctgcccaagcctgtaagaaaatcgagagagaggctgcatcggcgagcctatgggagatgcagagtcctatggccatgccaccacatcggaagtaggttgctttcacaagaagcaatggccatgtaggagcgggctcgtcatctacaggtagcaactgtttgagtgattcggtatccggggatctcagaaaaccagagagatcgcagttatcgacgcgtgcctccacaaagacggctccttcgtcggtactcttgatggtgactccattgactctaccggccaaagggtggaattttgtcaagatctcggacagggaagttttgagagtatgagacgtttgttcttgcgagatcaaatcatctttggtgtagaaaagaaaggcaacggcgtaaaccggaggcattagtatatccataatagagagttgaagagttgagagatcagttggagttgttgcagatggcttaatgatctctttaccaatagtttctaccttcatggtgtccatcgattaatcttcctccttccctttctttgttttgttttggttctctccactttgaacgaagagatctatttcttttatagaactctacagtttctttttctttttttttgttggttgtgtgcaaaagaagtcttcagttttgtaagttttaagaggtcctacttaattaaattctatttaggttaaaaatgtatataattaccaactatctataaactaagaaaaatatgttagtttgggttgtctctgcattttttttactctttactctgttttgctactctgtctttgttcctgtctgtaccttttccttggtttcgttgactaattcattcatgtaacaaaacaaaaacaaaatatgttaaaatttcttacaaccgaaacactgattgttataagaaaaattcagcttttaatattttatttatttgaaagttaaactgaaatatatctatatatacatttttggaggggatttttgaagataatgttgaacatttgagccataattcaacaattaattcaaatgggtgagttttacccggtttaactctgttcggatcctggataacatgtttaattctgttctgatattggataacattaatttttggaaaagttacctaaaaactaataattaaaaacgaaaattaatgatttaatataaacaatatctctaaactaaccatatttcttatttaccttaactaatttcctaaaatatttctacctaatttaaacataaatatataattcttctttcatttttatttgatcttatactttatttattttgaatttatataaaatatatatagttaataaaatattatatttttttctgaatatgatgtaattcaaagtttttaaaacggacatatattattcaacctatgaagaaataatatgtgtacaatgtcccagatcgcttagaaaaattggacaatggttcagacccatattataaaaggaccaaaatgattctgattacgaatgagcaggaagcttgatttatcaggcgtccaaaattaaaatagttatccgattttactcggatttattattttaaagaattgaaactttaaaatgtttcaagaaattataaatattataactttatcaaaagttaaatattataattttaaaaactttttataaagtttatctttaaattaaaatggtttgtttcctagggttatttattttaaaaaattgaaactttaaaaagtttaaaaaattataaattaaattttacaagaaatttaaacaatataaaagatattaatacgggacgatatactgcgagagaaatcttagatataacactcaaaattcaatgatgaagtttgggtcaatattaatcttttttgaagtttttaattttataaatatttgaaatttataataaaatgacaaatttgtgtttaatttcacgggacgggttatatggtgtgacgggtttgagtggataataacatgggatagtatgctatggagaaaaacatataatgacaatcataatataattatataatcttaaacactaaacaaaattaacaatattaaaaaaaaaacacttaaaactttaatttttttaaaacacattttgattcttttataagaaatttaaatattataaatatttaaactttatactacgggttaaattttagaattgactgtttgggttgataagaatttgcgatagaactaggagttaaaatgacaatcaaaatataattatacaattaaatactaccacgagtgaaatcctagaattgacgagtttgaatcgatattaatataggatggtgtactacgggtgatattttagaattgactggtttgggttgataataatttgcgatagaattaggagtgaaatcctagaatgacaattaaaatataattatacaattaaatactaccacgagtgaaatcctagaattgacgggcttgattcgatattaatatgggatggtgtactacgggtgatattttagaattgactggtttgggttgataataatttgcgatagaattaggagtgaaatcttagaatgacaattaaaatataattatacaattaaatactaccaagggtgaaatcctagaattgacgggtttgattcgatattaatatgggatggtgtactacgagtgaaatccgagaaacaacaatcaaaatacaattatacaatattaaacatttaacaaaataaacaaatacaacttaaaactttaaaatttgagttataaaatttcttctcgcggtaaattatacattaaatcaaacaatagcataaatttattaaattatcctaaaaaatattcaattattttttatttaataaaaatatagacccgcagtataccgcgggttaatatctagtagataaactatttatttttcactatcattattaaactttttgtcataagtttggtaaaccgtaaaggcgtaaactaggttttattttaactaggtgaacatacgtgctacatgggaattgttgttttatatatatatatatatattcaaaatcataatcttttttactatcataaatacatacacaacatagtatatattgacaatgatatgtagttatgtttacttacatgtggtttgtaacttgagtatttgactaacttgaatctaaacaaacaattccttattcaacttactctctcatgatctaatactccagccacgcacatcatgatagactcatgattaaatactaaattgacataatttaaacaaaatatttgtaataactaattatttgtttcaagttttttgacaatctgacattctttgacttcaattgtcataaatggaaataagttgtctgtgtatcatgaataaacacaaactcaatttagtatgcagtgttcaactcatcaactctatcatctgttcttacatacaaagtagacacattatttatgcagtcaaagagaaagagaaatatgatcacaagaaatggtagtaacaaaaaaaaaaagagaaaagatcatgaaaaaaagtctatgatgttccacaacaaccttttcctttagattcagtctcttctccagcaacaacaatcttagttccttgcaaaagagaagagtctcctccagattctccttcctcattagcaacaagattctttttactcacaattcgatatatttccgtcaaaaccgtgaggaacgaaggctcaacattgtttgaatccaaggctgatgtctccatgaaaaacagattttctctttgagcaaattctttagcatcctcggttggtacagctcgaagtgtcccgagatcagttttgtttcctattagcataatcacaatgtttttgtcagcatgtcctctcaattcttctaaccatctcgctacatgatcaaacgactgtcgttttgttatatcgtaaactaacattgcccctactgctcctctgtagtatgcactcgtcaccgctcgatacctaaacaaaatctccacaatcagaaatattgatctcatggtacgaagagttcttactatgaacctattcgtttgacaatcgttggcgactacgacatgttattatgttcactgaataaataagccactacaaattttggtctatatacgacaaagttttggtcaaagtccttagcgactgccaagcgaaattcgaagcaaccaaaattttcaacttctaagaactaaaacaaggatctacgatggtaaattatagataggaaaatttaccgttcttgaccagcagtgtcccatatctgagctttgatagttttacgatcgatttcaagtgttcttgtctgaaactcgacaccgatcgttgctttagattcgatactgaactcgtttcttgaaaacctagcgagaagctgagatttaccaacagcagagtcgccgatcaagactaccttgaacacataatctatcttctgattgaaattgctctgaaattttgacatcgttcacaccaaaatcacaagcttatagattttagaggcgatagaaatgacttagttgtaatataagatctctgatgtaataagaagaggagagatctaaaagatgaaagtgggttgcgacttgtgaagcatcgggagacgtgaagggaagaaacgaggagggaacaccaacgaaagtgggtcccgccttttgtttcctttttcttttcattcctttttgacgtcattcttttttttttttttgcaaatctcagcgaccacaaaaaaacacacttaaaatccaatttcaccctctctcgtctacctccggtcgtctcgccgttctcctcctcctccactatagctgcctgtattcgtcttctctatcaccgtaagttatctttcgatgctttctaagctattcctcttcttctttagatattcttcaacatcgtcgcttagacccagccggtacaacattgtgctaaaattatgcttaattcggttcagtgatttctctcctgtgacaggatttttcctaatccgttttacttattctttggtcttattaaataaaattcgaaaactttgattaggtctggaattgatgttttttaagtttgacatttaacttgtttgaacaatgttttgtatcttctgcagtcaagttccgctttatgattagtttgagttaagataaacctgttgaaatgttatcttgttttgatacaaaaggtctttgatttgaatcaatccataagaacgagcttgagactcagttatgtggcatgttaaagttcatatatgattgagactgagtgatggattatatgcaattgtttttctactgtttcataccattatggtaccaaaagtacttaaattcaattgtgtcgtgaagctaatgtttactacattctttgtgtagctcgttatctggatctgaaatattaggtgatacgaagccatgacagtttcagaagcttatagtccacctctgttcaggtatttgcttaagggttctgcttttctattttttgataattatgctcattgacagcgaatgatcttaagctccctgtcgttttttaaaattcgtattcagtatagccccgatgatgggatggacagacaatcattacagaactctagcgcgtcttataacaaaacacgcatggctctacactgaaatgttagctgctgaaaccattgtctatcaagaagataacctggtacttaaatggataagggtttcattttcttctttttttgcttaaccctgcagatacattttgaatttatgacgaatggatgcatgtgtttactcttgtaatgctcaggacagctttttggcattctctccagaccaacatcccatcgttcttcaaattggtggaagaaacttggaaaatttggctaaagcaaccagacttgctaatgcttacgcctatgatgaaattaattttaagtaggtttcctttccgttgagttatcataacaaaattggtaccatttccatcccagtaagctttcgtatattgacacgccggtttgttttgtagctgtggatgtcctagcccaaaagtaagtggacgaggttgttttggtgctcttcttatgcttgacccgaagtttgttggtgaggctatgtctgtcattgcagccaataccaatgcagctgtcactgtcaaatgtcgaataggtgttgatgatcatgattcatataatgagctttgtaagtttgtccttccacctatctttcgagttatatcacatgcctcgtgtttttattaaacaacggcaagtaacaccttttgcggagttcattattacataccttttccattcttttttttttcttttcaggtgatttcattcatatagtttcttcattatctcctactaagcatttcatcatacattcgcggaaggcattactgtctggacttagcccgtcagataaccgtcgaattccgcccttaaagtgtgtgcagaaaggcttccattactcttatggtcttctacttggaagatatattgctttaatactgcttgtttccatacatgtctcacgttttcatctgcacttctgcttctcaaatgcagatacgagtttttctttgcccttttgcgtgatttcccggacttaaagttcacaataaatggaggcataaactctgtggttgaggtgagctttctaaaactgatctttaatatgattcaaagattgcaactagcgtttgaaagaccagatctttacttcttgcattgaactgtaggcagatgccgcattaaggtctggagctcatggcgttatgcttgggcgtgctgtatactacaagtatgtaaagccttttgctgttaaacatcatatgagagttttgttccttttataatcttttgactgatttatgggaatatatcctggctatgcagtccctggcacattttgggacacgtcgatactgtagtttacggatctccaagcagtggaattacaaggcgacaggttttgagaaagattgattttctgaaataaaatattctgtaactaacatct

SEQ ID NO: 853 - DNA, 83373 bp, Arabidopsis thaliana
gatctgaaatatgtgatttgttttgttgtctttaactgattaataggttcttgaaaaatataaactatatggagagtctgttctcgggaaatatggaaaaggccgaccaaatcttcgagatatagtgagggtaatggtctttctaagtctcgttattaagttatatttccgatgatacaagcgttataacatgagcacaactttgctgcagccattgatcaatttgttccactcggagtctggaaatggccagtggaaacgtagaaccgatgctgctctcttgcactgcaccgttagtgatttcactgacactcttcttttttacttgctatcaaactcttgtcaccgtgttaactcacttcttatgttgtgcagaccttacaatcattcttagacgaagtgttaccagcaatacccgactatgtcctcgattcatctgctgtcaaagaggcgactggacgtgaagatctatttgcagatgtacaacgtttgttgcctcctccttacgaaaaagaatctttcaaagcattggaaaggataccaacgagacctgtgattcttgatgaggaatgacaaatctattttttttcttagccatacttgaaacatcacgaggatgaagattcgactttgtgcatgcagctacaaagatgtgatgttattttgaatctattttgatcactggatttgaaagatcaggaaaagaaaaaacgtagaagaaagcaagagatatgtaatatgtttggatcaaatgtagtatcagatgttttgcaagaaaagttttcggaaatccacttaattctatgtttttcacacttaattatggtagactttggatggtatttgttgacagaatttagtacatcatcaattttttaaaattaatttttaactataatatctaggggtatcaaaatgggtaacccaactcaactcataatcaaatgagtttagggttaaatgagttatgagtttagggttaaatgagttatgagttgacccaactcatttaattagatgggttgagttgttaaatgggctaacccatttaagtaataatttaattaattattattataaaacaataataaataattatcatcaaacttaggatatttacggattccactttttacggatttacgtttttggcgggaaaaccacgggtttacattttttggcggaaaattatgggtttacgtttttggcgggaaaatcatgggtttacgtttttggcgggaaaatcacggacttacgtttttggcgggaaaatcatgggtttacgtttttggcgggaaaatcacggacttacgtttttggcgggaaaatcacgggtttacgtttttggcgggaaaatcacgggtttacgtttttggcgggaaaatcatgggtttacgtttttggtgggaaaattacgggtttatgttttttgaagggaaaaattatgagtttacgtttttggcgggaaaattacggatttacgtttttggcgggaaaattacgggtttacgttttttggcgggaaaattatgagtttacgtttttggcgggaaaattacagatttacgtttttggcgagaaaatcacaggtttatgtttttggcgggaaaattacgggtttacgtttttggcaggaaaatcacgggtttatgtttttggcgggaaaattatggatttacgtttttggcggaaaaatctcgggtttacgtttttggcggaaaaatcacgggtttaagtttttggtaggaaaatcacgggtttatgttttttggtggaaaattacgagtttacttttttctcaatttcatcgtttgtatatttaagaaattttgaaaaatattgattttattaaattggtttagttgtgttggttaaacttaaattggcattggtttaaagattttagttggtttaattcaattttacaaaacttgatgggttaattgggtaaaccattgaaaccattacaacccaactcattttactcatcaaaccaattgactcatcaactcatttgagtcaaaattttgaactcattagggttcacgggttgagttgagttgagttgacccatgaattttgacccattttgacacccctacttaaactacatattgtttatcaaaataaaaacacctattagattgagacatttcaaaaaattatggttgtcgcaattatcgtaggcgattagagtaaggtagtaagcacacttatgatttaagaatgttaattttcaaatttcaattttttttttgtcagcatcttaaattattgttgctcaaaagaatcattcatgtgaaatgttgttttcattaggtagtatagtgcggttttgaatgaactcttctttccaaattatcagttctaatatttgtaatacgaaaaattaaagataaaagttagaaaaaatttcctcgtcgatttgaatctcttccagatatactaaaaatgctagtcattagttggagaatacatcatcttcaaaaatcagaacagtcggaaaaaaaagctatgtcttggttgttatcttcaatcatacatctcatcgtgcaaacaaatgtttccacttcgttatgtagtgaagttaggtttcttacactatctccaatagtcacttctattttttcttcttttttataggtgattttattttagagtcattttattctaatagatacctccaaaatagaaaaatatataataattttagtttttactcaatgattcgatatctatttctattttttccatttatattaaagaaaaatttatttcaaaaacatctgttagaacaaaatatctctatataaaaagaaatataagtgactattgaagatgctattaagagattaactgctctcattgttagacctgacgttcaaatttctaatcttatgttctaagaatttacagacctaacgtcaaataacttttttcatttaaaaatttaaaactagaaaagtattaaatgaagaaaaatcgtatattcgtgaccagtctgtaatgtctacttaattctccgtatcgtttatttgattcggaaatctcaaattaggtaagcaagattccttccttatattaaaattttgaatctgactatcatttgatttgactttgtaaacgtctagcagacattagaaaataagaacgtgaaacttgcatgtatagaacaagatttgttgtttatcaaacacatgtctatcatactcaatttttgttggtaatttttatgcagtacaatttttaaaaaatacctttgtatgtacttactttcgtcaacttatcacaaactcaaaaggttttgacttaagatttattaatctcttaaatcattaacaatttatcactaaaaccattaattaactttcccctttagttttaaaattggtcaataactcttaaggatttcaactattatttgtctttaaaaaaaaactattttagtaataccactggagaaaatatactatttttgtcctaaatcctaaactctaaacccaaaattacactatttctcctgaggaacaaaatactcaaacatccatattcttggtttttggttttatgaccgccgaagctcaaagaacctacttttcttcactttttagtttctatcatccaattacgtgctcacttttaacctaaaagattttcaaatgaccaaaataacttacattttatcatccaattataatattccatgattaaatcaatgttaatttaaaagattgcatatcgaaggtgtgtaaagagcaaaatttaaagttttagatattaaatcgtacgctcttattattttttcaatggtgtcgttcaatgagttttcttggggatttttccctataaataaagcattaacataatatagagggacatttgtatcttcaagcttaaccaatatcacgtgtctaaaattttctgctcttgtttcactaaaacgttgacttttagataatggaactcaatctagaggtgatccaaagagaagtgatcaaaccttcatcacctgcacctcatgatcgccttcaactatcagtcatcgattttggcattgcagaagcttgcgtgcccatgatcttcttctacaacctcgcggatcttgcggaaaagtccccggatattgtctcaacaaggctgagaagctctctatcccaggcgctgtcacgtttctatcctctcgctggaaaaaaagaaggtgtctccatcagctgtaacgacgaaggagctgtgttcacagaggcacgcacaaatctcctcttgtctgagttcctaagaaacatcgatatcaactctctaaagattttgattccgacactcgcaccaggagaatctctggattctcggccgttgctgagtgtccaggctactttcttcgggtcgggatcaggtcttgctgttgggatctgcgtctctcactgtatctgtgacgcagcctcagtgtctacgtttgtccgaggctgggctgcaacagccagaggggattctaatgatgagttgagtactcctcaatttgcagaggtggccatccatcctccagctgatatctctattcatggctcacctttcaatgccttgtccgaggttagagaaaaatgtgtcacaaatcggtttgtgtttgaatcagataagatcacaaagctcaaaatcgtggccgccagcaagagtgtgccgtcccctacacgtgtggaagccgtcatgtcacttatatggcgatgtgccagaaatgcctcacacgctaacttgatcgtcccaagggccacaatgatgactcaatccatggacttgcggcttagaattcctactaatgttttgtcacctgacgcgattggaaacttacaaggggtattctttctcaaaagaggcccagggagcgagatagaaatcagtgaagtcgtggctgagtttaggaaggagaaagaagagttcaatgagatgataaaagaaaatgttaatggcggccatactaacactacacttggtcagaaaatcatgagtggtattgcaaattacatgtcggagttgaagcccaacatagatacgtacaccatgtctagttggtgcagaaaggctttttatgaggtcgatttcggatggggtcgtccagcttgggttggactcggccatcaagatatccaggatggtgtgatgtatgtcctgttggtggatgctaaggatggtgaaggtgttgaagtatgggtaggcatacctgaacaagacatggcagcttttgtctgtgaccaagaattgctttcttatgcatctttaaatcccccagtcctgatctaagcacgtaccatgatatacatcaagattgtccaaactttgtcatgcatgaattgattgttatcgcacattgctgctctatgtttctttgaatatttacttttgcatttcgttatgtttgcttttatcaaccaaggaggtcactcctttttcatattcgtttactatttactctcttaaatttatggtgtttatcttctttttttttttttttttaatgcaatctagttgtatactcttatttacagatatctacgtacgcacaaggtaattattctactacacaatgcgtttgttgtgagatagggaaaaaaaaaaaccccctactaaaatagatgtttttcaatcacaaatttagcaaacatgatcaaaaacaaataaagaacttgcacaaaaaagttcagaaatctgaatgtagaccacaacactaagaaaaacaattgatgaactatcaaaaatagctatttttgcaaatcacccattttacattcatgctaaaaaaaaaaagaacatggaagaatctgaaggcagattagttcagattctaaaaatactatgggggtctagtcctaaatactatggtagatatatatatcactttataatgcatcaagggatacattcaaacctgagaaacttcacaaaacccaacccgttcaaaaacttgttagtcatttgccaaatcaacagccatgcattttaagaaacaatgattacgtggaaactataggcactaatatggagtatcaacatgcacaacatgtttactcgttggttagagatgaataaaggtgatcaagaagctcgaaatctgacataccttcaatttccaacgaaatttgtatggaacaaaagttcacagaattggaaagacgtaaaattggtacatcactaggaagaataaataatatatatccctcatctggtgagttatattatcttcgaatgttaatcaattataaaaaaagaccaacaagttatgaagatagtcttattatagatggtataactcataaatctttcaaagatgcatctgttgcaatgggtctattagtaggagatgaagagtggcatgaggcgatgaaagaagcctctctttgggctacaaaaaatcagttgcgtcaattatttgccatattattagctaactctgaagttacaaatcctttacaattatggaattcacattggaaagatctgagcgaagacatgcctttcgagcataggaagttaactaatttaaatgatgaggaaatgcagtgttatagtgtaatggagttcgagtcatttttttaaaactattatcggtcatttgttgattattccaacatgccaaacttaaacagctacagtttatcaaccaagttatataacccaatgataaagttcgattgcatgaaggaaaaaaaaaaaaaaaaagagttgatttttagagacttttttgatgtaagaagtggagaacataaacgatgtattcatcaacataacttccttccaaacttcccaactacggtgaactatgatattgagaagttggctccaacatttgtgagagagggacccatcgtaaacatcacatcagattcttaagcttttcatttcttttgatatacaatttttggttttgttatttgtaataataataataaaaataataataaaatattatatttttggatctctatctcggccaccggagaattgttctgatttgcttccgcaatgcaattttgctggtttggtacagtttctgaaatctctctctaagcatatagcttctagatatctttgcgtcgatgatgctgttgtgtcatttggagttttttcggactgtgagtgtgcctgtagacagatggtgatttggttagaaaacgttcaacagaatcttgaactttggtgctcacgttgttgactttggtgctttacttatagtaaccatggtttggtatgtggtttactatggtcggatcctactggagacgtcaaagcctggggcatgaatgattgtggtgaatcatagacttttggagctgacaaagtcgcagagttttttgaaaaaaatgatatggaccttatctgccgtgcccaccaggatttaacttgagttatatttgtcattgagtttattctgaaaactgttcaaccttaaggtgagtatcttgactatctatatttagaccatcattattggtgattatattgatttttatgttaagaatgactcttatataagagccaaaactatccctaagagatggacgtgtgtcaatttttaagtgggtgaactatttatcagaagaaaaaaataaactttcgtgttctcttctcacttcctctcaaactttttgtcgactttctctctttctatcaacgagagccgatggcgataccatcgtcaagtaaagtacaaagcttttcgatcttattcgtatcctttaccggcgaggattgtctttttctcttcctgaattacactctctttttttaaaggatccatctttgatttgggtttcgttttttcttttcttttttggttttaagattcgaacaacattcaatagaaagaacttgttgtcacccccatcgagttgttttaatgtgtattaggtatagttaaaatccctaattaaagtctatgagttctcctagagattcactaagtagtttgctagttgagataacttcgcaaaatcttgtctttggttctgaaaaaagtggctgcttccacatggattctatccaagagttgtaggaatctgctaggtcttgtcgaccaactttgctttgatgattcgatggttgtgtatcccaacaaataagaagctttgattttcttttgattttgctctggtgcaaaacagaacaagcgattttgctggaacaatcgtgtgacctttttcttgtcaaacaccacatcagcttagacgtgtgttgattgttatccgactcatgcaatgcttgagtccgttcatttgcttatgttaaacgtatggaattttaagtaatatctttgactttctagaatgtgttcaatgtgtttttgttgttgaagacatcaactctctgtcttcactatgcttcaaaattacatgcgttcttcaacgtaattggatttggtgaattacatacactgtgattatgaatctttgttttgcatttgagaagttgttgatgttgattatgaactcttttttttttaagaaccccagtttaaatactaccattggacattgcctaaaattttaattcttacctaagctcttaacttcaaaattttcaaattcagtaatagaaatattgttaagagcctttgctaatatactaccaatattgttaagagcctttacatggctttcaaacaagtagaaattaaaaacttattttttcttctccccatgatgattaaaaactctctacaactttacatatattttttcgcaaaatcgtttttgataaatgaataatatcaatttttttctttcttttaaggtctattttacaaacaactattttctttttatcatcaccattaatgtgttcatacacgtcattcaattatttcattaactgcttcatcattaatagtactcaatatacagctactcactaaaaaaaaaaacatttcaacaattaaaaaacaattttttaattagcgatcattttggaactaatttgtgtttgaaacacggcaaaaatagtttggataatttgaagaagcaattcaacatttatcattataatctcaaagttccacaacacccccgcccccaaattttcttagtttatctcacttcttatttggttattaaaaataaatgaatgaataatacatatccaatttatttgttgagaatatttatttagtcatttatttaagaatttctatgatgttatttttattattattaaaatttatttttgttactatgttgcaacataattcaattttaacataatttatattcataaaaaatattaaataataataaaaattgacattcacaacttctacagtttttagttactaatcttaactgtaaaatttttgtaagttgaaacctctatagccaaaattaaccactcaaaccaataagtcccaacatccacattggttaattttttatgggtgtctttagtataaattagtaaaactgaagacatctttcttttcagatgtttaaaatgtctctaaaaatacacaaaactaatattaaagacactctttattttattatcattatttttattagttttatatttaaaatcatccttcaaaaattaaccaatgtgaatgctataacgaattatatattaaactcgattgtgcttgtcccagagaacaacttatttgattatctattcttaaaaagtaatgacgtcagctttcaatatttcacgttttttcaaagagaaaacatattatatttaggtaataaacaaagcctgatcattgatcaatgcatgggatctttttttgtattataaaaggctactctgtgtcatttgcatctctccactttgagcaacaatggcatcaatgatcactgttgactttgaaaactgcttcatcttcctcctcttatgtcttttctcacgcctctcttacgatcttttcttcaggaaaacaaaagactcacgagctggctgtgctcttcctccgagccctccttcattaccaatcattggtcatcttcaccttatactctttgtcccaatccaccagtctttcaagaacatctcatctaaatatggacctctcctccacctccgcttctttaacttccccatagtcctcgtctcctcggcctcaacggcctacgagatcttcaaggcccaagacgtgaatgtctcctctcgccctccccctcctatcgaggagtctctcattttaggatcttccagcttcatcaacactccctatggagattactcgaagttcatgaagaagttcatggtccaaaagctgcttggaccacaagcactccaacggtcccgaaatatccgtgcagatgagctggaacggttctacaaaaccctgcttgataaggcgatgaagaagcagactgttgagattcgtaatgaagcaatgaagctcactaacaacaccatttgcaagatgattatggggaggagttgttcagaggagaacggtgaggctgagacagtcagaggcttggtgaccgagtcgattttcttgacaaagaaacatttcttgggagccatgtttcacaaaccacttaagaagctcgggatctcattattcgcaaaggaattgatgaatgtttccaacaggtttgatgagctactggagaagattcttgttgaacatgaagagaaattgcaggagcatcatcaaactagtgacatgttggatatgttgttggaagcttatggagacgaaaacgcagagtataagatcactagagaccaaatcaagtctttgttcgtggtaaatgttcatctcattaagtaggtggatttgtaagcaaacaatattggttgccctgactaaaacttttttactattgcaggatctgttcagtgcaggcactgaagcctcggcgaacactatacagtggaccatggcggagatcattaagaatcctaagatttgtgagagactgagagaagaaattgattctgttgtagggaaaacaaggttggttcaagagactgatctaccaaatctcccttacttgcaagcaatagttaaagaagggctaagattgcatcctccgggaccagtggtaaggacgttcaaagagacatgtgaaatcaaaggattctacataccggagaagacaagactttttgttaatgtttatgcgataatgagagatcctgatttctgggaagaccctgaggagtttaagccagagaggtttttagcttcttcaagattaggggaagaggatgagaaaagagaggacatgctaaaatacattcctttcggtagcggaaggagagcttgtcctggatcacatctagcttataccgttgtaggaagtgtaattggaatgatggtgcaacactttgactggataatcaaaggagaaaaaatcaacatgaaggagggtggaacaatgaccttgaccatggctcaccctcttaagtgcactcctgttcctcgaaacctaaacacttaaacttcaagtctatagattcccaataattcttgacgtggagatgtgaacttgcttttgttgtttcaaataatatcatgattacacatgtttcctgatttctttgttaccttttgtttggttcagtttgctgtatgaaactgtatacatttcttaatgttcatcatcttatgtctctcatagtagtgatccaatgttgtttatcattacaagttgtgcttttgagctttttgtgttatggggcataatttgtttttctttgataactagtgatgaaccaagtttttaccacctgattaacccaagatcttaccacatgactaatctctttagtgtgagtgtagccgtcaagtagtttactcaccagcttttctaatggttctaacgcatgacaacatttcgactgacaaacgaaaagtgattagataattctaagcttgagaaattgatctataacctagacctaaactacaactcttccaaaaatggaaattaccactataattctatgagttggtaattctgaagtggtagaccattagaaaaagagttatttctactcataagctttcattcacttctggattgctgggtattttgtattaaacatggttaaacgacgtttaagcctttgaatctctttgcctcaccattctccttagaactaatcctccccatgatcatcttgtagatgttgttgttaatgagcttcattgcttcctttccattctcatcaatgctctcgttcatcatcgctttatcaagcaggcttgtgtaagacctcacgaggttcttatatatgttggagctatatgatcgaaactatttcgttcatgaatcctcccacgagcctgagaaaggacagggggccatctagtaggaacagtcggagtgttttattttctcatgcggaatcaaataatcgttctttgttttctccaaagccatcttaagaaataaatatttgtctgacccgttgggatgttaattttcatccaccatgaaatagaatttctacaattttttaattttatccatagtaaggccatcctttccgacccatctcttataaaatcaaaattttggttttcttctactcaatgacttttcgcaactcaataaaatctatgagcaaaaccaatcatttccagatattctgttttagaataagaaaactaattatgcaagccctcatttcctaaggtccgataaagcctgcatctgactatctgttggttcgtattacctctctatgataactgatttccataatattgaaattctaacataccattatgtcgaattataaaattaagggttacaaaagaagctgccaatcttaagttacctccggttttttcatgatttccagtaaactcattaaaatctccaatcattagctatggttttttccgattagaacctagtagtattattttttaccatacaatttcgcgttttgtaccaataagattgccataaataaacgaaataaacaccatttgttttctgagtaatgttttaacgtcaatgacccgatttctttcatagagaatctctctatttttatatcagtattacaaaactaaactaaactttcactagctttgagaggatcagctgattacaaattattattaccaaattaagactgaaatatttgctaataagaataacatcttttagtttctgatttattgttcaaaaaataaaataaaaagtttctgataaaactaaaatatatgacttgtacgttttccataaatccattatgtaattttctatcatatcggcccctactccctaatcaaaataaatctttctaaaaaaaagaaaaaaaaaaaaaaaatcatacaataccgttgtaactaacgagtaacgacggcaataacctaaaacaataacccattattctaaataaatagataggcatataaaaacattttttgctaaacacgtaacactttttttaatttggttagcacctacctcttttttaatgttagttttatttaatcagtattgattactgttaaatgagtcaaagctcatcgaaagagaatttttttttaaaaattatttcttaatatcttatcatatcatattggtataagatcagtcattgcacgttatagattataaaatacaactttatattttgaataattttcatatcgtaatcagatcatattacgatcttcttatatgattccaacgttgattttcccattataaaatgcaacgtggttttttcttatagttttcaatgtgatatattataaaatgcaaccctttttacttattaacagttgacacttaacggggggttaaatactatttgtaatatcaatatcaattatacgattaattaacattaccgaataaaatgtcaacgaaagggaaaatgagaaaaatatacttctatcgtttttttataaaaattacttatatcttaataatctgaatatatcttattattatattaattttttttgatcattttctaaatcatcatttcaagtgatgaaacaacgtgaatatttatgggaattttgcaaaatctgttatattttgctttcaatcttataatttctgccatattctaactcagcttacaaaatctaccacattttatcacatgttgcaattcgaggacgaaaatactcttacgatgggacagagactctgacttagatggtgacatgacagcttttggctgatgtgatgatacatgacgaaaaatcagagtagaaacataaaggattaggagacagaatagtggagaacagctggcttctactgttgttattggatatttaaaaatgacttgtttaaacaaattggttatcgaaattctgcgggggacaacgtaatatataatacattaggagacataattaccagctagcgggggacaacgtaatatataatgcattagggacatgattacctgttagcggaggacaacgtaatatataatgcattaagggacatgattacctgttagaggaggacaattggtgacagacttttgtttttgtctttagatcttgtctccgaatagaaattctctgttgcgttgacattttgtcctcgatttcattattttgctctattattatgaatcgtacctcttatatgcaattattttcatttaagaattttgaattttatttagtattgtgaaatatgaagacaataatgctcaactaatctgtagaccaaaatatatggtgaaaaatctaaataaattttgaaatccttaaatgataataattggtggataagatgtgagattcatgataattttgaaagatgatgaaatcagggacaagatctagatacaacagataatttatgatgaataaaattgggagacaaatttaattgaaagttacatgtagagaatctgtgcaggttgtcacgggaaatgatagagagacaaaaacgtttcgttttgtcttcgagaagataatgatgtatggttaaagcacacatatttcaaagaaaaagagataaaatagagaagaaatagtaagggtaaaattgatatttcgttatgaaatatggtatgatgtgtaagggaggtagattatggtagattgcataaagattttagaaattatggtaaattttataatttttccaatattgatagccttgagatcgtaacaactgatgacatgtattattttaataataaattatggttggtcatctggcgtcttcaggattgaattataaatcatatgcaataatttagcatgacagattaaaaattgcaacgtgaatcacgtgatagatttattatcaaatggaacgctaggtttttgtcatttccagatcgtcataagatcatatgattgctaaatcgaatcgtaataactgaactatatcaattatagtaataaatgatgttttgtcttcgcatcttgcctattgggaaaccaaaaacaggggatgtggcgtaacactttttttaatttggttagcacctaccgcatttttaatgttaattttatttaatcagtatttgttactgtttgagtcaaaggtcatcgaaagagattaaaaaatatttcttaatatcttgtcatatcatttagtataagatcaatcatttcacgtgatagattataaaatgcaatatttttgaatagttttcaatttcatatcgtaatcagatcatattacgatctttttatatgatttcaatgttgattttcccattataaaatacaacgtgattttattcttatggttttcaacgtgatgtattataaaatgcaaccctttttacttgttaacagttaacacttaacgggtgttttcaatactatctgttcataaatcacgattatacgattaaaaaaaaaagaaaagaaaaacgattatacgattaatattaacgtataaaatgtcaacgaaagagaaaatgtgaaaatatacttatatcgttttgttttaggtgaaatacttatatcttaataatttgaatatatatctttattatattttaatatttttggtcaattgttaaggaactgatggcatgtattatgtaaataataaatgatggttggtcatcttgcgtattcaggattggattatgaatcaaaatgcaataatttataaattgcaaattgatagattactacaaaatgaaaacgctaagttttttttatcatttccagatcgtgataagatcatatgattgcttaatcgaatcgtaataactgaacgatataaattataataataaatgatgttttgtcttcgcatcttgcctcttgggaaattaaaaaaacaggggaggtgacgttggtaaacttctttaaataggtcttaaaaaaattgttaataaattaacaatttaatcgtccaataattcaaccggtaaatactttcgaactaagttttaaaattgccggttagtataacatttaggagagtaccatatacaattttctttgtccttaatataaagggatacaggggtttacgtccataaccttgcatctctaaccagactgcaaaacattaaataatagtgctaataattttccaatcgaactgtataaacaacaccaaattatcttttagtgttttgtgaacaatattacaccatatttttttagatgtaatactgttcacaaaacactaaaaaaatattttatttatgtttttatttagtattatatttaaattgtagtttattcactaaaatataaatacactttaaaaaccattcaaaaaaagaaaatagaagttattttagaaacttttaaaacttaatataataataagatgatgttttttttttaagttttctatataatgtacatatatagtcattttaattttataaaataagtaagatagaagtgaaacagttgaaaatactatactctttaaaacaagattacatataaaaaaggcccaattttcttttaataaattaataggtctaattttttaatatcatctactaataatagcaatctcaataaatgctttagagatttgcatatttatcataaagtttcataattgtgttaagtaatatttttaacggtttcgaaaagtagaattagtgtttattcttgggtatttttttattttatttttttttgtcgagaacaagtttgtagtagcagaggcacgattttttgtgcgattttttctagtttctaagattgttctccttttcattgttttgtttaaagattcttaataccttttgcaaatctctacacaaactcaatgatgtgattgttcttcttgtgtttattattgatgtgattgttcttcttgtgtttattatttgattattcttcatgatatagttgaattaggccgatttaaatcttaccctatcatcgaattcgtcaaaatggtgttatgactctatcattagatggacaaagcttcctttgccacccaaccattgatggtattatgctttgtgaattttgattgaattaagatcttaatgcttgttagaatttcctgaaacaaacgataatttagtatttaggaaatatttttatagataattattacatgcgagagaaggataattaaacctaattaattcaaattcaataacggatctaatgcttctcttaattaatttttatatattttatattagtttcctttgttgacaaaaaaataaaaaaatattagtttcctgatgatttctaggctcaatgttctctttctctatttgcttttatttatttatttaactctgtggattaaaactctaagtactactgcgtttcagctgtgaacttataatttatatttagggttaaaatatgtgctacacatactatagaagattacatttactcattcagggttgcgtgtctttatctttatgtttttaattttgatggaaaatttattcaatctccaaaagacaacgttttaacatcaaatgcataataagttttaggagtagataatattacaaaggatatgatttagctttttgagagaaccacacttcaaagcaattgtctaacttcgtgtctctttttcatgatactgttaattattttttataacatcagctttcttattaagcattgactgtgactcagtcataatgtaaagagtttagaattacaaaaggaacatagatatgaaagacgaattgagaatcatttggtactcgttccttggcaagggtatccgccgaattggaatctcggcttgtccaaaggaattgacattcgtcaaatctttttctcctagcacttgttctcttatccaggtgaaagcttcaaagttgaatttattcccattctgcaagctgtttgtgatgtttctatttttcatcatcactattcgtttaaatggttatgaattttttttttctctctctccctcaacggttatgtatacctaagattttatgtcttttagttctacttaaaagttttcctatttttacataactagcacttaggtattatttctaatgaattttagttttagaataaatctcattaaaacattggaatatcaattctccctatcatctctttttcttttccatttaagaaactatttttaatgtatgtttgttagaaatagttaaggttaaatatactatagtttgtagaatagaattcctgttgacaacgtaaatatagtgtatatactaaaaatataaaatatctactaataataaccatctcaatatatacttccaaaaattacacatttctcttttatcatctgtctttgaatatattttatatcaataatcatttaaaaacatattttaaaagactacttctaatcactataactctttgtttggtacctttttcacttttcgagtctctttactctctttagcataatctttttagttatattaatatttttttctagagaccaacaatgtttttttgttaatacctaggaaccgataatgttccactacacaactcgtgctcactaacatactgattcagactcatgttagtaagaaagcctgtcgcgttataaacaaaagaacttttttgcgaccatatatatatgactctgcattgcctcataagggattcaaacacaaatttttttttgttgttgttaataattcaaaatgttctattgttttatatgataacctttgattaatcctctaatatatatataatgttggaagtttcatctttgaataccttatcgatatattcatcgtaaaaatacttgtaatattattattattactattattatcatctaataaagcataatatgaaaatagatttatttattattttagtattgccccattgaaaatacttccccggattctttactagtgacatatatgattacacaagatactagagtgactgggaaatcttgataggcagtcctttggggaagtatgggagtggtgcacggatgaactccgattcttgggccaatgagaaatcgtaggttgttacaagatgatgaatgaagatagaaatttgtagtctcgcaaactccgcgccgacacactgtctcactccacctccaaacaccatgaacgtcttagatccagaccgcaactctttcccctgtccaaatatattcattaattttgagttacacttttgtttacaggaactatagagtaagtgaaaatttatacctcccatctccatggattgaactccaaaggattctcataaatagcatcattgaaatggacagctggtggtataaccgccacaatccagcccgctggaattgtgtaacctgttgaaccaattataatttatttctctataaatctgaacagtctttatttatttttttggtcaacgatctcaactttaaaatataatatatatagaattttgacttcgagtgctgccatgcttgagtgatacttgcctttgatttcgacatcgttcacagcctttctatacattataggagccatgtttgccattcgaagagtctcatttatcacctgcatgagtcgtaatatttaaaatatcgatgccttacttattatactagaaaaataagaactatataatcttaaaaagcaaatattatatgttttctaaggattgtgtcttttcaccataattactttctattaaaattataaatctcaataaatgtttatgaatgttgtgtttctttatcataatttttttgcaaaatatatcttatagtttttatcgttaaaaatatttttgcaaggttgtctcgattcattatgactctctgtttgatatttttcttattaaaatcggctcttttactcatatatattttaaattatgtccacagttttaatcataattttgttttgatggttgtgtatttttttgctaagaattgtttttataacacttattttttacactattttctcctttattagatcatttgaatttattgatatcctataatttcaaacgatatagtaatatacattattttgagtttaaatttgtttttatttattcttagttatctagagatttttggaatagaaaatcaaaatggtagtgagttactagtttaatgtcaatgagatggttagtaattgtttacaaaatttactgttgttttcaatgtatataaataaataattaccatgttagtgaaagtcatttggtgtctgtattcttcccagctaactccagctcctttaccatttctattttgaaggatggccgcatgctccctctgccaaaattaaaataaacatatcagccccgatccatttgcttcttttgttgttcttctttatatcaataactttttagctttctggattatatattattattaataccttcaactctgcgagagctttatggttttcggcaagaaatttgatggccaagctagtaacggaagaggtagattctttagcgacgaccaaaatagcgaatatgagatttatagcactttcttcattaaaaatgacgtcttctttctccccctcttctaccattgtgtcgaggaagtctccgcacatttctctggacgctttcctcctcgtgaaaacgtcctttatcacctggagggcgtatctacgtgcctagatggaagccattgagagaacattatcatgtgtagcatacagtaaatctaaataatataaacccatagaaactatttaaagaactcacaataaagactttgtagatagaaatcaaagtcgtaagcttcaagggtgactgaaaccattcagatcctagggccattatattgtccacaagagttgcttgtgtttctggtttgaggttacttattatctttggggtcaagtgcgccattataacctgcacagaaacgttaatggttgtgagtattgagaattagcaactagtatcaaccaataatatcaaaaaagatattaagaaattatgtaagtacactttcaactgcctccttagcatcgaagctaccctggttagccttcgatctaagatgctcataggttactctgtctatttctcctatcatctttttttttaaagcctcagagccaagatgttgaagactgatttgcttgacgtgcttgtggatgtttccatgtttgaggaacacgttttcttttccaaatggcttgacaaaagcttctggatagctaaacacaaaagacttgttctcttgccgaaaaacttcgaagatgatatcaggttctgtcaaaaccacggtgttcgatccgaaaatatttgtccgaaacaatggcccgtacctgaaatattgactttattatacaaggtatccattcgttatataaaaaataataaagaaagaaagagattgatatctgactttaacatcctcttcttgacaaagggtgagatctcgtataatccatggggctcaaagaagtcgcatgtctctccgatgatcggtaaacccattgatcccggtggtaacttgccattgcacttcgggttcgaccatcggtataaccatttgctaatcacaacagcggctacagctatgacccacaccgcagcggaccacacgaagctcatttggttttgcctttgaagtttgaataatcttaacctacctatggattaaatagagaaagtcattacaaacaaacaactcaatataacaaacaaaaaacattcaacgactgcttaacctacctttggattaaatagagaaagtcatacttacaaataactttatactagaccttcttaagttttttttcacctcaacttagacctagtttttgtatttacctcaaattatacctagtttttggttttttttttttccgaatatcaagtacacttctcttataacctatacatttcttggttaatatatttcttcaggatagtgttactcaatatatattagttctacaatatattctatgaagaaaagttgtgtctcacaagaatttgacacatagcaccccacttttgacaaatcattattcaaatgacaaataattaaagttttaaaacttggtaagtactggaacctcttgctagttgttacctcttcattttcaaaatgttttataaattaattgtctgatgacctttttcatgatactatatagtttcaatataaaatagtttcatgaagaaggttgtaaacaccttttgtaattgcaaaaagaaaaaaaaaaaaacagaagataatatatgttttttgcagagtgcagacacgccaatatacttatttacgttaacatgtatagtatacttcgaaaaaaaaaaaagagagattttaggttagaagctcacactctaatatggtatcagagcccgatccgcacatactcaacccgatccacatcggtccggcccaatacttgccccgtcgatccatgcccaaacatatcgagatcaatggctagaagagccatcatctcgagggggcgtattagggacaatgtcccacatcggaagttgagtaggatcttaagtggtatatataagatatgagtctctccacctattgccaattgattttaggttggaaccccacactctaatacttatgtgtcaaacacacaattattatcatcattttttatttttcatttaattaattctactattcaacttgccaagcacttttaattcatatactatttattcttattaagtaaacttaccaaacttaaatatctcgaagttttaaataagaaaacttctatataatgttttttatttattaaatccaatgtgtttccaattgaaaattaaacaatatatacaaacatataacatatgcatttcaacatccataaattcgtttatatattatagacattttacagtaaaaccgtaaacttatgtctaaatttatgaatgacataaatgcaattttgtttgtatatataaatcattaaaatatttgaaatttaatttaaaagtttatttttatactaaaaggttgcgtaattgcagaatactatatatatgtacgattttttttaaaaaaagaaaaaaaaaacatgtagatgtacaagaatataattgatttgtaaaaaaagcaattggtgatttagttgacaaaagatgattcttttatagagaaatttttgtctaaatttgttagaaaatgttttttagtgttctactaatattagagtttttattctaaacttttgtgcatgttccacgatatttagactagtttttctttctaacaaatttagaaaactggataacaaatttccatgtattctacactttctttaattttctcatttttgtgtgaaaatgtaatttacggttatctatatgttctaaaaacactaaaaaatgttttctacttttagaattcattttctaaaagaatttagattttagattctaaaaagtttagaattcctagatacaaaaagtgtatttttgaaaaagtaatattgtaaatattacgtttaaatagtatattgtttgttaagcttacgttgaattggtatattgttagccacgaaacacttcaccggcggaaagagatgagtgttttattgttcaagtttcagataatgagattgaaaaaagcaaaaacaggttttaattaaggccttaagggtgtaggagaagactccatttcaactagagaatttgaaaaccataaatttatctgaattattgtaaataaattaggaaatattgtttttgttaaaatttctgttaaataaattcaaaatcctgttaattaaattttcgacaaaaagaggtaacattgggggttttatttttaaaaaccctatttcaccaaattttgtagataaatgtgtatatagacattatccattgaaatatcctttatttccgttccctggattatttggattccatttctagatgctttagaaaagaaaaaacatgtagccagacccctaatgatttgtatatctaccggatctataaacttttgtaaaatgggtaggtgccattctttagatactagattaattaagtagttaactatcagatttagatggagaaattttcctattccgtttgctggaagtggataatatctagagtccatggatctagccataacaaaagattgacccccaaacctagagaccatctcgctcccatttcattagttttttctttgtcgaaaaaatactctccatcaaacgatggagagttgtgtttttatttttttcttgtaaatgatgaatattcctaaaatatttatgttttagcacttagctactaaagagtttggaaaaatgtattaaacgccaatactgacatcattaaatttatcttggtaatgagatcctaaatctctttttccttatccttacacagtttctcctatgatagtatgatacctagaaggattccacgatctcgcccattgaaacttcaccaataatttgaaatagcacttgttaacttacatgttaacttttgagaaagtttaaagcaagacatgctataggttggaagggcaaaagcaactgttttgatcattgtctattttccaaccccttgacaaatacttggctgaccacccatttattctttcattgtcttttttggacataattaaatattttactttttgaaccctttaaactctctggtatacccaagtaggtatccataccaccttccttagtaattccaaggaaatgttttaattgacttttttgtttggtttgctacacgtttaccaaacataactgatgacttactgaaattgatttcttgccgtgaaacttttccatactttccagtaatatccatgactattttacattgctccatgtgtgctttataaaaaaaaaaagactattacccaaaaaggaaatgtgaaatagaaagaattcctttagctttttaaattccggttagtttcttctcttgttatgccttgttaatattattaatcagcatttctgaacataaaataaataaattgggtgattgaggattaccctgacgtaaatccattttgaggattatatttcttttaggttgtccatttaacaaaacctgatacaaaaccaaactaacagttcacacaatcccagagctcaattaggattaaaacctcaccgagtcataatgggttctataaaatctcattatatcttatcatacgatttgctagcttatatttgttttctttgccaaaaagttcgatttacataatctattcgtccataagtcatgaaacattttctgaagtagcaaaatgttatatgtaataagtctgtctgaaatgaaatctgattgtgtttcagagactatatgtggtaaatatttttaagcctcaaacaaatttttttagatatgatcttataactcttattacaaagacttattagcctaaactctaccattcttcgtggtctttctattttttggaattaaacaaatatttatttcatttattctcttctcaaaacatcatttttggaaaaattatctaactaatactactaaatcttcctttaagaagtgtcaaaacctgttgtcttttttggatgcatagaaatttaagttttcctaacttctgcttccgcaacctcttttttaaattttccataataattggagatataccatttcatctataccattttgtattacatctttaaaataaactttgccatttctccatttctattattaaaacatttgttttatataatttttggtaatataaatttgtgattcggaaaatatacctatcattattaaacaaattaatattgtggtcctcaaaattttaaataaattgacagtcttaaacagttgtttagtagcctttttgtaaggaacgggactgtgatctggcaatcatatggtatgaaaactgtcatttacctgaaaacaccattctttattttaaaacaatcaatacgcaatgagtcaagatgcaattagttgacaatcgtatcgtatcgtatcgcgtaataaggtcggaatcatattacgatcgctataaaaaaactccaggtcgcattttataatctatcacgtgaaatgattgattgtattatactaatattaagatatttatagattgttaagaggagtatatttttgtctctttcaattattactttttgatgacgactcattattaaacaaaactattaaaaaagtataccacgcgtttcacgagatcaggaacccttaataaacgtctcctgacatgtgacagtaaggtgttaacaaaagaagccgttgaatttcataatgaacaaatctacacggaaatcatataagatcgtaatattcgatataaaaccattttataatttatcacgtgaaatgattgatcttatgctgacccctatctattaattttaatatgaattttgtttaatcattattaatgtgttacgttattgagtccagatgcaaagaagaccaaccatcaaattttctctttcgaatgacatttgaattaataatgttaatcgatatttgattaagcaaaaataacattaaaaagcgttaggtgttaaaaaacaaacgtaacgactaacgtgtttaatgagacatatttttgacggtaagcgcataacgatccataaattaaagaaacaaactgataattcaaagtacagcagaaaatttaaaatattttttttctcaacataacatggtcacgaaattttgttggacaaaatagatttattctcccaattagcttttgtcgttttgacgttttaattaagaattggggttttaatgatattaaatttacatgacataatatgatatttgatttatatttaagatttattttacttcatgatatttgattatatatatataacatttttttatcataaagattgtaacgtaattacaatgtaaatcgtcgtaaaataaacgaagaaacgtattatatttttatttacttcttggattcaaccctaattacatatatgattaaacaagttggttgaaatttggaaaatctcgatatatagtcccttggaatatcgataaaatagtttttaaagctttccagatatcgcgaaccgactgtaaaaatatattgtcctacaaacggagagagtacgtatgtggaatccactaaaaaaagtgacggtcgaagcattacaagtagtatcaaagctgaacttagacgagggtggagtcaagagggctcataccgtcgggaatgacggtcttgatacgcaacaaggacgttatgatctgtttggtgaattataacaccccggtttttagtaaatatggtagtgcataaaaacattcaaaaaattgatttgaccattaccatctctaaaaggtacttatttttttatcaaacgtcacgaaagaactccacaattagtgatgcttgagctagaataattttatggtaaattatttcctgaaaaaaattgttgcaatcacttgagtgaaaacaaaacataaaaatattgtggtaaatttttagatcgataaacaaatattcaagtttcccggacataacgtactaatcatcgaaagactagaaaaaacgtgggacccattaaaaatggcggtcatggcgttgcaacttacaaccatactaaaatcattttcctctttacctcttagaagtcccacagtagaatccatactcacattcacatcatcgtaaggtgaataggaatatgaaaaaagtgtaaaaatctaaattagaaatgaaatatcatcttttggcaagtttcactctctataatggtatgatcatctctacctatctttggcaaaaacaaagtgttcatgcaacatgttgaacgttttcttgattgttaaacgactagatatgcctcgaccatgtgcttcatgaatcaactgttatgctatatctcttaagaacccatcctgtttaccttaaaaggaaaatttatcttgcaaaaaatttatctttaaaaaaaaacgacaaaaaaatgagagaaataaataaaagagaagatctgatggtggtgaaaaaaataaaagaggagatccgataggaaaaaaaatagatgctggtgaaaaaatccgatgagagggaaaaaaggagaaagaaaagaggagatccaacgaaaataaaagaaatctaatgagggaaagaaaagaaattaatggcgagagaaaaaaaaacgaccaaaaaagaataatatgaaataaaaagtgacaaccgtcatttaccactctctcctggtagatgtaaataatttattaaaattcaataatacaacatatgaacattttttgtaataaattattgactaatttattaaaattcaaccgcattattctaaatctctcgctttacatttttgaatatcgtaacttataataaacaaaaattatatctaacaaaaaatattttagttgaattataatatgaatataaacaatgtttttagtgaaaccaaaaaaatattatcatacaaatttatcagtaaatacaatgtaaatataataatataacaggatcgtcatattttgacttgatgtccagttttgtaaatagtagacatttttttgtttttttaaatagtattccatctgttattttattttggaaaaaaaaattgaataaaaaaaattgaatttttatattttctatgcaatatttattagttattattcataaatggtaaactttaataaaaataattaaatattattggtgaatattattggtttaaagttataagaaattgtaaattacaaaataatacattttaaatcaactttaatatgtttaccttaatatgtgtgtttttcctaaacaatcaaataaaaaggaacagaggaagtaagacttttatatctcgttgcttctaattcttaacattaaaaagatacgcccatcaactttcttattgaagtctagatagcttttaatatttttgaattgaaaagtaattgaaaacaatgaatataaaacattcacgcatcataatcatacgacaattagtcaaatttatgccatgatgaaactaccaaatccaaaaatttaaatttggaacccgtttggaaaaaaaacaatcatagaaaatatccaacggatcttagatttaggaattttgcacatcggataatacttgaacaaaacccgaaaatagtacagtaaaaaactcaaagctaagttaacttattaaccatttttatatggaaaaagttaaaaaaaatttacgtacttttaaatttggaacgtttaaatcctatgtaagaagataaaaaaatcgtaatgcttttgttaactttaaatttaaataagaaagtttggttaacaagccattttagtcatgacgttatgtaaactaacagaaaacctttacggtgttaaaatctcgttagtcttctttattatttctaaacaacatcatttatcgtatagagaaaacgacgtcattttgtcgatttaaaaaaacaaaaaccttaatccctaaatcgaaactcatttttccctaatcgatttctaatcctagaatctttatgtctctcttttgaaattccgattgaaatggttacaactcgtgggggggggggggaaggggggaaggttcgtcttcatcggtcacagagactaaatgaaacagcagccgtacaaaatgacgacacatgatgtgacagagcttgaactcatcaaaacatactgaaaggaagaagtctcgagctaatttcaacatagagatctttggggattgtgttttcgatttgggaaatttttagctttcagggattgttttttcgatgtggggattttgtctattttcatttatcaatacgacttcgtttagtgtacaataaaccgatgacgtttagccataacagaaacgactaacgggattttaacaccgtaaagtttttctgttaacctacttaacgacatgtctaaattggcttgtcaaccaacattgtcatttaaatttaaagttaacaaaaactttacgatttttttgttatcctcgcagttcatgatttaatcatcccaaatttgaaagttagtgatttttttgacattttccccatttttatatagccttaagtaattaagatattttcgagtatttttggatagctttttcttatcaagtttttcggttaattcaaatattttggagtactttcgaatacttatgagtagtttggatttctttttgaccaaattttccggatgacagatatttgaatgctcgcttgggttagcgggaagtctaagtaaagaaggaggcaagcaaatgaaattcggatatgttgtagagtatttttgatatttcctcatagttcttttaaccttaaacatataaaaaaaaacacaaaaaaatatctgaaagtttgaaccctatctgaaacaaacgtaaatattatagatacccaaacggggctatgagcctcacccaaaaacccgaatcgagtccaaaccccgaaccctagtgaaaagcatttgcagtaaaagattataaacatgaagtaataaattagttggaacttataatattgatttatatcaccagttccccacacgcaacgtggtttctttcatcaatctatatagtattataagtagaatgtgtactctctttccaaataaactaggaggattcaaaatagatgtggaggctaagacttggaccgaaggccggtgaggatactcgcttgttcaccaccaacaactaattaagccaggaggcagatttgggtgttgaataccaactcaggatctccacaagaaattgccgagatagagaacgctcgtcagaatttttcaaacaacatgtcacgtttcaaaacgatgcagatatatatgtaccttaaaaaatcctagatatacgcaacttgcaaacaaagcaataatttgttatcaaagctagttagtttttttttttttgtaattccatatgccttgtttttgagattaacaagaaaacgacttcttttttttcttaaattctactttccatttctctcaactctcggaatcacctatgctgattctactcgcacattgcatatagttcttaatcttaaactaggtacggcgaacaactttcctatagatgtctacttggcttataatatttttgtattgaaaaactaattagaaagatatgaatatcgttaagcaaatataaaacaattactaatacgtcaagaagtcaaagtgatgacaatgcgaaacgtagttgcttacgaaataaacgttaaggaataaaattatttgagaacttataatttatattcacacccgtttctcacatgcatcgtgtttattaacaacaatctatataatattcttttctacgtatttttgtggttgatgtttaaaatttttacaaaacaatttttttttttttaatttttgtttttctcaaaactaacacattgtttataatctattataactcaaacaaaccaataataaaatcatttacataatagaaatcatcaaaaataaaaataaaaattaattggtttgtattaaaatttgaaaacataatttaattgcaagaaaaaaaaattcctaaaacatcgactataaaaaatacgaagcgagtataaagtataatgtgtcctccttgtccaagtaaacttagagcaaccttacaaaatgtggaggctgagaactggaccgaaggctggagaggatactcacctgttcaccaccaacaactatgcagggaggcagatttgggaatttgatgccaacgcaggctctccacaagaaattgccgaggtagaggatgctcggcacaaattctcagacaacacgtcacgtttcaagactactgccgatctcttatggcgcatgcaggtgaaatactttgaagtttaacaatatattataatttgatctatatgaatacacttcagaagataaattttttattctgtgtggacataacagtttcttagggagaagaaattcgaacagaagattccacgagtgataatcgaggatgcaagaaagataaagtacgaagatgcaaagacagcattgaaaagagggttactctatttcacagccttgcaggctgatgatggacactggccagctgaaaactctggcccaaatttctatacccctccttttgtgagttactattataaactagcttcttcttttttttttccttttttttatatatataaacttgctttaatagctatatacagacattttccaaataattatttctgtaataataataataaatattgtgctgcacagttgatatgcttgtacatcactggacatctggagaaaatcttcactcccgagcatgttaaagagttactacgtcacatctacaacatgcaggtacgtacacatatatttcatatacttgaaggtttatatatgaactatagaaagagtatttaagcaaaactgtttttgtagaacgaagatggtgggtggggtttacacgtagaaagccacagtgttatgttctgtacagtcattaattacgtctgtctacgaattgtgggagaagaagtcggtcatgatgatcaaagaaatggttgtgcaaaggctcataagtggatcatggaccatggtggtgctacctacacgcccttgatcggaaaagcgttgctttcggtatgtggctactatttattttataaagatccatattactatacttaaaaaactatattatttattgttaaatattagatcatatgtcttttgtcatcttcaccttggaattgatcaggttcttggagtgtatgattggtctggctgcaatcctatacctccagagttctggttgcttccgtcttcttttcctgttaatggaggttttacttttggacacctcataatattgtgctgttggttatatcattaaatgtttgactttaaagtaattttgtttatatatttaataaaaatatatgtatgtatgtaaatgtgtagggactctctggatttatttacgggatactttcatggggttgtcatacttgtatggtaaaaaatttgtggctcccccaacacctctcattctccagctccgagaagagctttatccggagccttatgcaaaaatcaattggacgcaaacacgaaaccgatgtggaaaggtaagttctatattagaaaacaaagatgtattcaggttttatgtgttttaataatctatcttacgtacaaactaatgtattcgggtcttaaaactaaaaagaaaagaaaagaagaagctagtattactaacacacttaccatacacaataaaaataaagaaacatacaattagtttttgaactttctccctgaaattattcgtgatgttttgattattatacccaagtaacacttcatttctactatttcttttatatgtgaatcggtatgcaaattaaaactatatatttatctattgtgaacacacatatatacatagtttcctaaacgtccaaagtagatcaatcatttttcaaacaataactagttgataatcaacattatatgtgggggatgaagatattgctaataataaatacataaaatatttaagaaaaaccaaaataaataaattaattcccttagtttgcaattaattttctaaagaagtctttgtttaccaaataattcatatattaaatgaatgtaatgattctcatatgcaggaagatctctactatccacgctcatttttacaagatttgttttggaagagtgttcacatgttctcagagagtatcctagatcgatggcctttaaacaagctaataagacaaagagctcttcaatccactatggcactcattcactatcatgacgaatccaccagatatattacaggcggatgcctgccaaaggtagtcgttgtgatagttttattttgttattcttctcgtaacaaattaagtaattaagattttgttttctttcttacttttgtttcatataggcctttcatatgcttgcatgttggatagaagaccctaagagtgattattttaaaaaacatcttgctcgagttcgcgaatacatatggattggcgaggatggcctgaaaattcaagtgggtgcttttttaattatgactcttacttatatactccgaactcaaaaccaaaatcctccatagcattaaagagctgcgttaacacatgtgcaacttttgtagtcttttggtagccaattatgggatacagccttatcgctacatgcattactagacggaattgatgatcatgatgttgatgatgagattaaaacaacgctcgttaaaggatatgattacttgaagaaatcacaaattacagagaaccctcgcggtgatcacttcaaaatgtttcgtcacaagacaaaaggtggatggacattttcagatcaagatcaaggatggcctgtttcagattgtactgctgaaagcttagaggtaaccgtcattattacaccgcctttttgtactaatatcctagtcattagtctgaaatgtaaacaaatgttttggccattttctttagtgttgtctattcttcgagagcatgccgtccgagcttattggaaaaaaaatggatgtggagaaactctatgatgccgttgattatcttctctatctgcaggtaatcacctaagaatccactaataaattattactatatgatattcgaaatgatattaaattacatagctcagtataatattaaaattgctaagttgttttaaaaaaagtttgatagtataaaatagattcaaaattttagattattagtggtgtctgcatgtttctttagcatgagaattcgactctgcctccccgtattgacaatgaacaatggaccctattgacacaataaaagagactatatatactggtgaaatttgaaaacatatatattgaaatgattaaattgtataatttttagtatcaaattaaacaataggcaatatttgaaaaaagaatgatacaaattactttaccgaccatacaccaatctaatatattttcttatatatgattattatagagtgataatggaggcatagcagcatggcaaccagttgaaggaaaagcctggttagaggtaaaactattatctagttatatatcatggacgcttttttgtgatataacgtaacaaattacttaaattaaatgcagtggcttagtccagtggagttccttgaagacacaatcgtggagtatgagtacgaacgatatacttatcaccctctcttcatcgatatttattttgtttgtttgagcataattaaagttgttaaatatcatgatttttaggtatgtagaatgtacggggtcagcgattgcagcattgactcagtttaacaaacagtttccagggtataaaaacgtagaggttaaacggtttataacaaaggctgcaaagtacattgaagacatgcaaacggtggatggttcatggtacggaaattggggagtgtgttttatatacgggaccttctttgcggtaagaggtcttgtggccgctgggaagacttacagtaactgtgaagcaattcgtaaagcagttcgttttcttctagacacacaaaatccggagggtggctggggagagagctttctctcttgtccaagcaagaaatatactcctttgaaaggaaacagcacaaatgtggtgcaaacagcacaagcacttatggtgctaattatgggtgatcagatggagagagatcctttaccggttcatcgtgctgctcaagtgttgatcaattcacagttggataatggcgattttccacagcaggtgattttaatcctataactggttttcattattcatatataatgtgcatattattagtatttcaaacacctaacatgaccctctaaagcacaactaaagaaagaaatatatgtcaacagaattaatagttctcattactaggcagccattagtccattattaggcacatgatgaggtttaatttggcttatcatcactcaaattcaaggcatgtgtcaaaatgttgttgacaagtataaaattatagatatcataacacttaattttgtttttatatatttccaggaaataatgggaacgttcatgagaactgtgatgctccattttccgacctataggaacacgttctctctttgggctctcacacattacacacatgctctgcgacgtctcctcccttaaccatgtcacatctatcttcttcaccgttttatatatcaattctgtttttgtttttattttcctttgcatgtataataaaagaaatgttatgtacttctatgaaatgaactatggttattgacagattacatattaattccacaaatttatttgttgaatgtgttcaaagagtacaagtactaaaaattataacctacaagttgaaaatttataatttataattagtttgatttttttttttttagaaataaatagttaattataatttaggtatttaagtactcatacaactaaaaaatatgtagtttttcttttcttctcaaatgaagtatattttcctaaattttatagtttagtgtatttaaaaaatttccgcccattgttttaactaagattatgtgtcttacctaatgataataaggtcatctccctatctataagtagatgctttgctccatcacaaatgtatcatattaataaaaacaacacttaaagagaaagattagaggtaagggaagagaaaccttatcttcgaatcaaagttataagagtttcactttcaagtctacaaatcatttaggaagaaagctttaccatcaaaggtagcatcatttgtacaatgaatggaggtaactctaaatcctctttttgattctattatgtgattgatatagatgtcccatatcttagggttcatatcaaaaaatatgtttaacaaagcaatctcgctgagtcttttgatgcggttttaaaagatgcacggtaattcctcatcattacaaaaaccgagtacatacagagtacactcgggatgtggttttggcaaatgtaccagtccaacttcgaaaggatgatatcgcttggcgtgctccaaataaaaaatgcagagtatgaggttaagacagtcgccggttcatctatcaagaatatctgctcatgaaatcttgcaaatgaatgtacaatctggaatggatcacatgcaatgcagggcttaattaggtccacacacttgttaatgtggaatatagctctacttttagaggtggcttagcgcaaaagtttctaaccagtaccagacattcctgcattcaatatgttgcatttggcggccatttgaatacaagggaacggcataactattgctttttattcttctttgtagttgaccaataaaaaagtttacaccggttcaaatgaaacaaatacaagtcctaaattcaaccaaattctgagttcatcaacatcagttgctttaacaaaagcaaagatttcaaaacttcagaatcagcaggaagtaggaaatatttgtcgacccatgaatgcaactggttcacggctgaacactgaaactatgaagatcccttatttcctttgagattgatgaccgagagttcttgttcaacatactctcctgcgggtatcgccggatatttacttgccaaagatgattctgcgaaatgtcccaaaggtttcagctccgcatcagaggcaatgtgggcaaacaactgcaagacaggcaaaaacaaatctttcagataagccaaaagagttgagcttgtcaggaaacttatcaagagactggctaagacttacagtcgaggaaactctccataggcttcggttttgttcctttgctaatgtgatggcatccttcgtcttgctcgtaacaaccacttcatgcattccagcaatgcattctccagcagttaaccattctatctgcacacatgaacaccaacattttagcaccgtttcttcgattacataaatcgagatatttggctgttcatagatgcttcaagtaaacaaaaatgcagtaacatctccctacctgctttccagcttgaatcaagagacagcctaccggaactttaaccgcaaccttctctccattccttaaccaaatatatagaccagggaatctacttcttccatgaatcgttagaaaattaagatcatagtgatatcctgcaaatatcgtcccttcctcgttgtaacagttaagatcacttcccgttggagcaagaagatgaggaccctaagattcacaagaacgacactcttgaagttgaagaaatcacaatccatgcaatgactgttctgaacaacattacaacagctaagaacttacctgcttcatgagtgatgtaaatgcatccttaggcaaaccaaacccaattgctgccatttcagcaacaacctgaacagtattaacataatattcatcaccacatagttaaaaaaactaaacaagcatcagattccaactctgcagcaacgcctcacctcaaccgcggatatcatcttgtaaccccatgagtccattacttcttcccaccccggaaaaccttccggtacaacaggctcagaattaagctcctaaaagcatgtcactcacaaatcaaactacaacttcaacatataaacatatataatccgaaatctcatctaatgtatccgaagatcaaaccttaaaccgtgtgttagatggcctaggaccaactctccacatatatctccacttatgatctggtcctttcggaatatgtggtttgtattcattaggcattgtattgaacttttcttgcatctcttcatcaaccaaactcctcggcacttcaactccctccggcgtcgcaccaacctgttaaaaaatcaacacatagcaatgaaatattgtgtttacattcacaagattgaaaatttttaaacaacacaactacattaagcaatagtagctttaaactgagacaagttcactaatcatgccctaatttggcttaatccagattctcgtaactaattcgatagcaaacacgaaattcgattcaactgatttcacaatcaacaaagggatcaaacaacacaactacattaagcaatagtaattcccataagactaagatttgtgccctaatttggcttaatctagaaatgagaaaacaaaacacgaaattcgattaaaattgaatcacaatcgagagagtgatgatggttaattgaagaaacctgatagtgaagattaggtctttgttgcaatcgtttgaaatcatcaggtttttcgaaataattttccatcatatcaatgaatcgatcgttgtcttgagcgcaacatcgaggatctttaacaatgagagctccggtttcttttaggatccgactcacttgtcggcatgattcgagtagatcggatcctaattcatcaccggagaagtcgaggtaactagacagatctacgacgggtaactccatttaccgacaaaagagaggaagggacagtagtgaccagttctgtagttgtgtgttgttgttgcagtggtataggagtttgagattgagtggatttgtaccttcgtgtgttctatgtataccccactccattgttcattcatcattgtatcttttatgagaaaattgttgaggaagatttgttactttttagaaagtaatattcaaactttgaaaaaaaaaaggaatattgaaaatttgaaatagttctattttttttttttttttgtaaagtcaacatatgaatcaatagagaatttactaaagtgcggctccgaacgaagacatgcgattcaactgcgtataaaatatgatatgactcaattttatttttgttgtctatttatttaccgtcttttatgcaaaatttaaaatctaaaatccaaactttattaacttaaaaaccactataaatcccaaatatttatgggtcaaaatttactgaaactaaactggcgggactaaaatccttggaagctaacctgacatttttactccaacataataattttatttaaaaaaagaaaattaaatagtgaagatgaatattttggctgataagccataagcaaagaaagtaggaaggaacaaacaacatgcatgatagtcatcatctagtgttcctttttttagcttaaggtagcggatctgctacggtattacgaagaccagacgtgtacaactgttaaatttccttgaaagtgttgtttacaccaaataatgtggctatgttcatttccttgtcactagcgattgcaattatgtagttgaccaataactatataaccagattctgatcggttcgccactgtataaacaaaataaataaggaaacgtatcagcccatcactgacatcaactaaaacaaaccaaatatagccaatataaaactgtaccaagtgaactcttgttcggggcaagaagttaaatccgccatttattttttgaaattctttaaacttcaatagctaccaaacaccattgcacccaccattgcactcgttgtacaaactttatttatcttttgaatatcatttaacattacattccaaaaacaaaaacaaaaacaaaaaaactgtacctagtgccgaactgaacaactattgttatgcattctctttcttgtcgctagaatcacaacacttagaaaagaggtaagctacaaaatgtttgacagaagcatttgcaaattagacactgaaattgagaagcgtgaaaaaggatcgacgatagtaaaaaacaaaaaagaatgaaccgtatcaaaagttctataactttgagaaggcaataacagcacaggcttttccttctttttatcttgtagcattgtagaattagttaaaagtaaaacccagacaatactctccactaatcctacgcaatataatctcaatcattgtctgattgattatatatccattgatacagccacaacaatagctttttaggcttatagcagcatttgcatttttcactgggaagatccagttgctgtgcgctgctcgtattcaccttgttctgctttactaaattcctcaagcagttcacgctgtctctgcgttatatttctgccaaagaacatgaacaagaataagaaaagattgtgctgtggagcttgactattatatatcattgtcagacacaatttactcaggacttcgtaggacttacgcagggatgctgacgttgaaatgcacatactgatccccaaatttagtcgactttcttgctctaattcctgtttgtatcgtaaacaaaagcatgtcatttgaaaagtaaacaaacaagactccacttcacaattggtttctcaatctgttgtcttgctcttaataaccagtgtgagacactaattagctcaatccaagacaatcatactcaaaagtttctttcatcttacaggtattctacgactgaacttatcgacataaacaaaagagctcacctttatttcttagcactactttgtgaccaggttgggttccaggacggacctgcaacaaaagagtttccaagttagaatgctggagaagttccaagaccaggtcctaaacgacaacaagtgggagcagaaacccaaagctggaattaactatcagttagctagcaagcaaaatctgatcttctttttcatcaaagaaaaagacaatctaaagtttagaatcaaagcatttacgaatcactggatggcgaattctatttcacattgtcgagcttgttcagtttgctggcaagcatgtttcattgttgatagaactagagttaaaatcttaaagcatttttttaaatgtgaaaaaaattgatataccttcacgacaacatcaccagtgagggttggaacttgaatggttcctccaagaatggcctgacaaaagatgaaaaatatactcggttatcatgaacaatacataaacggtaaacgaactcacggatactgcaccagaagtccaaaatagatgctgaaggcaaaagtgtctataaacttttaaagacaggattgacaaaaccatgttatttcacctgggtaacactgagaaccgcgtccacatgaatatccgatccttctctgcggaacacaggatcttcacgaacctgaaaaggaatacagccaaataattgagacgcaagtaaataattaactatgactgtccgttagaaagttgactttagtaaagtcaccttgagagtaacataaagatctccaggctggtcaccttcaggatcagccccacccacccttgccacctttaatgtatcactattgtcaacccctatgagatgaaataaatgtgagatcaaagtgatgaaaactgcacaatattttttactattacctataactatggaaaaagaaatttacctggatcaatagtgactttcactgacttctgtcctcgaaccactctagcccctctacaggatttgcaaatactctagtataccaacaaaataaacttgatgagcaatccaatggttatagaaacctacttaaagaccaaacatttgagatgaatatatgataataagaagaggaataatcaaatatatgacatactgagaacgtttgaccagctccaccacacttctggcaagttgtttggatgcttaacatacccctcctcagtgaggtctgaaaaatgaaactgtagtttattacaaccataataaaacgaaaaggaaaatataattacagtgttcaactaaagttctgtaacatgcatgacactgaccatcccagagccattacaggctttgcatttctctcgtttggtaccaggaggaacaccttgtccacctgaatgtgaaaggaagaaagaaaacaacaataagtaacttgagactgagataaaaacaacaacatataaagcactttgatcttagaaatatatacataccacaagtattacaagccatctcggtttgaaaagtcacagttttggagcatccttgaacagcttccatgaaagaaagatcaagcaaaaccttacaacagtaaagaaggaaagaaaagagaaacctattaatcttaaagcaccaaaatgatctctaggaaaataagcagatcgcaataccttgacatcttgacctccaatatcttgccggtacatgttaaaaatctgattttcaaagaattagggtgtgaaccatggattttgattagtaagccacttccattaaaaagaaatatatctttatcaaagtatcagcgaatataaactgaaggctatctatcaaattagtaaacaacattcttttgagtggaatatattagatgaaaaccaagaaagaaaagtattacatcgccattgaagctcccaaagatatcaaatgggttaaacccaccaccaccaccaccaccgaagccttgatcatttggaaatccaccactagcattttgctcaaatgcttcatgaccaacctgcagacataacaacaaacttacatcatatctgacatacttaatcgagggagccatgccagcttgctaaaacgaaatccaagaagatattatgaagcctatgtacctggtcataaaggtcacgcttctccttatctttcaaaatctgatccaaaacaagtcccaaaccacaattcccttcagtataaaattctaacagatcaaaccaaatgctttcatctaaaagttcaaactcacttcatatgcttttgagacttcctggaacttcgtctcagcttctggatcatctttattcatatcaggatggagtttcttagcaagctgtatacaaaatagcatcaatcaatgagaaaccaaaagctatatcaaataaacatatttgactgtaatcgtatagtccctaccccataataagccttcttgatttcaccttcttgagcattcttactcactccaagaacactatagtagtccttagcagacataaacgaagaacctagtgttcataaacatcaaaaacaattcaattataaaaacaatctaacaactatgagtatttataaaacctctgatcatacctgttccatgaaaagaccttgtagaaccaaaattagtattaaaacctccaaagttgatccatttccgatcatgtcctacattacaagatcacaatgttaaaaccctcaattaaaaactcaatcacacacagaacaattcataagtattacatcttcttataaacccagttaccagattttgaagcgtaatctccaatcacgttagcatgattgccaacactcgtattcaatctcctataactcccaatacatactcctctcagtttctgcaatttaggtgaaggttaaccaattcgaaaccaattgagagagatacagagaaacatagaagaggagaacgaacctgattggctaaatcttgaataagcgatgaagagagacatcgacgactcaacaagcgaagaacctttgcgccattggaagggaccattttcctcaagcttcgatcttttaggttctactcaaattatatggagattgtactaagtgggtttaagtctcgagggattgagacagagcagccaaagttaaaaccctagccaaaaccctgttttgttgcttcagaactgtgtagaagatgcaatttctgttgttcgccacacaataccgggtttgaccttttcttactcaaccccacccatcatatccgacccaaatctacccgacccggaccatcgacttataacccttaaatgggcccaatggcccattaaaagcaagacagaactacagtatagttgccatcgtctctgtaactcgccgtcattccacacgattgaccggtaccaatcaacagtcactttccttttaactcgcccaattgacccgacccgacccacccatcagaactatagttaccgtcgcctctgtaacttcgccgtcgttgcttacgactgtgttggtctgatcgagaaatgaccggaaacttgtgaattcaggtaacttctacaaattatacttctcaatcatctaatttcaactgttcatcgtccttttgtcgttgtttccataaaaacctcacaaagtctccaattttaacattaatgatgagaactttgagcaatttagctgtaaatttcgaaactttaagttttctagctattgtacgcaggctattgttattagggtttcgctacaatgcactggttgctacagagaagggttagtttgtctactagtttgtgtaaatgcagagaaaggtttgattttttttatcagcagagatgtggtttagttaatgtaaagttgaaatgggttaaagatagagaacttgatgctgttgtggttcgtgaaaagcatcttagagcagtttgtaatctcgtttctgttatttcggcttctcctgatttgagactacctatctttaagcttttgcctcaccgtggtcagcttggtttgcctcaagagcttaagctttcagcttttattcggaggtatcccaacatttttgttgagcattgttattgggatagtgcaggtactagtgttccttgctttggtttaactcgtgagacgattgatctttattatgaagaagttgatgtttcacgggtgaatgaaagggatgttcttgtgaggttgtgtaaacttcttatgcttacttgtgaaagaacactttcgctacattctattgatcatcttagatgggacttgggtttgccgtatgattatcgagattcgttgattactaagcatccggatttgttcagtttggtgaagttgtctagtgatcttgacggtttaaaattaatacattgggatgaacacctcgctgtttcgcaaatgcaactgagagaggacgttggaaatgatgaacgtatggctttcccggttaaatttacgagagggtttggattgaagaggaagagtattgagtggctccaagaatggcaaagacttccttatacatcaccttatgtcgatgcatctcatttggatccaagaactgatttatcagagaagagaaatgttggagtgtttcacgaacttcttcatctaacaattggaaaaaagacagagaggaaaaacgttagcaatcttcgtaaaccgtttgcacttccgcagaagttcaccaaagtatttgagcgtcaccctggtattttctacatttctatgaaatgtgatacacagacagtgatccttagagaagcatatgataggcggcatctcatcgaaaagcaccctcttgttgaagtcagggaaaagttcgcaaacatgatgaatgaagggtttctggatagaagtcggggactgtatcaaaaatctgttgaggctgatttggagaagaacaatatcaagacaagttatccggtttggtcagacgaagaagaagagttggacaataatttgatatctggatacgactctgattgtcctgtggttgaagaacataaacgggtgttttagttgtgagttgagtacaagttttgttacaatggaaccaaatcaagacgttgcagacggcgttgagagtgaaagattacattctgcatctaactgtagcagcctgagcttccggcatcatatggggttgtacgccttagttcattcaactgagtctgaacatcattttccccacaatgctccaaattgggatgttagaaacaaaaatttcattggatggatccctacagaagacagacattctcaagcaagcttttagcattttcgcaagcgaacaaaagctggtttattgttgccggttctccaaacgccccatgaggacatagcattgcagaaagaatgggaaagttacttagggctcttctgttcaaagcgtgcatacacggatacacctttagtcaatctgagttatgacatcgtgtttccgggaatatggttattggaggctacattggatcgttgatagtgaggttgttctatattgtcattcgactcggtcccttaacatacaacaaatccaaaaccttattgttttcgtatccggaaatacttttaccactctagaagaattatgaaaagaagtggtgaagtttggttttagtgttcttttttttttttttttttttttgaagatgcttacatcttttagctacatagtcgggtcctagtgttactatccttaatatgaaaacaaatgagtcaaactcaatggtataattattgttacttacaaatcggaaaaccaaaaaaaaaaaaaaatgaccgaaaaaaaaaaaaggttatttaaaagagggggaagaataccatgactgaaatgagtagtatgagtagatgatccattacaagcaagtaattaaaaagtagtgttcgaatagaaaacaaattgtagggtacctagttatgacataacgtgatttgtggctatggtaccaatttaccacatctcttcgggaggatctgagagagacatggaactgtatgtttgaggaaaatgagatggcatgaacgtcgactgatctgccatggatgtcgagatataattcacacgagcatcaccatgtaagtacggattgtatggctcaagtatactggttggtgacggcttgtgtgatgtgactgacatgtaaactggtggttgttgcgggaagtacgttttcttatggaaaaactgtggtccaccgtgaggatacatataaggcgattgaggaggaccgtaaatccaagttgggggctggttgagtcgccaattattattattgttatatcgaccgtcactactaccacctccgcgattttttttcttgctacgaccgcgtcccatattactattgttgttgtgatactcttgcggatagcgttcttgctggcgggggacggtaaataagacattcgatagtgaggggtgatttgtgtggctcaaggaagacttgcttttgttggagaggcgactctcttccataagcaacattgagcgagcttcagtgaatgagggaaatggagacttgtgtttgattacgttgagtatgtaatcatatttctccgtgagaccgttgagtagatgcataacaagaacgcgatctgagatgggagagtcgacatttgtcaaaaggtctgaaagcgacttcaatttttgacagtactcatgtaccgagagatcgtcgatcgtcgtagtacgcaattcattttcaaactgaagtgcacgagcctccttattatcacggaagagattttctagggagagccataagtctcgagctgtgcaccctactttgatgatggtgtcaagaagtgaatcagtgatggtgccatatatccacatcttcacaagtccatcacgttccttccatcttttctcggtcattggagtcggtgttgaagatccatcgatgtgaccaaggacaccaaaacttaggcaaagagtctcaaaaagctcacgccacacatcgtagttcaacttatttaagtcaagagtgacaaaaatataagcgcgaatctgcatgattccaaatgatttttcgtacgaagatagagtggtgtcagccatcacaaaacagaaaggtggaaagaagagaattagtaggtaagaacagaaagacagactacgtttcactcaaaacaaaaaaaaagttttagttaaggttcttctgataataagaaactacgtgtgtctcttctattcattaggtcatctatatatacatgagtgtagagatctaggtatataccgtatctcataatatgtgcaatttattcatatatacaccactaacaattatgagatggtttgaggagtcttaaccaaataaatgaactattgaatagattgaaaaaaaaatctttagagaatatgaaaattacatatgtgttgtatactatccttaccccatgattatagttccatattttatcatatatatattgaactatacaaatacaaaatgagttatatgataataataaaaaatattagttttcagaataaaatagattgataaagtttttaaattaaaatatataaatttttaaactactcttatgtgatacttttaaaaactacttatcagtgataacaaaaacaagtactcactaattaaaaaaaataaacttgactaaacttctaatatacagagtaatttacatgttattttttcgcaacgatatttatatttttattactatagtttacaaaacgaaaaataacccatttacaagtttttcatatatccaaattattatgaaacatgttaaattttctctaataggaaaaacatttacaaaatccgaaagatgatagtcatggttaacaataaattttagtaatcatttagtttttttatttgcattaatttagtctatttatatattttccacaccaattaacgttagtattatatactacaacatattacatatgtttcttattaaattgatttttaattatgctttaagaaaaaatctaagaaaaacatttacaaatcccaaagatgatagtaatgattaacaatactcacagtcacactcacacctagttttcattaaccacatatcttttttacttttaagtattacaaaattctgcaaacggcaagttgaatttaaattggttttttatattacatatatattggaaatttatctacatcgtctttttttttcctaacttttatttaaaataaaattcaaaagctgttacaaaactaaaaaggtgatattgtttagaattagaacgtgcattaccattatgcaaaaggatattgtttgctttgagcattgcatagaataaaattttaaataaaccttttttgcgcaattgctctacttgttttgcagccttatacttttcctccaaattcattttcctataaagagagaatcctttaaaaacttgtagctcaatgagagacaaaagtagcttcttcataattacattctttacttcaacttataaacaagcttcttgattagtttaatcagaataaatacctttcttccacaattaggtttctctcctcaagattctttcccttttaaatctcccttgcactccaagaaaccaagaaaaccccacaatgagaaacaccaccaaactagtcgtgcacgtggttgatgctcaatatcttatgcccagagatggccaaggatcagcaagtccttttgtagaagttgatttccttaaccagttaagcaaaacaagaaccgtacctaaaagccttaaccctgtttggaaccaaaaactctactttgattatgaccagagtgtgataaaccagcacaaccaacacattgaagtctcggtttaccacgaaagaagaccgattcccggtagaagtttcctcggtagagtcaagatttctctctgtaatattgtttacaaggacgaccaagtgtatcaacgcttcacgttggagaagaaatggcttctctcttctgttaaaggtgagattggtctcaaattctacatttcatcgtcagaagaagaccaaacatttcctcttccttctaaaccttacaccagcccaacacaagcctctgcctctggaactgaagaagatactgctgattctgaaacagaagattctctaaagagttttgcatcagcagaggaagaagatcttgctgattcggtcagtgagtgtgtcgaagggaaaaagagtgaagaagttaaagaaccagttcagaaactacatagacaagaagtttttgctcggccagcacctatgcagtccattcgcctacggtctcgtgaaaacccgcatgaagcccaaaaaccgatgtctcgtggagctaaccagcttcaccctcaaaaccccaaccacttgcaatcatatggtgacactgacctagacgactttaaggtgaaagacatgaacttggatcttggagagagatggccaaatccaaatgctggagaaagatttacaggcacatacgatcttgtggaacagatgttttatctctatgttcgagttgttaaagcaaaagagctaccacctggttcaataactggcggatgtgatccttacgtggaggtcaagcttgggaactacaagggaagaacgaaaatttttgataggaagacaacaattcctgaatggaaccaagtttttgcatttaccaaagaacggattcaatcatcagttcttgaagttttcgtgaaggacaaggaaacactaggtcgagatgatattcttggaaaggtagtgtttgatctgaacgagatcccaacaagggttccaccaaacagtcctttggctccgcagtggtaccgattagaggattggagaggagaaggcaaagtagtacgaggagagataatgcttgctgtctggatgggaactcaagccgatgaagcttttcctgaagcatggcacgccgactctgcttctgttcatggagaaggcgtgttcaacattagatccaaggtatatgtatctcctaagctgtggtacttaagagtcaatgttatcgaagctcaagacatgatcccgagtgatagaaaccggcttcctgatgttttcgtcaaagcaagtgttggaatgcaaaccctaaagacaagtatctgttctataaagaccacaaatccactctggaaagaagatcttgtctttgtggttgctgagccatttgaagagcagctagtgatctctgtcgaagaccgcgttcacacgtctaaagatgaagtaattggcaagattaccctgccgatgaacgtgttcgaaaagcgtttagaccaccgtccagtccattcccgttggttcaatcttgataagtacggtaccggagttcttgagccagacgcaagaagaaaagaacataagttctcgagccggattcacctacgaatctgtcttgaaggaggctaccatgtgatggacgagtcaacaatgtacattagcgacacaagacctacagctagacagttatggaagcagccggttggaatgttagagattgggattcttggagcaaatgggttggtgccaatgaagttaaaagacggtagaggaagcactaacgcttattgtgttgctaagtatggtcaaaaatgggtgagaaccagaaccattcttgacacattaagtcctagatggaacgagcagtacacatgggaagtatatgatccttgtactgtcattactctcggagttttcgacaatagtcatttgggctctgcacaatccggaactgcagattctagagatgcaagaatcggaaaggtgatctctttctctctatatatacaatcaatcttaaggtgaccatatagttctgtttttatattttacaatttgcttctttgaaactagaactgaatacttttttttttttggttcggtttggtttataaataaatttcagttcatatgattttgaacaaaatcttaataaaagtacaaataaggtaagtaaaaacacatttaatttatactatatatcttagtatttttttttactttttagttttagtatataaatattttacaaaataattttaaaattaatttattcaatttttatttggttttaattatttttgtcactattcagtttaaaatttgatttggttttcgtttaattttcttagctctgtttggttattatggccatgcatgcataccctagtcactcatacgttgatatgcattatgtctcacttctaactttgtgtgcttgaaacccttggaacaggttcgaataaggttgtctacactagaggctcacaagatctacacacattcatttccgctacttgttcttcaaccgcacggtctcaagaaaacgggggacctacaaatatctgtccgttttacaactctctctttagccaacatcatctacaattacggccacccgcttctccccaaaatgcactatcttttccctttcacggtcaaccaagtagatggtttaaggtaccaagccatgaacattgtttcaacccgccttggccgagctgagccaccacttaggaaagaggtcgtcgagtacatgctggatgtagattctcacttatggagcatgagaagaagcaaagccaacttttttcgcataatgtcgcttctttcaggttatttcttggtcgggaagtggctcgaagatgtttgcaactggagatacccggttacttcggttctggtcaatgtcttgttcttcattttggtcatgtaccctgaactgattttgcctaccatgtttctctacatgttcttcattggattgtggaacttcaggtccaggccgagacaccctcctcacatggatatgaaactctcatgggccgaggctgtaggtcctgatgagctcgatgaagagtttgacacattcccaacgtctcggtcacaagagttggtgcgtctgagatatgaccggctcagaagcgtggcaggtaggatccagactgttgttggagacattgcagctcagggagagagaatccagtcacttttaagctggcgagaccccagggctacaagcctcttcattttgttctgcttggctgcgtcggtggtcctatacgcaatgccgttcaaagcaatagcactagccagtgggctatactatctaaggcatccaaagtttagaagcaagttaccttctctgccaagtaacttcttcaagagattgccgtctagtaccgatagtcttctttgacgaccaaaactctttcttgagcaagatttacaataaaatgactttgttaaactttttcttccacttctactatgaaataatattacgaacatgtcataaggtttgtaagatttaacagaagattaaaaaaaaaaaaggtttgtagccatatacatttgttggtagtcaattacataactcatccttggccaaaaagatgtattgtggacgtttttcgctgacccgccgttgagatttttttgtaagagggtttggacgtttttcgggtatgctctgtagtgagttccatgacttcatcgagattcttactgcggaaaactggtcgtcagaagattatttggaacaagctaataatgtgaaaattgataaacgaaagatcaaaaataagaatgtgattgatagttttatatcactaacaatgagtttaaaatagatccaaatgttttcatgacaacaattagattgataaaagaaaagacaaacaaaaacagttagattgactaatgaattggtttgtctctggaaatgcagcatcgcgtaacatattatattaattattatttttggatcaactaacatgttatattaattaaaacaaaattatatatatatataccagaatttctattaactatttcacttattcacttgtttgtttatgttgaatatttttctcataacatgaatggctttttcaaatctatatatacatttttcagccattttgtgaaataaatcttggagttggaacttatttacaatggctgccactggcttttaattattgtttttttcagcaataaattgattaacaaactaaaaacattccaaatatattccaatcccatatatcacgcagatttttccaaaatttgaactagattttggcaactatttaaaacaaaaatgtttgacaacccaaaagacaattgcaatcccttaaaatgagcaaaacgcaactaaatacatttattatcaattcactaaatcttatttctccaaaatttgaactagatttcgacaactatttaaaacaaagttttgtttgacaaactaaaacacaattgcaatcccgtaaaatatttattttaattataaatttaaattagcggggtaccgcggttttttcttacagaacgggtttgacggaacgggtttggaaggacgttacttaataacaattgtaaactataaaataaaaatattttatagataaatataatttgcaaaattttatatatactaatttaaaaaaataaattgtcggttaaaatctagttttactattatattctaaacaaagcgatattcactgattttcaaaacttttccggatattcattttttctagagaaaagtggctcacgaatattggtgtttcgcaaaatatctataacacaatcctactatgtcgtgaaagattaaaagaagttttaacatacgtttatgtatgatatattatatgtacttttgtaaaatatatatatatatatatatatatatatatgtacttttgttttatagatttggaataagataatcaactctatttctcttttggtagttcttaaacatgatatgctaattcagattacaacttctattatatgtacgtacatatatacacatcgatgtatattaattttgttagtaaatagaatgttgaaagtcttataatattttaaaacagaaataatacatagaatgattatgaagagatagtggagaccttgaagtttttaaccgacaaaattttgcaaatcaaaatatcaaaaggaagaatgctttcctaaaaaagaatgattactggtcaaattagtcggcaaccggtaagtaagcaaacaatcgggaacgtgttactgttacagtgttaccataacgtgtaggttgggtaacacaaaggtaactgtgaattggcgggaacaaaaaaaaaacttttgtcgtaaaaaaaacaacaacaaaaaagttaactttgaattcttaggacatgttaagaaagccttcataacatatttgtttagttctcaaataatgtccgtaattataggaaaataaactttctggtttttatcaatcatcaaaatagaacacaacatagctctttaacacatagttgtaagaaagatagtgctccgaatcttcatagatttcataatctatacagtgttgactgtttgagaatatgaaaggatatgcatcaaaatagtgaaactctaaacaccaaaggtcaaaggaaaagacttgaaaccaaaaacaaagagttatatacactgcgagaagctgatcgagttaacttcgtcgctggcgatggaaccttttactcatgtcaccaaaaatcatgcaacaaggacgttttctaacgattgcatgtatattgttttgatttgaattgttaacgttaggcatttcaaacatatatattatcttctaattttctgatagcatacttattacgttgttatatagtataattattcaataaactatatcttcagtatattctaaacactgttttataatgtgaaatatgattatttttgttgtttataatatgattttctaagatatgtatttcttactatacaccattaattggatgatttatgtaattatcatgcaatttgtagcttgacgtttatagagcctaattttcaatcttcgaaaacttatatatacttctaattgctagcttctgcaaactcgattctgattttacgtaacatatgctaatttatgaacactgactgtcgagaatgattttatattttctttctatatacatatttaaacaaaaagttttttgaccgacaaaattttgcaaatgaaatatctaaatgaataatgctttcaatataaatatgatttatggtcaaaatagccggaaagtataaaacaatccatagggcactcatagttgtatgttaccatttacgagtaggtggccctgattctaaattaacaaacatatacttaagctctttataaaaaacgcgacataccaaccaaccaattataaacataagtgtttctcgtattaattttttcttatgccggcatacaaaccaagtaatggagttatatatcttggtttcactttctaacaatcaatatactatcaaataatgaatatacatattatcacttgtcagccttattagtagacccacacaaattccttttcatttccaacagctatatatactaacgtcctttaccttcattttcacatcaccaatccatctaagatactataactactctttccaaaagcaattttaaatggtgtcattttgcggtagaaggttcgccttcttgattatctttctctttgcagcacaatatgagcgtgtctacgctggtagctttcacaaggacgttcagatacattggggtgatggccgtggaaaaattctcgacaatgtcggaaatcttctttctctctcgctcgacaaattctctggttccggttttcagtcccatcaagagtttctttatggcaaagtagaggttcaaatgaaacttgtacctggtaactctgctggaacagtgacaacattctatgtaagtaatatacatatctcgatcaaaccattcttgtcatctttagctatttactagatttcatatatttatactacttgctttatgatgactttgtgtagctaaaatctcctggaactacatgggatgaaatagattttgagttcttgggaaacataagtggtcatccatatactcttcatactaatgtttacacaaaaggcacaggagacaaagaacaacagtttcatctatggtttgacccaactgttgactttcacacttattgtatcatatggaatccccaaagggtcatgtaagagcaactttttttattagtttaattaatcccttgcatataatagaatctcatatgttttgaggctataagctcatcaaccaacaattttttttttccttttttcttgttcctttttcagttttacaatagatggaattccgataagagaattcaagaactccgaagcccttggagttcccttcccaaagcatcaaccaatgaggctctatgctagcctttgggaagccgagcattgggctacaagaggaggattagagaaaacagactggtccaaagctcctttcaccgctttctacagaaactacaatgtggatgcatgtgtgtggtccaatggaaaatcatcatgctctgcgaattcctcatggtttactcaagtacttgatttcaaaggcaagaatagagtgaaatgggcacagagaaagtacatggtctacaactattgcactgataagaaaagatttcctcaaggtgctcctccagagtgcagttaaataactgattgcttgattcacgaattaatcacgtggcattgtctttgtaacggaaatgatgtttatctatattttggcactagctgagtatttgcgctaaataaattacttctctattagtaattgtttttttttgttctattatgttgtttcttttatattatttgtaagtgtgatttgcgttagttacctagttacttgtttcagtaacttttgttattcttaaactgtctcttccagttgtaacattaaaatttgaaatttacaaagagttatagtatgaggtaattatagatcaatattatagtttttttaattgtattcttagtaatttgggctgtgaaaatatttttattgtaaaattttaagtgaaattaattttcactaagataccatcaatgtgagtgatatgatccttgtttaggagtgtgcaccacaaattctttgtttatcctgttccctaaagattcttgtggttatttaagtagaaacactttgttttctaacatgtctgagtcaaatcgaaaaagaaatatatatattaagtagattttatcataaaaatcaagttcctttttatgctccatctctacccaaatcaattataagaagagatattaattaattataaatgaaatgagataattcgcatataattaaacaacaaaacaatgacaacaaaacgacatcgttgcacttatcattaattaaagctgaaccctccatcagaaacagaggcacttcccatacttagtcacactctagctctgttgatttcttttcccactgtcgagctctgcttcatcaacgccacaggtatcggagaaaatgcgtcaaggaaatctataatgcatgctttgtttcgtctaatttctcctgaaaattgctcaaatctgtagagctttgttttttttaacttcttcagctaatctaatggagtggtctgaagaagaaggagagattctacctgatttcgttgataactactatttcattgatcaaagtgaagagcttgtcaagttttgtgatttgccactgaaatggaatagcgttgattatgatgatgatagctcaggattgtctgtgtttctgcgtggtaatattgactctggagacgagtcattctctaagcttgttaaaggttggaacttttatctttcttctgttgatgaacatcccaaaattgaggttcttctacatgggttgcattggataactctacaaagcccaagaaagagttatgagactttgataagaacaagtctggttactcttcagtttcttcactttgttaaaagggatccggatgttgcaagtggtgatgtgtggagtagtttacagaaagttcatgggtatgattggaatagtttgtttttttgttatgttgttgtttttatgtcatatttgaaatcatgtgtttgttttgttgtttatttaggatccagccttctgaggatgacttttagatcatgtttctttactctgtgaagctatgaaaagagatgaagatttgacaaaatcaaaggtctgtttttttctttggtctctcttatcttcgttggaaaggattgtttattacatatttcttgtgcgtttggttctaatgagagctgaactatatgactatgagtctgattccttagcttctaatacttttgtttcatttttgctctttgtgtgtttcagatttgagagtcttcttttattgagtggctacttgagaattcagaacacatattagtttagaaggaatcaaattaatcagaaaagcaactctcatttgtatattcactgcttctccttgatgatttattgtgtagtttttgattacgtttctggggaagacatcacaaacaacacctatcgaagtggtaagacctagttagaagtggtttctttgttctcccccctttcttgctctcttttctagtgagtttaattcttttcttttttttctcttaaggaacttccaacagaccatctacaagatgctcagacaccaatggaacaggactccattgttgagaatatgacagatgaggaaaacagcagcagtagcgatgatgattctgaggcgaacctgcagtttgatccagtatgttctatttgtgacaatggtggttatgttctgtggtatgtcaagcttcatagtttcttaagagttgatgctacttctagagctccttacaaactgcaacgatttcatttaatctcattgttttgaactcagttgtgaaggaagttgcttgagatctttccatccaaccatagctgatggaattgagacagagtgcgaatcgctaggattcactgataagactcaaattcaggtactgtgaatcaactttagagtttctgttcaatatgcgattatggtgaggcttcatgctgaagttggtttgttacatatgtaggcactcgggacctatttgtgtaacaattgtctctataaacagcaccagtgctatgcttgtggcgaattgggatcctctgatgaaaatttctctcaacaggtatgatatacttgcaccatatatgtgcatatacttggtaagttaagtttagctgtatttagtacttgaaattcatccaactgtttactgttttgaaggtcttcccttgctctgcgtcaaactgtggtcatttctaccatcctgaatgcgttgcaagacttctctgtgctgatgatcaaaacaaagcagaagaacttcaagccaagattgctgctagagactgctttgcctgtcctctacacacatgtaaactctgtaacatgagtgaagacaagaatcaatatgcgtgcattttgctgtatgcagacgttgcccaacagcttatcacagaaaatgtttacctaggtaaaccgtttttcattttactttttcctcaaactcctactggccatagatttagctttagatatttgttttcttcgtttgtattcagggatattacttctgaactcaactctgacgatgagacattgcaaagagcttgggaaagtctgcttccttacaaccgcattcttatatattgtttgtaagtttttaaatgttctgatcggttttgagtgcattttaaagtagatttttctgttatgatccgtataatgtatagcttttcataaacttttgaacagggcccatgagatagacggtcttattcttactccagctagagaccacttagtttttcctgatgtatctggacaaagaagaacacgaagtcacgggctagcacagttcaaagaggatgttctgggtatggagacggatcattgtcatcatgagggtctatttactggtcttggtattactgacccttatgagaaaccaaaaaaagatattagctgcgatgaggtggaacagaggtaatgttctttttggccactatacaagaaattgttacattattaataggttcagctaatcattttaacttttcgggtaagacagggtgatgggtataatcgatgaagtggaatcctcgtttaactttgatgagttcgttaagtctcgtaggccaacccatataaaatcctaccactcaggaaactattttagtaagaacatcacaacaggattggttcggactcatgtcaatgtatgtcactatgactgcggtgttttttatgaaacatagatatgtaatttagttagcagtattgtctccctgaatcttaacgacaattctacaggctgctcgagctgccttaaagatgtttgaagaagggcgtgacagagatgcaagagctttatttgacccagatagcctactccaactcatgaagcataaggttataaattatattcagctatcttaatatttttatcttaaacttattctggaagctggtatgttattcaatgagaatcacttagctttcacagtataaaacattcatgtttttgatgaactgcagaaaaagcttgaaatttcgccttttctccatggtatgcgctacacatcgtttggtcgtcacttcacaaatccagagaagcttaaagaggtgaactatttatctcttttgttttgttaactcttctttaccttgatccatcgtagtctactggtttagtgatgattattaaaaaccaatttaatagaaattaatgatgcagattgtagagaggctccactggtatgtcgaaaatggcgatacggtaaatgtgctaataattccttaagcaatacctctgctattaggtaaattatcaaatataacattctcgaaggtttcaggtagtcgacttttgctgcggctctaatgacttcagttgtttgatgaaagaaaagcttatggaaacggggaaaatatgcttctacaaaaacttagatctcatcccacctaaggtacagctaccactcttttactcttttgtttgaagctgtttctaaaacatgacgtttccatggcagaacaacttcaattttgagatgagagattggctgagtgtgaaggaagaagagttacccgatggctctcaactggtaagaaagcaaatgaaatcctgaagttgagatgcatttattgactacactgattgagtttcctttttgtcatggataaaaacagattatgggattgaacccgccttttggttacaaagccagtcttgctaacactttcattaagaaggccctcgagtttaaaccgaagatcttaatcctcatcgtaccaagtgaaacaaaaaggtaaatagcaaatagacagtctcaatgacaaacttttcataactctgggtttgtctacattcagggtcgatgcgattgatgattatgagttgatttgggaggacagaaatttacttgctggaatggtaagtacatgtacaaatgactccaactctcgtttattttacaaataagcttttgatcaatctctgtactttttgttctgcagtcgttctacttgcctgggtcagtagatgtgaatgataaaacgatagagcagtggaacaatataacgccacctctatacctttggagccgaagggatttgagtagaagccacaagaccacagcagttcaacagggtcacataacacagatgcatcacttcacctacaatggcgatagtcaccacacagagatccctcaaggtgatgatgatactgatatggtacaagacatggagatatcccctacctgaatatatgacttaacttgttggagtgcgagagaagaaacattaccacatctttagcttttggaaatattatgagattaaccttagtgctttaattctcttctttttttcttatgattttttcaaaacacaaaagctaaatttaatttattgaataatctttctttctcacgttcatgtccatgtccctaattagattccaaatttaatcacttgactcattgttgttactactatttctctcttgattttctaaaaattattgtttatctctttcaattttcgctgtcctcatttttcagttcactttattcggaagttattattgaaaaacaagtttatgtccatgtggataactatatttacttgtatttttttttttacttttattaattttggagaagaaattgtcccagtataacaaaagttgttcctgaatgtaataataagatcgggatacaagattactaatgtcgagatggtttttgtacattttctttttgttcaaaatcattgcattcaaatcaaatcctcaaaaaataagaaaccatacaaatgaaaactgaaaaactacaagaaaaataaagataaagggtcgaagatttttccaataaaatgttcaactccaaaaagcttgcaatgacgggaatatctttggatgcatgtacggattcggaattgaagccaaccttcaagaaatccaagaccaacttgtggttataaaatgttggtacggttaaagcattggagctttcaataattctgttttctcatcagaaaaagaaatataataaggcattggagctttcaacttgtaattgtaaaaggctcgtacattttatatatgacaattgttgaaagagatttttttttaatttgttttctcatcagaaagttaaaatttaacctacaaattgttaaacttatttattcttttttttttttggttatgacacaagattaatacattgtttatccttaataataccaccgtaaattatatttttacgacaagaaaattaagaattctcttttagtaaaataatttattacataaatgaaatacaatatgatcatgatttaaatatgcccaaattggtaacaattgaataccagtttgaatagataaaagcatttggtaacatttaattattcatagcaaggcggcaaatcatctggtggaggcagaatctgctgatttggctctctaccattcttaacaatgaacacaacattcataccccacgtttgatgtctatccaagtgacagtgcatgaaccaaacccctataaaacaaaattgcaagattataaccatcaccttcaaaagtgataatttaactagagatgtacattagttatttgatttggttccttccaatttatagtaatggttttaggtttattttaatttcagaatcgataacccattcaaaatcaaattttggtcagttggatttgatttctatttaatttcagtttttaattctatttaagattataaataacttcaaaatataaatagcttaccaattctaatttatgctatgtatatagtagctatatatataatttaattagaccataataaacatataatattagaagaaacaaatttgaaattcgattttttgtttgaaatcggataaaaatattttgaaaaatccggtttagttaggtcgtttggccttttttaaaatttcttctagagtggtcggctacaacaccacaatttaaacaacaagtatagggattcgaagctagtcaaagctaagaataaaacttaggacgctacttataagttatcaactcttatctcttatttaggttaataagattataaattaaggatatatctaagatacgtaccgggattatcagctacgaatctgatagcgatccaaccattcctaggcacggtcattgtatttttatacggtggatcgtagagattatatctcgacgacggatcttcttcacttatgttatagttcccgaaccctactccaaccacatagaagctaaaaccatggagatgcataggatgatcgagtccaccaccaaccaaactagtcccttgaataacaagctcaaccacttgaccgaactcaatcacctttacctcggttgcgagtctcggagtttccaaaaacaatggctgattttctgcggtgaaattaaaaatcaacggtggaaactccggaaaccgcgttccataaacgcctttaatgtgatagtaataagcttttagtatgtccacgtgacttggtgtgacaaacgatatgttgttcatactcgctgctaatctcgacccatttggaccttcgcacgagttttgaggacacatgcgaagatttattgaaaccgtcgtgattatcctacgagagatttggacaggaacttgaccggagaataagcatttgatcttggtaaagaatccaaaagctgctgaggtgtcattgtaaaaaggaagggttgggtaatatcctgaaaacgatgatgttttagctttgcatgaagaggtgtaacttaagattcctatggtagtggagttgttgaaatcgatatttccgctttggtaagctctggcagccatgtaataagtgcgttcggggtcttggtcagcgtgtaataacatgtctagtgtttcgccaggggatatagtgatataagtagcctttataggtttgatgtagtgtccatcggccgagactacggtgaggctgtggttcgcgattgcgaaaaagagaggtaggttcattgcggcatttaccatccgaatgcggtaggttttccccttctctaccgtgagatgaaatgtatctgttcatgtaaaataacaaaattactaggtaagttttaaacgtatacgcatgcataatacaaaaagataatgtaatactttcaaaaatataaacaaaaatgttttatataataaatactaacacacacataagttcctaatgagtaatcacaactaacaaccaatagaatgaaatacaaataattatcttataaaatcccaataaattttaaacaatttaaaaacaaaaaaaaaacttttaaagaagatttcaacaaatgaagatgcttttacttttgtttttttttgtgttcaaaaaagattttaacaaatgctcattctaatcattttactctgttttcctagtctatcacttcacatataatgattttaattcacagttacacttgtataaagtttttatcccacaaattgtgataaatatacggatcaaaaacatactaatcaaggagaaatgataaaaaaaaaaatgaaaattataacaaaacctgatttagagcaaggatacaagaaaccaggatgtccattgatggtcaaagcatcggacacattaggagcccctcctgtccttacgaactcctcaacgacctctctcacatccctcttccaccactcacctgatgaatcgcataaaaaaaattttaagaagaagaagaaaaaaaatatttgtgtaacaatatacaatagaaatctgaaaatgaaaatattttgtccatttacccaaaattatggggacttcatggtctgcctttggaaaagggaggatttgcggggggcgaggatatacgaaaataagaccgtgtacagttgcacgtgtccaagagctatgcgcgtgccaccaaacagtcgtgtcttcgatggaaaatatgactttgtacaaaaaatctgacccgggtcgaatcgggcattgtgtgatgtattcaggaccatctgaccacggatttctcggctgctctacaccatgcctgtgtgtttaaatatacatatacacttattcaatcatcatcgtcttaatttattatatgcttgtaagtggtataatacaaatggtctttagactaccaatgcattgtgatgttttcactagctcggttttgaacgttaacataaatagtgtctcctttgtgaacctttataatcggtccaggaaactgactattaacggttaaaatcgccttcgtgctacacagtttcgtatatggaacttccctaacctgccattaattaacgattttattagttttaatcaattaaagtttgtttactcacgcccaattgactaactaatttaaacttaccgtgaatgtatagtgatgcgcaatgcaattgttgtagaggaaaagagagattaggaataaattgaagaaggaatgtgacattttggaagagttttagtaaattaattaccctgactgaagttcatcaaagaatagagaggcatatatacatatattttatatacgtatagagaccgtctttctcaaattagttacattcggatataagaattttgtattttacaaaatatgttttcggtaagcatcatcttcttggtccgttttgactaatgagttcacattcccacaaatatttaactacatttcttggtcaaacgaaactttcaagttaacgaaaacagtaaagtcgtatttatctaactctagattatattttcacatgttatatcatatatagtaagagacgtgacatcaatcaactagttcaaagtctttactaaagataaaataaaatcacttatgagttttgttaggccaagcattacctttattttatataaaccaacaccagaaatattccgaaactcgttacgtttttgtgttaatttagtttcttacgtgcatagtttacattgttcactgaattaaatgaaaacgagttatcatctaattagatgtcggggagctaccattccacgccaaagctacatgtacgtaacgtacgtattaacgtatagaattttaagattcctgaaaacaattttctttttttacgaaagagatgtttcgctaacaataaaagaaacgaaagagatgtttcttttttaattgtttacattttactgaaagaatgtttttaaaactaattttgcgaatatttgtccaagatttttgactggtgaaatgtcgatttctaatgcattacgagaaacttaaactggtgaacttcaaagaatcttcttttttttttctttttctaatttggaaaactttaataaccggacgaaatgttcccctataaacattgttaatttgtttggtagcaaatttttttttttttttttggattttagcccaatggcttctcttcatgatattgttttttttttttgtttgtcaaacctcttcatgtcatcttctatagattatagcaaaatggaagataaaaaaataaatagtgatctccagccttggtaattatcctagctactcctcctcattcaggttcattggcaaatgagactgtgcagaacagtgtcttagtaagcaatcaatttgctgtgtttgacatgggagtatatggttatgtgatgggtgatgaatcctctcaaggacccaaggaggaaggacaatgatcaagcctactcaaaaatttcactagcaatggattatgggtgtggtgtgaagatgcagattctgacaacaacgagctgatggatatcaggagctgttagatatcagaataacaagttgatggatatcaggacaacgagatggtggacattaggaaactcttggatatcaggaagctgcatcaaatctacatcaaacgtctgaattgctgacatggacgcgtaagctgacatgatggagctggagtggttgatgtgacgtgccaagacgctttgctgacttagcgtggtgatcaaagacgaaagtcggttgaaaagatttggtgaatattcttctcaacaaataaggaaagagatagacttaaatatcaagaaggatctcaaacaaggaaagtgataggcttggaaatcaaggaaaatcccaacaagaaaagagataggtttgacgttcaagaaagatcccgctcatcgattcttggagaatagtataaattttctagaaataggcattgagccgccgaaacactctagaatattgccatacgtgtatagctttcgaagcctagaaaaagcttaaaaagtggtgtttgtaattctctttctcttcccaggtgtgtgataagaaacggatgaaagaattaggctttgatttgtttttagtagaggttgactattcgggtagaatatgtcaagtaattgccgagctaatagaattcttgtaaaaaatttattattaataagaataagtgaaaaatgtttgcttggcgcattccaagcaaaatcagtgtgttgtgtatcctctatacctttttatggtgatcgtagataattgttcctaaagtcgcttgaggattcttttctcccattgctctactttctccttattagattctacttgtatgatctcctctttctatactttcgaaacaatatgatcctaaattatatcctagtaaatcttttttatgcatttaactgaaagcctcatatcaaacaacgtttaacaaaattatgtaaaccttgaacctaaacacatccttatttttttctttctctttttatatttagattcattggccagtcttcttcacgcttgtcccacataaatgtattcttccctcaaggatttccctttctttgatcatagtaaacttatcttcgaacccatttttttattttctaattaaaatgtaaaatataatttattcgaaaaaaagtttttgttcaaacattttttctaaggtttaaatacaatatttataaatcaatcccggaaaatacaattttttgaatagtataaagtagcacataatttgttctagtaaacacagtaatagaatatagatttcatgttattatatttgtaggtgtttttaaatataaaactaaaaaaagaatataaaataaatagagtgtctttaattttagatttatgtctatagaaagatattttagacaccaaccagaagaagtgtctttattttttttattaacctatgctaaagacatccatcaagaatttttattaacctggcccttacactgacttgcataggtcacatcacaagatagaacagatagattatcattcatttatttttattcatgtgtctctcgagctaataacggatagttttcttcattctatttctcttgtttctcttgtagacctgaacattctcaaacgatgacactttatttccccttctaaacagtgtcgtgcctaagcttcgagaggcctaatgcatgcaacttgtaactatatatgacatttttaatttgaaacatgcatacgtttcattttgtaatttcttaacttaccactcaaattactttacaaaatattatttaaaacacttaaaaacattatagttaaaatattttacaattttataactttacaacatgtaaccaaaatacacaatttttcttatgtgtaggtaaagattcataatatagatacatatctgttttaagaaatgattttagagtataatagtatagaatatttcattatataatcttataacactgattaaaaagtaaagaaacaataaatttatatagaatgtggcctttaaaatgttaatatttcaggtggcttatggcaaatgtcattttgataaagctaggggtgtcaaaataggtaacccaacccaactcaactcataatcaaatgagtttagaattaaatgagttatgggttgacccaactcatttaacaaaatgagttgggtcaacccataactcatttaatttgatgggttgagttgttaaatggtttaactcatttaagtaataatttaattcattattattataaaacaataataaataattatcattattaataattattaatttactatcatcaaacttagaatatttacggattccactttttacgagtttacgttttcggcgggaaaattacgggtttacttttttagcagaaaaatcacgagtttacgtttttggcgggaaaattacgggtttaagtttttggcgggaaaattacgggtttacgtttttgacgggaaaatcaagggtttacgtttttggcgggaaaatcacgggtttatgtttttggtgagaaaatcaagggtttacgtttttggcgggaaagtacgggtttacgtttttagcgggaaaatcatgggtttacgtttttggcgggaaaatcacgggttttcgtttttgacgggaaaatcacgggtttttcgtttttggcgggaaaatcacgggttttcgtttttggcgggaaaatcacgggttttcgtttttggcggaaaaatcaccggtttatgtttttttggaaaaattacgagtttactttttctcaatttcattgcttgtatatttaacaaatttggaaaaataatgattttattaaattggtttagatgtgttggttaaaattaaattgacattggtttagagattttagttggtttaattcaattttacaaaatttgatggttaattgggtaaaccattgaaaccattaaccattacaacccaactcattttactcatcaaaccaattgactcaataactcatttaacccatcaactcatttgagtcaaaattttcaattcatcagggttcatgggttaagttgagttgagttgagttgagttgacccatgaattttgacccattttgacacccctagataaagctataggcacggctctgctcctaaaccttggaccatgtccaataaagatagatctcatggagaaatacatgctgtcataaccatgatttttgaaacattcttgaacgtttgttccattttgtttaaccattagagattagaccttctctaaccattcctatgattggtggaatcctggaattctcggaaaaatgcagctttggtaacttctccttcaagtaaacctccaaaaattttatgttgtccacatctgaaagcttatttcatctccgccacgagttccatgttcttctcagctaaattatcgacatttttccgccaatccaggttcattgctaacactgggctataaagatggacagatggaggttttgaatatatggggcagctgccccatactggtttataaattttgttgtgtatttttttactccaaaaaatgttttagtatagttggttgtaggtctgggcgttcggttcttcggttacattcagtttttctttttttttggttttttggttccagcccattagggtcaataagagaaccgaaaactttatgtttgatttggttcggttacttgtcagttcagatacttagaaagaaaactgataaataaccaaactccaatggatatgaatttggtttggtttggttccggttagtttactcaaaatacccaaaaaaattagagtactcgaaaaaaaaaactaaatatccaaatagctgaaactgttttgacaaaattataatggcctaatatcctagtagaggattgaccaaacattttggttccattcaagcaaccatggatatttggttcggttcgataatacccgatatctatggatagtgtgactgagatccatttaggtacttactaatatccataactaaacaaggatccttcaattcggttcggttcagtttgattttttggttccggtttttatggcagatttagttggttgaatcctttaaagtaactccccatcttccatttcaagttggaatccttctaatgttacactttttcttttcttgttttctttcttttagttttccaaataagattcttctaattgattgttttttttggattggtcttccttattaaaatgtcaatttcaagttttgttttcatcattttgtctttaactaatcaaaagattatattatatttaaacaatgtataaatttttcgtatttgagataaaatttatatataaaaagatttgttccccaatgtgtttatggatcctaagatattaaacttaaatgcgctaaaatattttaaattaaaataatattggataaatacaatgcaataacacaacttttaagtttataaatatgcttaaaatttaaattcaaatatgttattgatttatattatacaaataaatttgcagcttatagtttggagtttcaattcaattttataatatataaaaaaattcgatggtgttaaatgcatacatgtttatattattatttttaattaaagaaatacaatgaatttaatataaagttttttatcaaaaattcgagagattgaattttggtatgtttagttaataagaataagtagtaacgtatatggaattaatagtgtttggaaaaatgaatagtaaaattaaataaataattaatgaaaagacaagaataatggtagatttaatttaccacataaacaaaaaaaactcttttttactttacaaaaaataatagtataatattattaatctattgtatttcttgttgattattgagaaaactacaacaattatcatatttttaatttctttcaaaatttaccacatttctaatttcttttcagtttctaccacatttattatttaaattaccaatttaccctctctatttatatttcttatttatctctcctctttatttcttttttctctctatttattttctatttctatttatctctatttcctcgaaacatgtgtgctttaaccaataaacattatatctcctgagactaaacaaataactttcgtttttatctcgagatcttgttctcgattggaaattctctgttgcgtctagattttgtctctgatttcatcatctttcaaaattatcatgaatcccagatcttgtccaccaattgtcctcatttaagggtttcgaattttatttagatttttcaccatctattttggtctacagattagttgagcattattgtcttctccgacccgatttattgatttttttctttctattgcaaaataaccaaaaaatcaagttatatcatattatcttgtctaccattcgatctgaatttgttcctgatctgattttattactcattcgatatgaacttgtctctgatataacatattatttaaataaaattatatgcaattataaacgtgtaggtgaagacaataatgcttaactaatctgtgaaccaaaatagattgtgaaaaatctaaataagaatcaaaatctttaaatgaaaacaattggtagacaagatgtggaattcataataatagagaaaaatgatgaaatcgaaaacaagacataaacgtaacaaagaatttctaatcgaaaacaggatctggagacaaaaagaaaagtgtatcaccaattgtcctttatctccaaatttgtacgtaacaattaaatgtgatagattttaaaatttattgttaattgttatagactttaaaaccatttttcgaaaagtaatagattttaaaagattcccttaattattagcaattacattaaaaacaattctgtcagaggtcttatctcgagtttcccctctcccaccaaagaaaaggatcttatctcgaactattaattacaatagcagcttgatatgtctaccacgtgttttggaatcctttataggatctcgaagcttattgtaatacgtagggataaacgattaagatttaaagccgactcaaaattaaggacttttataaagtataaacaataaggggactattaattacaatagcaggttgatatgtctatcacgtgtcttggaatcctctataagacctcgaggcttattttaatacgtagggataaacgattaagatttaaggccgactcgagattaaagagtttatagtataaacaataagggaactatcgaaattttgaaaatgccggtgtgctaggagcgtttggtttagtgtttacgtcattaaattgataaatatactgtcatatgagactttaatgtaataaaataaattcattaaaactaggtcatggacatggtgaataacctagcatcaacgtataaggaattttatatttagtaagagaagttaattttggggttaacatgtgagttgtgaccaactaaaaaagctatgtgagagaagaacattgtatacaataaaataaatctgatatgtgaatctgtgatatacacgatatgcgttttttgttttgtcggaagagataattgtataccataacgggatagtattggatatttgatatttaaattttaatattactatgattctatgaaatattttttgtgaaatggtaggaactaaacttaagaaatgaaaagtttttctttgttagtatagatgtgtccatcaaatacagtctctttgtccgagtagcatatacaaacatacctagttctgacaaactataattttgatttcctgcttccaatatacaatttttttagttgatgggaaagaaataggagataataatttttcttctggatgaaatgttaaatttattatccaaataaggaaaaaggattttatgtaaaaaaggagcaaagaccaaaatgtataaattaaaaacacctttaacttggagtagtaatctcaactatggagagtcatgatatctaagtgacactacacgtacgttggcagatcgtttttcgcaatcaatcgagtcaagtgactatccgttcgttgggttgatatatgtcttcgtttgtttctctccttccacacaaaatatagaaaccacaggccatgtatgaatggatccattataacacaacagagattataaatatagacaaaaatatagatgtattcaaaacacttactcaaattataaggtaaatatggatggtaaaacgcaaacgttttcacttattcgggaaattgaagaggttcgtaaagacttggaatcatagaccctaaatggtgattagatcaaggaacaaagaggtgatttggcctcctactatccctgtataggttaatccatcgccatgcttgtagttggtatcgataacccgtccaacgttaaaagctatacgcacaagtttcaaaggtactgtcgtcttaaaatactcttcattcactagcttggaagtatgtttaatccttctatgaaactctagaaacgcttcttcttcggtaactttatattgtttcatatagcagttgattcctgtcgcaatctctcctctagccatttcatcctaattatcatttcataccagattttgtaagttatataaacgaaagaataggtatatgtgattcgtgtgcattccaaattgtaccttgtaggtggcaacatcatctctgagacgtgattttagatctatagtttgaatgaatttcggtcttgatcttatccagtcaaaagcttcttttcctgcttcccccataccaatgaaggcgaacgcaaccgtgacatctactcccccagtcactattccaacctccatgtattcgtcatagtttggtatgtatcccgtgcgtgcccactttgatattgtaaggtccgctctgaatagtcttttccactgtttaagcatccatatcaattcatcacattatatacgtaccaagaagagttccaccacttcaagtaaattagaagccctatatactttatttagtttttcaaaaaaaataattacgtaatactctttttgtttcattatatatgatgttttggctaaaagcacaaaatttaaaaaactaattaatctttgtgttattttttttttacatctaattaaaagataatttgataaatataaaaatttacatagatataatatagaaagaaaaaagctaatttgggaacgacaagaaagaatttttaagcttttctttatctttaattttttgttgtgcaaatgttaaagaagattatttggtacgaaaaatcatatcacatatgtaaataacattttttaagatgattattttaagattaatttaaatgttgttgacaaaaaaacaaaaacctaatttgtaaaacatttgttcaaacatatctttatatttgaggagatacatacctcgtctattccatattccacactgtacaatcttccttctgatctcacttctcctttgaaatcttccataaggtctatcaatgacctcaagaggaccttcatatgatctggcatgtctatggcatcagtttcccacctgttgtaatttgaattaaaacccatgtcaaatgatcctattatcttccacggttccaccatgatcattattcttaaaaatatatataaattgtttattcacaatacatatatggaactataaactatccatgggatgggcattaaaaataaaaatgttacaaggacatcgacttaacaacaaacgaacaaaaaaaacatttttccaagtatatgcatcaaaatcagctttatcggtagggctggacaccgaacatgtacttttgaatttattagaccaactatttgagtgtatcctaatggaatttaattaaacaaacaaatacgtacgtacaactaaaatagttttcctaacaacttgctattatatcagactttttcttatcacttttagggaaaaatgttatgggaagaaaaatattgggataagaccagaagaagatatcaaaacgtacctttccatattttcagtgaaagcaatagcttctggaagagtacaataggcatcatataggtcatctataatggtccacaacaccaaggacttgctcagtattattctagcaactgaatattgtggctccatatacactgccattgcccagtagaggcactccacggctctaactctgtagtaattagggatctttgattccaagtcaagctctttccaccatctgcacttacgaaaatagagaataataacatgaaaatattttttttattctataaataaagtaggataaaacgtgtacttcacgatggtttgaagctcttgaatatgtgcaactgcatgaacttagaatgatgacatgaaaacatttttttattctataaatagagtataagataaaggtttacttcacgatagtttgaagctcttgaacataatgcaactgcatgaacttgaaattgatcttggcaaattttagcaaggtctcgtcgtgatgtgtctcttgttcatagaactgtatatattctcttgacatcaccacctctgcgttttcttgctgagaaagatacaacacgttttttatgtgcccagataaatgttcctcattgctgcctccaacaaaatagttccaagtgtttccgcgtgaagcccattgcttcgtcaaggatttcttctgtattcgtcccaaaatatgaagcttcgtagaagcttagcatacctcttacatcatcgagaaggcatttcttaaaatccccattttcttctttaaacctattgaacacatctatgtatagatatatctttgcattagtatatatgaatttcctcatttataaatggtttgtgcactcttttgatacatgtctaacaaaataaggtttctcaccggaagataacttgtgacggtacagcctaaaaaccctgaagatgacagaaatgctatacatatcctcttctcccaggttcatatcctccacgttctcgaaatcaactttcaggaattcttcgatctgtttctcgaaatggtaagcgactccaagactgactagcagatggatcaagtgaatcctctcctttacgtccatacaaaccagcttttcactcactttagccttaagtgcctcgatatctctcccaaggctatcaatttcctttatagattaaaatatataaacttttttagcacatcaaatatgtagctattgaaagatatatattcttaaagaggtcatatctttgcataccgactggttggcggaaatggaaaggaagcgatcatccaatagggaaggtggaaactgaaataacggacgatttgcggcttcatgatcactgttaatgctcgtcctagctctagttacgaccaactttttggggaacggattcttagaaaacctaagacagcgaactgggatgaacgagctcaagctttttggcccacaatgaacaagagtttgagagagcgacccatttttagttattgcttccatttttcttctcgaactttggattggagaagcaaactaaacttaaggctctttatagagttatttacaagtttaactgacatagggttcgatcgtaacatcgttcaaacaaggtggttaaaagttttttagcggttgtgcaaaattaaaggcagttaaagagaagatggtaaaagatagcagacgagaaatgagtggttaaataatagttatgataggtaacaagcgactaaatggtaaaaacattgttaagttggattggtaacatcatttaaaaagtttctgcggttttaagatgaaggtcaaagaaaagacggttagaaatatggaacagaaatgacgattgagttaaaacgagcgtatgtgggtatgtggacaggtttaaatcaacattaatataaaaataaattgacagctaaatactaatactgactggctaaatcctcattttattatttttaatagtattaatattagacatatcaaatcaacctaatttatataaaattatataaaacaaaaattgtcatatgatataccattacttaataaaaattatataatatatttatgttttataaaatggtacacttaacaaacttttatatacaatacataattattaaattttaaaatcactacttttaataaataaatagtcacgctgtaccggtggttaaaatttaatactatttatgattagtaacaagtggtggagcaaaatcattattataattgtaatactaaatacattaaatttaaagataaacttttaaatttattttcatttttaaactttttccaaaagtaataatatataaaattattgttaagaaaattaaaatattaaataattacacagatttcaactgcccgtttttataaacaagatggttctaagctcacttatcttttgatggttcataaccccacttttgatcacctatttcagcaactcgttttattcctacatttcaacggcttatctgattggtaatcaaacgaacggttaaatttccgaccgatcttaaacatgctaccaagtaaaattactgtcaatagcaaaatataatagtaaattactgtcaagatagcaaattaaaatattatagtattattaatctcttgtttttctcgttaatttttgttttcttctttttttgaataactaaaatattctagaactaaaactcgaacatttctttatatcaggaaacaaaacattttatataatcattttccaatgccagtattttttattatttaattatataaatctacgcaattatataatttatctttctgtcgccagatcttatctcgaactttcccctctcccactccaaaaaaagttcttatctcgattaagaccgattaaagtaacatatctcaagaaataatgactcaaatcaatggtgcaaattcgtggatatgtctaccacgtgtttgggaatccatatgagaatctggaggcttttttattaaacgtcaattttatttcattattttgtctttaaataatcaaaagattatatattaatactccctcagtttcacaatataatttgttttggactaacttttttattttacaatattagttgttttcaagtttctatacaaattatataattttaatattttatgattatttctataatgcagtctcttttataattggttaaactttttaaaagtaaatattcttaacttgtgtgtttttagctaaaacaacttatattgtaaaacaaaaggagtacttaaataatggatgagaaaataatcattttattcctcaattatttgcaattaatacaattgtttcctaactatcgtctgcacaaatttaatcctcgagttatcgttaacttaacaaatttgtttctaaatttactcaacgtttatttgtaaatagaaaaatattaaattacccgattaaaacctcataaaatatgtatatataaaaaaaatattccccacataaaatatgtttttggattctgcagtattataaataaattttgtaaataagcttaaataatttaaactaaaaaatgttatatatgacaataacataactttttaacttataaataaatttaaaaattaaatttcaaatactttattgatttatattacacaaataaaattatatttacatcattcataaatttaaatttatagatatgcaatttcaattcattttttgtaatatacaaaataatttgatggtgttaagatgtatatatattatttatttacgccatttttaaatactatatacacacatgattaaatcaataatttaatcaacaatagtggccaatgatcggtagagacggaggactcggaggcaaattgaagccatcctttggtttcttgaagaagagagagtaacagaggactgaaagtaggcagaggaggattaagatgaacaaattttgaaagtcaaagttcattattgcttccactgttgctcaaagtgaaaaagcagatgaatatatcaacaatccatgaacgtggaatagtagacagatagaatcttttcttttgaataatatagatagtaatcaattcagaccatttttaaatactcctatatacacacatgattaaatcattaatttaatcacttagacgatctgatctaccaaactttttgatgggtaattgcaactggacgaatcattgatactctttgaccaacttgcacataactttgcataacaaatacagatttacggtttagttttatttttgtaacccctaattaatatttaaatttaatgagattttagtgatatcgtatacagataaaaggatccatttttagtattatgcttagaattgtcaaactacttaagacagtcatgtgtgataaactcaagtatttgaggtagatagatgatatcaaactacaatcatttatttcgacaaaaagaagatatatagatgatatgacggttgtgcggggatcgaagatgtaacggttgtaaagcaactccgaaacagaagcaaaagcaaggggatataagacatgacggttatatgtctatttggtttgtatcaaaatcagagtcgtttgctcggtaaaaatcaaattcaagttggcataaccaattgggaatttccgaataatacaacaacagaaatcttatacttataacaaaagacaagaggcagcttgtggtggtgtagaagaagatgttgttctggagcaattctagtttatgtctctgcaaagccggccctgacaatataaaggacacaaagcccaattggtcattaaaactctgtttacaaaacgacaataaatagaaaaaaatacttgaattgtccccttaggttacatacttacatggaaccagaagcgaaacgtttggaaactcttctttttgtttggtaaaagtacgcttgcatgctaagacgtccaaatcttttttgtataatttaccttaaaactacattcaaaattgtcaaactttttatatgatgagaatataatgagaatcattgacaaaaaaaactggaattcaactggtcttgagaaatcaatgaacaaatattacaaagtttttgacaagaattttaaaatcaatgatctaataacacctataattttgtttgaatttcgaaattatttaaaattcgctgaccaataaactcttctaaagactactcaactaaagtgtaagtgtcactcactgtatcacaaatgttagatggtattggttggtatgcgttaaatgtgtcacaagacactgattcgctggctctctaacaaatgtcacaaatgtaaaaaagaatattactttgaagaagataacttggcttcgttaatctctcaattcaacttcagaatatgttacttccggatgtgattgacgccctgattttgacaatgatcagaattatttcacaagatagtgattaaaagccgcaattacgaaaaagataactgatgagttttacgttactaaccaagcctgtctgcacctaatagcttcttctcgaactttccgtttcggatc

SEQ ID NO: 854 - DNA, 59372 bp, Arabidopsis thaliana
atcgagtgacttttctattgcttgtaaaaccttgaaataaattccaaagtcattagacacatttcttactctacactaaaaacatgtgggttagatcttttaactaacctctcttctgaaaggataaatccttctatgcggcaattccaacaacgcaacaagacactgaattgatgtttctctaacaacctgcataccatttaacgtggacatattatcattagaagattcaagaatcaattccgttggaaaaaacgaagatgctatagaaaagaaaatgatttgtcaccattagatgcggatatgatgtaagcttgatcaggcattcgatgattatatgtgcattatcactggcagattgttgtcctgcaaacagatcaaatggttaattctcggcaaaattgaatataaaatgtctttttgaggcttatcaactattgcattaactcaaccatatacacaatccctattatcagtgggcgcaaacgaatttgaatcatataagaattgtttgatcttcaacaaatgaagcaagattttatataatgcaataagcttttgtatcccagcatctaacttttcttacccttagtatcagtaagcgttccagataaaaccagtaatagactgaaaagagtttctttctccacagagtccaagcttaagacagacaagccttccagtatcaacggttgtagctgcacagaccaatgtctaataagaaactgtttaaaaaggtacaaaagacaaagtctaaattaaggctcacctttttggtattgtccaatatgactgttaccggaacattggatataacatgagcgagagctacatgcaacattgttctgaaaaaaaatgaagaaaccagtcagctgagaatcaaatttgttgtttgtcacaataaactgtaacttgcctatttatgatatgtacttgaaacttggagcaacaacgaagcctaaactagtatgagtttatgtggtagctacatctaaccaaaattaaactaacaatcttcaagaggtcttcttattcttccagaaaggaacactaaaacggttcttgtgggtgcaattgcattctagggaaatgacatagaaggacttaatgatgaagacagagtacacacaagagcaccaaagatgctaatgaccaaacatttttctatgaaagagtagaactataaaagagtaacaataaatatacttaaagatatatttacctcgatagtgaagtctgggaattcataatcaaagactccaaaatgggaactatcgtagagaaacaccgctgtttatagagtggtcgtataactgcatggaattttctgttcagacacacttccgaatcagacattattatagagaatgcatctgctgcatgtttcatggcagaaggatgcagcgcatgcccagaacagttattggattttaaacactctactagcaccagagctatttcattaactctttcattgccccgcatgagtaaacctttcccaatccatgctagtcctgtgattgcacgggtttgaaggtccagagaaccacagtaacctaaacatatctttgacatggttgtctcacttccaactataattttagcagatccattagaagaaatcttttttcccgatgcaaaatctgcgtgaaatattatagcacatgcttcttccaaggaacaatcccttgaggtatttgttccaccagaacccgagcccaatttgttaaccattgaacccaaagcttgagctgctgggatataacccttaagaagtgttaccaaaagcagatgtataagtgatttcgcatctggaatggatgctgagggggacgcagctatgataactgatgcaaatagtgaaagtatcaattcatccctagaggacaagtcacgctgtagaccctctaatgcaacaaaggtcaaaggaatagactccatagctggaagcgtacaagatgataccacactataagctttttggattatactgttctgtgaatctaccaaagcaattcctacaacttgcctcatcgttgtcatcgctgcctcaacaaactcctgttatagaagagcaaataaattcatgacatcaaaaataaataaaccaaatcgagttcgaagagaaacaaagagtctaaagttcatctgagcacttaccctaccattaaaatcacaactgaaaactccacaaaattcaatttgtttccacatactgatagcgaaatgcaccaagagttgctcgagaccatctatctcagccacactaattgagatcagaacaaaattccacgagtcaaaaggacatgcaaaagaggaacgaagaatattgttcttggcagagagaaggcatagagaaaaagaatctccaatcagataaaaaacagtggagccatacacatggatgcaccacaaatgtttttaagttttcatctttggaacgataaaatttgtaaatgaaggaaaaagacacaaagaggtctctattttgtaaaggaataatagaaaagacactcgtgctattgcattgcttgttggtttccatgtgcttattataactctctgttaggtgaatgtgccatctatagttgttttctatgtctattataaaatcttgacggattctaccgagttacaaggggttgactaaggggaataacacaatgaacctgaacagagagaacctaaatacgctaccaaagtatggcagttaacaagttgtatcatccagaatagttggctgtttacgaacaactaaaagtctagatactcacgctggcaaagctagtttatctatgagataaaataaattcaagaaaagtttgggtaccgtggaagcaatttgttggtcaaacacttcaggagctgagagcaattgtcaattgactcgaagtttccattgacctgacaagtggtttccaaatagaagttagatacaaggaagctctcgatctgttgcttgttggagatagaaactgttagatcaaatataagtgaaaactttatggtctagtcacgggggtaacacatacatagaaatcagacaaactggaacaaaaagcttcttccaatccttgaaccattttctccacatactttggtccagtggagcaaacttctgaagttgcttctaatatcatctgatatggaagaccacaatgactagaacaggccaatgagaccaaattgtcgacaactatactcatgtagctcatagccttgtcactctcatgataccgatcaataaatgagccgatacagaccagtgccttcaatgccaattcccacaccactgttttgccactcttggctgtaatgattgatgttaatgtcaccaaaatattctcgaattcggttctcgatacaggagaagagccgccccgaaacatacccatagtcagcaaacccttaactgtattcattaacaaaataaatcatttagataataggaataagaacatggtaacctagaaaaaattgtagaccgagttcagtattaagaaaagacggcaagaaccacaagatggtgatatatctattaagtaaccacaagcattcacctccaagatatacatccacaacagaatcatcattcgagcggcatactgcagaagtgaacacctggatcaatggaactgagaagcttttcaccatagagcaccctgagtttgcacatccagatgttggagaacattcctcgaaacccagaataagatcttttgatgctgcaagaagttcaatgcatagatgaagacctccatggtagagtctggtagagactgtagagtttccgttttgaacaacatcgccagtagaagttttctctacaatccctagagtattcataaggcggaaaaatatggcttcaaagattatattgcatgactgaaccgaagctttggcagaaacagacagtatctgactgataacaagaacctccagtttgcttgggtcaggcatttctttatactgagggtatctatagatggtatcaaagactgtgtttatgcgtgtatcatcaactacaaaacctaaaaacgagatatcttgcttaacaagcctctgaagaagactaacagcatctctgtggatctcattcatttcaaaccctggactagtgagggattctatagcaaatgacaaatgtgtcccagtagaggaataaaatgtatctttcaaagcagaccaaagagctccatagtgcttcttcattctgtctactccatatttcaaagcgcaatctttcagacatttcaaagaatcaacctatacaggtttgagtggaacaaaaataactacacttgtccaacatccggagtggcatataatctagatgtattaacagaaaactacatgttaaacgcacctttgcgactggtagagaagaagaaagcttttcaagaagcaacggaatagcatacggttcaaagaaaggtgtcgaagagatcgccagctgcaaattgaataaagtacatcagtgaataaatttaacctaatgttatacatttatatatatataaacaggatttatcataattctcccatttttaacctaataccatttcagccatgcttgaaactgcaagccatacttagatgtagaaaacaaaaattagtatttccatcttcaaggcatctgtgccctcagaagcagagaagcatataaattaccagagacaggacaagtcactgtactttgcctaacagctttcaaagaatggacatgatatgcgaaatagcttttcagtctaatcttcataccattttctaagggtctaaaacattttatttttaaggaactccaaaccagaatgatcaactgatatttaaccttgagaaactaagccattgagccacaataagccagcaagaactttatgcaaatcatgaattatgacacaatactcaccagtagtccccttgagagatcctctcttctaatattagcttcgtcatcttttgtctaattaacccaaaaaaagagcacactaaacagtttagtgaaagaaagagaaacccatctatatagcacatcataaaaaggataggctttaaactcacatgcgtaaaatgaagtgggaagtagcaaccaataacttcaaaaagatcagatgcatcagaagcgagtggaccagaaggactggggaacaaaggagccaaaagctctactagatgaaaaactatcattaagcattgaggatctttttctccgtcgatggcttcacacatagcataaacaagtagatcaccctaggaaatggccgtttagtcaataggattacaagaaagtgaggaaaggtcccgagtagtattacaaatttggatacatataaataattatttgtcttcctacaaagctgactcaaatagatttccaagaaaacattcctcacacagtagatcgaatgtttaattctgaactaagtagagagcattagcataccatagtcaaaatagcttcagaatgttgttgtaaaaggcactccagaagttcaaaagcgagctgcaaagtcatttagcagaagataatgaaaaaaccatccagcgtagaacacaatcattcagattagataacagaatactacaaataaccgcttcatactttgcgctcatgcagtgctaaagcttgcacttgcacattctgtatcattgacttcgccatagcttgtacatcgatatcagtaaccacaccagctacatctttcctcttcagtagagccaaacaaccaacaagcgccccgcacatcgctctccaatctgcctgattcaagtacaacaatcgtttcacttctatgttaaaacaattgaatagacacattggaatcgagtataatcaaacttaagaagtatcaaattaccagcttttcggaaaagaatccaacgagcgtatgaactattgtatcgttcaacggctttgctttcaaacaatcgagaatctccgcaagcaggagaatacctatagttatgaacacaccaatgtccaattgcgttcaaattgataagctcattaaactaagctagtgaatcgaaatacctcgtgctcgaacgaggttatcggttgttgtcaaatacatctccatctctctaacctaaacattagcaatacagaaataagccaacaacacaaataaagcctacggaagaatattcagaagttgtcaagtgagtggaaattgttaccaattgggtaatagataaagaatcattctccaaagaagaagcaattgctttaagactatcatcctgaaaacaaaattaaacttggtgaatcaatgaaactgttgttctaagtctcaaaattgatcaaaaggtacctgttgagaagaggaacgattagtgtcaacaaaagtttcgagatgttgaacgagctgattcggttctaccatcatcgctacaaaaagggtttttagggtttttgatttctgaggagagagagcttcgcgagctccgacgaaaagaggaagagaggacaaaaaaagagccgccaaaggaagtgaaggaggaggaaaacgaagtggtatttttgtaatttagatgaaaaattatcgatataacgtggcggatgtacattggtcgctgagtgtaaatataggctcgctttgtttttgtttttacttttgggcttctgattatttgggctgttaggcaatttccatgttgttgggcctgatcccaagaaattagaaatagtacttcgctggttttggtatgaattgcaggaactttgtgctgatgaatagcataaaccaagttttaagaattaagagtgattttttttttgtcaaaaaaaaaaagaataaagagtgatcaattttttttaagggaattaaccgaatttagtcgtttacgtgttttatttatttacgtattgattctttatgtcctttagagttcaaatttaaagctaaccgtttagggcgttttctagaatttgtaatgtttcatattgtttttgttggcatttctttatctatgtggtttaatagagtacactttaaataacttaaagatagcatagaatactaaaaatattgctgtcatttttaccaaaaaatctatgttagccttttttttttttgtcgacaaatctatgttagtctagtaaatccatttaaatctatgttacatgtgtgtcaatataagtaattctctaataatttcctactttagcctccttttccctgttttctatgagcgaattcttcctaagtaagcaatacagtacttcgatttcctctcttgattttctcgtaatgtacgatggttgcaaaaatatatatttatattcgtagaaatactcaaatcactattaattaacgtatattacataactcgaagaccagatcgtaacatcataaataagcgtcaccaaaatgtctggttagaactatttagagtcttgttacagttaatgcatgaaaaagaaagaaagtgttggagtaaaaaacaaaaatgttgttgaaaaaagcgaagaaaaaatgttataatacaagatttttcaactcttctcaacactcgaggaacgtcgtcttcaacttcttgccttgaattttgagatcttctttttgagctcaacactcgtgcgcatctgactttgacccaacatctactacgcatatatgtgtgtgtgcctgcatgcaagtagccatattatagtttaatgtttgataaaaacgaaaaccaaaagaaactttctttttctcaaatcttccttagcgtcctcttgtttcgtggatcctagaaccctttttcttcctcttcaatccccaaaacacgcaactttcttcttcaaaaatataatagtgaagaagaataaatgaacgaccaaatgtctccagtttcatcataccatattggttttgatatactttatctacttagttttcacaatttatatactcaataatggaaactttcagcctcaaggattgttcgtccgtcgcctccagcccgatttcttctccaaatatcagtacccttttgaaaatcaaagttctttcttggtatgaatctcaagactatcttcgtgatgtcatataacaaatctgaattattcatgttgtagacttatgtaatgtaactgtgtgtgtgtgtgtcacaggagtaaagagaccggtctacccgcgtcagtacatgttcgagtttgcaacaagagttttaaccttcacaaggtaataatgataatcaaatctctctctcaagaaattctgttttcaaccaatacatgtagcttagtggtttttgttaatataatgccttactttttttgtttatcttttgtagagtctcttgtgtgcaaagagcggatattttaaggaaagagaggatcagctatcggagatcgagataccacaagagtttcctggtggagcagagacctttgagaagattatgcttttcatttatggctgtccaactttaatacatcctttcaacatcgctggactacgatgtgcagctcaatttcttgaaatgacagagcaacattcgacgggtaacctctgcgagagatttgacctttatctaaaccaagttgtcttgcaaaactgggatgacacgttagttgttctgaagaaatgtcaggatctagtgccttggtctgaagatctactcatcgtgagccggtgcattgagtctctggctttcacggcttgtatggagattctcgatcccgaaagacgaagagaaaagccagtcatcatgcttgaaggtatggtgaatcaaccatgggaatatacaaacatagagagaataataaaccaagatacttggatcaaagacctcacggatcttccattcgaattcttcaaaaagattattgggtcgcttagaagacaaggtatgaaagaaagatatgtaagtccattggtcgccctttacgccagtaaatctgtaatacctgaaggtcaaactaatactgatattctgcaaagagctctagatctgcttcttacaagagacaaggcatataggtttgttccagttgggttttattttgcgtgtcttgcacacaatttgaagcatgacactgtgttaaagctgcaagatcagattgtatctcttcttcacactgcccaacccgaaaactttatatacccgaaagccgggaacaggcaagttgctttcagtcaggagttgcttacaatggaaagcctgttttcagtatatgtatcaacagaatcggaacgccatcttacttcctcctcaagcaacgtgagagttggaaaactgtgggatatttttctctctcgtttaccgtatgatcaagagatgaaaactacaaggttcattgagctgattgagacagtcccaatgtcattcagagagagtcatgaccaactttaccttgcagtaaacgcatttcttcaggtatgcgccttcactttttccttcttccattatgtataaattaaacctaatgcctgtgtggctctgctttaggtacatacaaatatatctcaagaagaaaaaggatcaatctgcagttacctaaactgccaaaagctatcacaagaagcgtccctcgaactcgttaaaaacgagaaaatgccattacgtttggttgtccaagctctctttatccaacagctgaacacacaccaagcttttaaagactgttcggactcattcagattcacaaactctgcagacttctctggtagtgttgtcccaagctcaagacccttaacttcccaacaaagcccttgcactgatgatgaaacggggccaagaaacagaccgttatgcttcttgatgcagaaagatgcaacattggatgagtttgagtcaacgagcttcagaatccataacctcgaagagcaactagtttctttaaagaagagccttcactcccacgacaacctaaagaagccaaattgccttggaaaaagatcagcgagtagaaacaaaaacacctttggccaagtcacaacggcttgtattggctctgtaagctttacttcacagagaaaatatgcaaataggctactccagattctacgtagagttaacttgtttggaagtagaaaaactaatagatcgaaagcaggtgagagtgaaagatgaacatttatcaaatgtaagtataaatttacaataataatcgctgaatacaaaatttatcaaaaatttacttaaaaatagagttttgattgggtatggattaaaaaacatcgaccaggatttgtaatatgtagttgtgtttttttttttttaataaccttgtagcggtcgaatagcctactcaccaggtttctaatataatggacctaaaggatgccaccatttcgccaatgatttcgttacaaatatctttgttcaactatattgaatgcagtttggaattagtcacaagttattaaattagttagatgtttttttttttcaagaatggttcatttcttacaatataccaaaagctcaaaaaaataggtcatttcacaaagatatcaattgaagcatacagcatacactaagggtgtacatttagattgtgtattgagtttataatatatacacattctactttggtggctttgtcaccgggctgctacacgcttttggaatctgagttcccacaagctttggtgatacgttagagcattggaaagtcgctggaccatctgctccggtatactggatgttcacgtcaccaacctcaacgttctgacatggatatcccttgctacacaaaagcttcactgcgtctttgtttcctgatgttcctctgatcttcttgaagctaatgttggccaacttgatcgttgatggtttctacgaaaaaaaaaaaaaacagaacatcaaacttcttggaatcataaccaattgtagtgctcatgcactttccatatatatactacaagaaaacatgcaaatttatcacaaagaaaaatgatgaccactataatgcatgttttgtacgtacctgcttgttgcattggttccatgggcagtactcttggtcgatgaggatggggttgctgacgttcttgaggaggatgttctcgaaatggatatcggaggcggttgtggtacaagcagcagaaggccatgtcttgatccttagaccattgtcagtctcttggagagtgcagttgatgatcttgatgccactaacgttttcctcgtggctgtaccttccaagacttccaatactgattccatgtcccggaccgcatgtaactctttcgacaagaaggttcttcatcccatctccaacagagacacagtcatctcctgtggagataaatgaattgatgatcttgattccgtcacttcttccaacgtggataccatcggtgttgggactctctgcaggggcaatgatcttgacgtcttcgaatgtcacgttctttgctccaatgacgttaatgtggaagtgctttgcatctaaggaggtaatgcctctaattttcgcgtcggtgacgaaatcaaacctaatgctctgttcaagaatgccaccaaaacatcaacaaaaacagttaatcgcggagttatcttataaaatatgagagggtttcttacgatggggagcttcttgcagttgaaagtcttgtggcagttgttgaccctccaagctgcgtttccttcaccgtcgaaaacaccacctccgttcaacttaaacccattaatgttgcggaaagcgacccatttctcctttccattagcgttaccgtcagctttcacggtacctagaagagcaatccttataggagctttgcatggacccatcatcacgatctccccaagcttgtattcaccttttgggatcataacggtgctctttgtcgggaattggcatgcctcattgaatgctttcaacaatgcctacatcgtaaagatattaaaaattacttggagaacaagaagaaaatgtatagataaacgagattgttgttaggttttagaactgacgttagtgatatcagaacctggaggagaattaatattgaagatctttgcattagctgataaacctaacaaacaaaaaacaaagaatgctgatacaccaaaatgtacacgacccataattgggatttagtttagtcactagctagtgattacttttatttactttattttttttttgtaatacactagttatgactatctatttattttacagtattttttattttttatgttttgtttctatgttttgctaccattatatagtatctaggaggagagagatttgaaagttccactttcttctccaccattcacttttcagcttgtttaaacgatatttttggatttcatttttagaagaaaaaaaaaaaagactatttccagacgtaatgaggcctaaatatcgattgtgagatctgtggagtatatgtgtggtctgttgcaagctctttttctggttacgttaggagtcataactatataaaaataggttggagagattagaaggcaactgtaaattgagagagagttctatattggactgatggttgtttccattggcttggggtacacttaaaaaaattcgttagggatgttacaaacaaatagctcctaattgaaactcaatgtctagaggttaactactacaatgaaaaaaacatctaacgagtcttgagtagaatcttaaggatctaatcattttatataattttattaacatgataaattaaaatacgagaaaggtttatcaaaattagattaaattagaacaacataataatcttataatcatgattaaaagttttatagcatacatatatatactccaataaatctgatatgttgatgaaatacatttcaaaaagtaaatatttaattatatagaaatttatttatataagccttttatcaaaaaaaaagaaattaatattaatttttggaaataagtatcttaaatcatgtggttacaaaataaaatattgatatgcatggttggtgctcttatatcttcgtgacatactacatagtcttcgtactcgtctattctcctcattcaagcttactttttgtgaagaatcggaaaagttggggagatatccccgaggagacagttattgttctgatttactagacaagcgtaacaaaaaaacgtgcaacagtttgactaattgtaagtttggtttagaactgaggcgcaaaacacactgacaaaactttatactttgactcccaagtcccaagcaagccaaagcgtgagagaaattattgggattgattttccggcatcaatctacagccgcgtcaaacttaatgttatcatgagattacctaaatgttgttgcatacatagatcacgctatattctataagggtcaaaattaacatttatgagtttttcgtaggtggtagaagaccaaatgagatcaagaattagagatcgaccaatatggaatgatcgcaatgagtaaccaaaattacataattggtaaggattcaattataagaaaattaaaaaataaaaattttgaagattttttctttttctttttctttttgaattgaatgtaaaattatattcaacaaacaacatttttacaaaatttaaattatattctaagaatatattttatatttttgattatgttaatgaagaaattttaggtctagttcgtatgtatagttcaatacgtagtccttttcttataagaatttaatatttctcataagaaaccattgttgtgttcatatatgcttttctttagtcgcgtagggttattggtttcactccctctaatcaatatatgtcgaagattattattaatgatgatatataaaagattaaaagtaggtgtcaaattaaattcagacacactgcgaaagagacatttacacgtgttctctctcaaaattattgaagtcgctgcgatgtcacaaaagtatgaaaagactattttgtaattttattgaaactagattgatttcatatattacattattacaaagatccattcgtgtgaactacatacttaaattttgattgaggaaagagttgactttgacatttgagcaattgtgcacactcttggtctctagtagtaaacataagattcttcaaatgttttgaagattcaaatgagcgactaaattgcatacaagtagaaacacattaattgccatcacactagagaaatgtcactgtctcatttccaagcacacgaggcaaccaaatctcgatgcatccaaccaagatacaaagctccatctctttcttctagcctgtacttgtctgagtagttcctaagcagacttttaatggttgaattcaccaagggactcaacgggtaaggagtgaaacccgccatcccaaaccgtgacctccattttcctaggagctcgtgtcgctccacccgatcagctccttcacatgcgatgatgttcacgacatctcttgctagacaatgttgctccacattaatcctctgtttgtgatctcttggtagagtcacatcaattgactcaaacatcgcggcatagtagttcattgtctccatgaacctcgggaagaaagcggctgtgtttgtgtttgactcttgttccacaagagtcaccaccttgggagataagctcttcaccattctcaataaccggtcgctgcaaattatattcaacttagtcaaaggactaaacaaaagactcatcctacgtgtaaacaaattttaataataaaaactataccggtgattctcggtgctcacgctttcgtctggcatatgatgaagcacaaaggcaaagtttacggctagagcttccccaggtcgaaccccgaggtttttaggtttaacctcggaaactgacaccgataccgagttaaactcgaatggaacgttgaactgcttagcaagcttagcgagtctatttccaacaatgcttaggccacctccacgagcatacgctgaagtcatatcatcgatacccgttatccgaatccgcggaggcccaccaggcctagctgcaaaagcctggataagagtgacccattgactcccttgaccgatttggaaatcaataatgtgaactctgttttcttccttcattgcctcagcaatagcaccatttgctgacatgtatccaaacttgaagtaaggacaaacctcatagagaatgtgcatgtaagagagaagctctgtgctagccggttcaggacacctattaagtgctttgtatatagaactgcccgacgaagctagctgcgccactagaccttccaataagtaagctcccaaccgttgaataggctcaccagaaaccgaaaccatctgccgcaacttctccatcattgaatgagccatcataagatcattttccgacatagctttggcacatgaaacaagatcagctcttaaatcccgcctcgagatagcctctagagttgatctccaaccattaatctcttgactcgccgtggaatcaaatgagtccgtgcaatcgacaagtaagtccaacgagtccggccccatcatcaccgtttcgatttccctaatcttgtgtttgaagtcattcaactcatccgttacacaagagccacatgtatcatcatatgtagcagtagatagagcattataaggaggagagtcaggaaatggctcgagcgtacaaaaccgtttacgagagttgttaaccggtaagtacctaagcttctcaacagagttaggctcaaaataataagcctcaagctcttgtctaggctgcttgtacatttctagtcacttcaatgatctgcacaataactgcaagtataaaaaaatcagacttaaagactcatcttaaaccatcctagagaagctctaaattaccctgaattatttttgtaacttagatcaacataacctcaagttatattcgtctatacataacacaattctaatgcaaataaccacataattagacatatattaatcaaatctattgataaaaacagagattaagaatccaacaaagctacaaattcatacctttttaggttatctaagcaacataaccaccaaatcaaagaattttccaacaggatcaaaagaagaggatgatttaagacctaatattatcatgtcataagatataaaagaaaaacaaaagttataacttgaggaatcaaagatcaaacagaactgttctaagtgaacgaaaatccaaatttagtagtacccacctgactttttcggagatgagaaaccttaaagtagtgaatgttattgaagttccatgtgaaccagaggaagagagaagggaagagagaaagttgtcggagacaaggcacatgggaatggctcgaaagacaaaacagaagtctcactcttatcacagagaaaaaaaaaaaagaaacagaatcttaaaccggcgtgtgatttacgattataccactcaaacatgtcgctcccaccaccacatcatttgatgatttattgagcctccaattatattagatacatgtccccgattcattatttgtctcaatctagttttcaactttcactatctctaatcttagtttaagattaaagtattaaaaagatttttttttgttaatcggaaaattctaggtcaaaaccgaaacattcccgaaatgcatataaattcaggtttttttaatcactaaaatcgtctataaaattgtcaaattgtaagtgcaaattaattcctaaaacatacgagaataattgatttttttaccctaaacataatcaaaccagagccactggtttaccataacttaagtttatagtacagagtaatttaattagcttttttttgtcaccaaaaacaaaatttgcataaatattaacaacacaaagccaccaattatttgagtaaatgttcttttttgtcgtaaacttctaatcaaataattcagttttaatataatgcatttagaaaattatatataaatacacggaaaagaaaactaattggcttttagtagatataggaagacaagaaggaacaccaaagaaaatcaaagtcaaagaatgttgaccgggtagagaacgaagactacaatgctgaattcaaatgatgtgatttcatgccacacgactgtggaaattacgaagtaatttgattttgtagaaaataacgaaaacagaaacttatttcttatgataaaatgtcagtttttgttttctttctaattttactataccattttaatcatcgaacatacctattttatccatagttttggaaacatttggatcgtttcaaaggaaaaaaaagcaaaaaatctataaaacaaatggtcaaatttaaactgccatggattgtatcttgaacttcaaataacttgtgatagttcttatagtacaataataaatctgaagctaaaatacttttgataaccaaaagcttatgatatagtgattgagcctaggatccatccaaaagattgtgtcataagtcatactaatttgatacgttgagatgtacgagttttggttcagaattttacatataattaaaaaaaagttaataagaaaatccagattccaaactaaaaaggtgttaactaaatcttgcaaagcagttaaaataataaaaataaaatttactctcttttgtaagtgaatgttgtgtcactatgaccccacaacccaacccccctttgccgttcttttttgtatcattattctttttgacaaccctttccattataatatggtggagatatctcacgtttaacaaaaataaaaatgtagaggggtaatgtgttttaaaaacatatataaatgattctctaaatctgtctatttgtcgttttttaaaacttcatacaatgagtgacgtcccatgtaccatgtatgtaaatgtgtgtatgtatgtacatgggacttgtaaactatatatatagaaaatctaatgctaattcttttcccatttttctcatcatggctaaactctcatcatctccaactacagatcttctttggtgatagaaatgcagaatatttctgagatatcatcatcaacctttttttttaagtaatgcatatcttacaccatctccatcaatggtttttcattgagaaactgttcaatataaaaataaaatataatcaaaaagtatgagagagagtagaattagtctctcaagtgagaaactctgagaaacccataagaacacttgtatatcatctattggtcaaatattattttattgtaaaaatttaattatataactaatatatattaaaatactaatatttttcttttttgagaaaccaagaaggtatctcactgatggagatacccttagttgtcatcaatcatcatcatctatattgcatacagtgtaaaaagttcatattaaatctactaaaataaagggtaaaagtaagattcaatgagtgagccatttatgatttaagaaaaaataaaatgaaaggtgttccccgagttcaaaacccaagcgggaatgtgaaaacttttggtttctctgtgtcaatacaaagatgaatgatggttcctgacaccgagaatatgtgaacaaagctcagacaaaatatgaacaatcacttatagatagttattttaaaagtcaagataagtgtaataaaattaatttattgagaaaaaaatacatcaatttgttgcatggaataaactcgagcatggatcgtagaggaaaatgcatctgcaaaattatttagggacttgtatactttttacttgtctgactgattttgtttcaacatttacttcctggggagacagtttgtgctgaaatggatcaaaagagttacaatacaaaaatggttaagtaagccattggattatgatctcgacattatgtacatggagtgtagtagaaacaaggctgcatatatatgggttatcaagaacacacatattccggtaaaaacaaccgacaatggaaacattaatggtgatggtttttcctaacaatgttgcaattttatgatatatatatacaaagaagttgagaatgatccataattgcaagtcattctacttcattcacaagaatgaggcggtttgaaaaatcttcgaagttttagtttgaagtgggtacaagactgtttctcaaaacagtaccttcatcgacaaaaatccgtggtacatcgtgtacatataaagttggcgacatgatttttttttcgaccatttgagattgggatagagtaagctctactgcacatcatctgcatttacaccttcaaggctgcgacatcgcacattaaccgcgttagttttcaattttccacagcccccttccaaaagtctatcggagacaatggaattttgtgttgtgtagtcatttgtatcttactgcattgacagttataagctaacacgaagttcttctttaagttcttatcagaaagtcctccaataagtgttagatagctcaaagccatgtcgagttatagagaagacttaaaaacgaaaggctcaagtatcatgacaaagattaattaagactgttgtttgcacaatcaactctttctacgtttcctaaatcactgaatcaaccaaccaagaaaccataacatagataaacaacgtcatatcaacaaagtgagaacacacaaattacaaaacatcagtaatatagatagatcctacacggcaacaaacactcgttttacaaaacacagtgatgaaatttaggatatgaaaactacatatatatataagggaggaagaagcattagggattggatctgaaaggattacgctcgtttaattgaggatcaaccttgggagagagattgtatccttgaagcagatcgcggatctttgagtacatcatcacctgtgacgggtctcctcccccaccactgctttgtgatgccacccttgagttttcctgcagcttaatcttctcaaacagatactgcttctctgcctcggcctcactcagcctctgtttcagatagttacttgcgtattcctcctcagacttatccattttcgctagtacaatcctctgcaacctatcagcctcccgctttgcttcatttgctttaagctggaacatgtctgcctccgcttgcttcagcctcacgattctctctagctcatctatctgaagtttcttcttctgcctctctgctttcagttctgaaacttccttggctttgtcttcgagctctctatcgcatgtctcaagagccatgcgtgccttcttgaacattctcatcttctcctcagccactatctccattttcctcaaagtctcttgtacaacttcagcaattcggttgcatgcatcctgaggtgccatcaaacgtccaccttctccattttcaaagctcttcgcagagtctgattcgatctctttggtaaaacagtaacaaaaaagggttaagactctgcagacaaatagtaatgttggttcataaaaaagaagttaccttggaaaaacattaatatcaatttggcagcagttgcttcagccaaaccacctttaatcttgtcaataagctcctcacacttccaaaacagtttcctacctcgttgatcttcgcttccgcggaaaatcctactaacaaaatcaagttccttcatcaaagattctcgatcccagttcggtgcacagtgctgaaacacatctttaacccatcccaacagctcagacgttcggttacaagcccgacacttaaacactatctctcctggacctgaagtattattcttagcagaggatccagtggtgatctgtccatcccgaatagcacaatccgtatgagtccagtgggaacacaagtcacatccgatccagcggcaagtattaaccgaaaaatcaaacttgttacagatcgtacacatacaaaggttacaaaaccctttcctattagtacatatatcacagtagcaatcatcagcaggtagttgattttggcaagctatgtttctacatctcttgtatacaaaaatctcgataagagacggctgagacagactaatattcggatgcaaaaacgcctgaatcccggtatttatcgctacaagtatctcaagctgcacccgatgagctctaacaagtgttacagagctcaaatcagttctactctgaacaaccttctgcaagaacatgaactcatcaacactctgcgctacattcccttcaaggatagacttaagaccgttctttaactcgtcaagaaactcatccggtaatcgatgcattctctctgcaactaactcaactctttccctagcgatatcccgtaccgataccttgtccgcattcgaaacatggtgcatcacattcacagtttgttccatagaatcaggctctgtcttttgactcattgacttcttcccagcaacagtgtctcctagtggccatgtttcttgagaactcgcactctccgctggagactcgcgacgcggctcttgatctgaagagactagtgaaagagctgtttcaagtcctcctccacttcgttgttgttgacgtggtggtaacatttggtgaggatgattcgaaccagatgatgttcccatcaaatattaaaccaaaatctgaaattcagagaaaaccctcataaatcataatatcaccatcacaacatgaatccaagctttgaatttgacttaaacccagaaacaagctctgaagttgactttaacccagaaattgaaaaccctaattatttatcaaactctcggtaaattagtcaaagaagaatcttaaggaattgattaagttgatagttagatgatgctatatatatatatatgaaatacaaatcgtaagtaaaattgatttctcaagcatcgatctttagaactagttttgaagttttataacttgattaagaaagatcattaattttacctcagagagcatgaaactgaaagagaagaaatacagatcggagcagagagaggaggactcaccggaacgagagagaggcgtcgggagatgtagccgaggaagaagatcaatgggagagagagtgagacaagacaaaatgtgaggacaagtattgttttattgtaagaaaagaaaaaaagagataagaattgttgactagagaggaggaaaaaaaacaaaaaacttgacgccgaagcttttcctcttttctctctttaaaaatctttcatagaggagaaacttatggttcattggttatttattccagctttggtaatttaggtcaataccttgatcttgaagatttagtcacaagtgaccaagagttatcaacatatcaaagtatcatcttttgtctatataacccatatgagacctttactaagaaggtatcgacaagtttttctactgttgccatacccttcaaaaattttgacacatgcgactatgtgcacaatgacacgaacaaaataccagacttcacattcaggtagagactacttcaagtcttcaaccacggttttcatgatagtagactgcttaatttaagacgcattcctttcatgtaaaattagcaataatttatctaaaccaatactaagttagcctgttcgaaattaagagatttaatttaattttccttttccttttagattgatttaggttaggtagcaatttttgtaatctatttacaatccctcaattttagtaatttattaaaacactttagtgtttgaagaggagatggtaaggtttattggaacatcaaatggatcaaaagtcagaacttctcaagactatatatgattggttctctcaatctatcatgatatagacgaaagctacatgagattttaatatggatatgatatattcttctctatggagtccaatgtacatgggaactaaaagaaaaagacaagtaacaagttcattcacaccatcagctatctatttcattgatttttgttttatttttcttgctttcgaagagaaacagtacctagtagaaatcaatacaattaaaaaaatatatatttttaaaaaaaattgaactgaacgatattttaaaacatagagatgacattattttttaatccatcgtaaccaatacaaataaaaaataaaaaatcaaacaggtgttagtttagataaataagtttttttaggaaattattgcaagtatataatgtaacgatccgagaactattaataaaatatattttttttcaccgacgttgttcctttggtgaattggttcgtaggcgagatcatttaggtggcttccattttccgttgacgttgctgttttttgtgagacaacaaatttttcctaagatgacctttttctctccgttgattttgagatcttctcttcttttctcgacatttttgggtggtcactttcctcgggatagttttccatctcttgacggtgatccaagcaattggcattatctcggtgcggaaaaaagacttacagtagatataactcgataattagtcaatgaggtaatgttggttactagagatgttaatatgggctaattcacccccatttatacccatgtcatttaaaactcaccacatttatttaaactcatttaaccaattaagtttacaccacatttacccttcccatttaaaattcatttaagttttcttaacccatttagacctatataacattgtttttaacaaaatagtgtaatcaataattatttgataattcttgaaaatttatggcaaaatactaaacacattaaaactaaaattattctacttaaattcaatttttttatttaatttttttttaaaactgtaaagctgtgttttccgctaaaataaaaaattatgttttactataaaaaacaaattcccatcaaaattacagaattgtgtttttgaatccacttatcattgttgctagttcataaaattgtttttgggtgaaaatttaccaattaattacaatgccactaaaatttaaaataaaatttacatttcacaaatcttgtaaagtctataatgtaattccaccataaaattcactttggctaatgccataagattaaaaaaaaaaacccatcatattacatttttttcttattagaacatcatttaattttacattttaaaaagtgtcacctccccaagagtcaataacttgctctttaatatattttcacactaaaccaaaaggacaaaaaaaaacacatatggcataatcaatgaaaattagtgaaggccaagattataaaaaaaaagaaaaaaaaaagtagaagagacaaaacagctacgcgttggcagtatctactagggaagaaaaagaaacaggagtgggaaaaaaatcacgtttattaatgaaaccttgtaatgaaatgaagaaatcgaaatttcgtaaccataaaagtcggaataaaaaattaattttaaaaagaatacaagattactaataatttattgatcgtcgagaaacaaaaagagggccgttccggttacggttccggttccggttccggttccggttccggttcagacaacgttaacgggcttccgaagaaatataagcgacgaaggtggcgcgtctccaagccacgcgccgacgtagaggcgctcgtagtaatggacacagtaaagtgacagagagagctgaagctggtctcgtgtccaaagaagcttagggagtcgtgccaggacgggacggatacagaggaagtagagacatcggtagccaccaagagccgacacaacggaacgaagagacaaagatggtcgtggtgacacttgtcggaaacagagctcttcccatatagagtcgtttcgagccacggctgaccaaagacggcacacacatgcagctgaacagagagatgaaccgtctagtcgccggaggatttcaacaagaacgtcgtggtggtcgttgatgctgaacacgggaacttggttcactctttgtctcttgttgttacttttctcgaccatgcctacacgtttctccgacgacatggtgaaccaagaaaaagagagagaactttgtgtgtgttcaaagagagagattgatacagctgttgatatcacacgggcacatataactctatatttatatgtgtgtatattgtgtgtaagtgagaagcagagagagaggaggagtgatgttttattcaatctgtaaaaagaataaaaatttaatgttggttgggtggttcttgtttctttttaaaaccttagtatatatcattacttgttgtctttttgttttaaaagctattggtagaacatataactatttgtttcgttgcttcactaatcttacatataactttcttttttatcctagtatgaccaatggaattacctaacgtacgggtacaaaactattttcatccaattattgattgaaaaggaattggatactaatagtaatctacataaatcgaattgataccttccaatagtggaaaatgctattttgagagtatttatttatggagatgagaagaatgtttacgtccaagtagtggaatatattgatagctctaaaatcaactaattgaagagaaacaaattagaaagatgcaagttttttttttttctttctgtttttgttaatagcaactcattactaaactgaataatccagaggtgatcagtgattgtcttctgaaagtgggcaaggacctgaaacttcaaacctaatgaagataaattgtaattaatcttgtggtatagtatgtaaatttaactaatattattatgaatatcatattttactaaatgtgaatacgtgtgtaaatgaaacctacttgtgattctatatatattggtgggtattattgggtaacgtaaaaagttaaagggatttggaacgactactattttctttgtctcctccacgctttgctttgctttctgaacggtaatgtaagtcaaacctctctcgttgactttttttttttttttctttttttcttactgctttcttttttgccagtccataattaacagtcgaggacttaacctatacaaggtaaatacaattaaatccgaatgttcacacacccttagaagattgatttcatgtaacttgttgaaggagtttaaaattgttaacgaatagttcgtagacattgtaagaccgtatcaaaacctaaatttcaactaattaagagaactaccttgatttataagtagtttacaactaatcaagacgactctgatgatgcaaatcctagttcaaatcccaagtcttgcggtatgattgatagatatatgaacattatttttgattaaaaataaacaacaatttatattctaagcttattattttttaaattatagttaaaattttaataaaacaattcactagaaaattagcatatattaagattttaatattaaatctacagaaacaaatcaaacaattcaaaactaaaaaccaaaaacaaaaacccaaaaagtatacaattattaaagaaaaaaaaaacattgccattcaatcgaaagtcttgtttggaccttttcccaaaacgttttttataaaaaagtttgttataattttacatgaataatgcattcaactacgtgatcactgtcaaggtaatattttacaacgtataacaataatgtctaacaacatcaagatattggttttagtctctgtagatattatatgttgtacgaaaatgtgtatatcttacattaaagccttcacaccaattacattatagctagtttcatatttttataaatttattgggagtataattaacggatatatttgtagataaaaatatagatataaaatatgcatgtgaacatctatatctagtctatagacagagagaagagttgtgacttgtgaatgggaatcgaggtgaagtgaggaaaggtccaagggaaagaatccaggagtgagagaactgcaaatccgatgctcttcaatttcgtttttttttcctctctcagtctcccattttatagctatatataaaaaaaattatgaatataataaaccatgtcacttaaaaaaaaacaagacactacaatttcttgtcccttttgttactttttttctttgtgatgataaaaaaaaaaaaattggtttcgaagcacttgaaaatagtaaatcttcaaatacattacaatttaaattaaatatagacatatgcttgtcattatcagaaaaaaaaaattatgtatacatatgcgtgtcttggtgtatatgtttattatagttatattctcgaggtaaaagagacattgttgttcgttcttcttgttgttttttgtatttaccttttttttttagttcttccatatgtctttcttcaacgttctcaatctttcttgtttcagggccgttgtgaaattatctaccgtatactcatgcttgtttccacgtagatataaaatgcacataagttgcatgacgtaacaagactttaaatactttataaaagaaaaaaaaactttacaaatacaaagaggtcttgggatattaccaagtatcctaagtaattttgattatatttttcatgatgcatgtttatctattactgcctagaccaatcctaagaaacaactccatgacaatgagttgaaagtcttcttccttcctttacaatacatagaacatataaagattttttttaaaaaagaatatgagaaagaagagaaaaaaaacgctgtaaatatttattaatacttcattatatgatagttataaggaatattttcattaatgtgaggagactgtaaccaaaaaaaaaactaaattaacgaaaactgaatgatataaatgataatcatctgataatgctattggaacaacaaagatactgcatggacatattgatcactattcacatattttctattttgctctagtctaaccacaatttttttttaaaactgttttattaatttgtactgttgtctatgtaaaggtgcggttgaccatatatagattcatgtcttttacctcaaattttatttaatttatagttatgtggattacccttcctgatcagtagtcttacttctggaaacaatactctactatataactcgaaatgttttcctattagttagaacttttggttagatacgtttttacccattctgcagtaaccaaactctttctgtccaaaatctttatttccataattttctaaaacatattgatgaggttaccatactttctatcatagaaaatcaggatatattataaaaaaaatagcataaatttgtatcattttcaacgaacaatagccgtagactaccatccaagtgaagagacaaaagaaagactgtcacccaaagagaacaaaaatcaaaatagaatgaaatgataaaagtaactaattgataagcttgacgtcaaaaataataattaatttgctgaaaaatcaacattaagcatctatcaaagatatagtctagtcattaagcatctatttagttgtctttttgggctttggaatttcgccaaaaatagcaaacccaaaattcgttttaacactcatgctgtctttggcctccacatatgttacaatgtgcatgtatacatatgctttaccaatgaaatggattcaacaatttgaatttgaacttctaacaaatcattgacgaagaagatatgaaatgttgacaaggagatgaagtaaaagagaaagaattttgttttgtcatgtgggtatatttaaccgttcgactctttattatagtactgatattattagtttagaaactctagctacttcattatgaaaatgttgaattcaaaaagaaaaaaaaaaagatatgttgaattcatctttgaaaaaaagaaaaaagagttgaatccatgaaataacaagaagatacttacgaaatattttcctatcatacttgagatgtttatgtttatttcatttattttctttcaaatatccacttactctttcgacgactagcgtttgtactttgtaaaaagagtgacatgtgcggcatcaaattggtcaaccttatataattatcgtattgactccgatttacaaatataattttccgggaaaatgggtgggatcaaacaaaacattttttttttattgatttatgaaaataacactaacgtctctctcctcgttttgcaagattgattcatttgagatagaatttagcatgaagacaaaactcgtaaaatttactaaataacgattttggttttgtttaacatttgttgagagatccaccgtgttagaaggtcaaccatgctaggagatgacggagattacaagcataaagcaaccgagattaagaatatccgatcgtagaaggtttaacatcatataacatcatattatttcaattttctatgtcattagtatagaaacttatatttatatagaattaagaaaatccggtcgtagaaggttcaaaaagctgaaaactacatagtatttgactattattttcttgcaaagaagcttatttcatttgaagaatatatactaaataccactttacataaagatttttattatataaaatttgcctttcacatctattagtacaaatatgtaaaacaacctaggatataacatatgcaattttaggaataaaataaagcaataaaggtattttatgtcaaattaaggaaggtatccaatgtctaactagttccaaatcaaccaactagactttctcgtttaaatgttttacaaaataaaaaaataaaaaaagacttttcgggtataaatacattatttattgcaatataataagaatttactgagatggagacgcaagcgcagagcagaagccaaagatttggtcagccctaaacgctaaaacaagtaaaaacagcaaagaaaagatgaatgacactttggtcctccatcaaatctttaataacgttattgacttatatagtattggtacaggtacatatttgtaattgaatacaatatttacttttctacaaaaataaagaagaaggatttggtaatgattaaaggagtaaacaaggttaaaaaggtatactgtcataatgagataaaagctcaaatacaatggtaaagaaaacaaagaggaacaagggtgaacacaaacataccctccaataaacaaacaaagactgccacatttgtccaaatttcattttcaccttcacgtatgcatacatacacaacatattcaggcttagttgtatattttctttttaactattcttacatgggggaaaaccgtagagaaatcgcaagtggataaataaagaatttttggtattttgattaataaataattatctaatttctattttaacttttgatctaaaaaatacaaaaaaaactaaaattgatttaaataatttttcattattattttgattacttttgtaggaaaaaacagtaagaaataatttttaggaaaatcgttggaaattatttcttacaaatgttttggtaaaaaaaattccttctattttcttaccaaatatttctaccaattatttttgtagatggccgttagtcttcctctggttttaggcttggttttgtctctgtttctattatttttcctctgtttttatttttgtattggtttctaaacctcctttattatgaaaacgataaaaaaaaaaggggttttcatccatttttcctaattaaatgagattaattaaaggcctaatctttcactatatttgctagagttatttttggagtcaacggcgacttagtagcatatttcgttcgttgaagtatcatgcaatgaatcatcctatttaaataacagtttagtgtggaaaaaatggttgtaaagatcggaaacacgatatgatcatctatatatgtacagtacataaaacaaaaatggtcaatgaggcatattaaaaaaatgaaaaccagagatcaattcaatgaatcaaaatctctatatataagagcttcacatataagactataagaccatccaaaagtacctccttataagaagaactcaaagtacaaaaacaaacaaaaaccaacatggctttgcaaaagtttcctctcttggggctgtttctggtcctaaccatcctcgtctcttcagcgacagccgatggacatgtttgcccgccgtcaacaaaactaagccgggtaagtttccgtgatgtttttttttatttgtcataactagtaactactattataattttgtttaagtacgtaattaatatatatccatagtaatattcttttctttcaatttaaactacagagatgcaataacgataaagaaaatgtggttgtcagtttcttccatcgttataaggttataagtgagtatcctgtttccataaaatatttgttgatgtttttcgtttttgttttttattttctatttgtggataaccaagaacctatggactattggtcgataattccattgggccggggaccgaagaatttgttggtgtttagtattttattttattttaatttttatatactatgatattggacatttatctatatcttttggtatcatatatgtaaatatgtgatttgcaaatgtttaaaagataattcattacccgaaatggtgaaatcaatagtttttaacttgcttttcaccttgctacccaaaggagaagagttgggaaggtattaatgtgagaaattggaagctaaacttaagatttgaccaattgtttcgatcatcatttagaaatatttagctaatcgtcccatgtcagagtcaaaatactatgggttacaacagtgttctcgcttatggcatccaacttatgttataatgtcactaatagtgtctgtctgatttctctttctggattattctggttcagagtatgagtcttgttgcccacccaaagttggctatgcttttactctttctattctttgaaaatttaagtttttttctaaaggttcagattatcctctagaaacttctattcaattatcctgagtaacacctatttgatttgaaattccactttgattacaaattttactaaagagcgtcacataattggtaatttagttttgaaggaaattttggtgtattataccatatagaaatcaagcatttgtttatgttacagtcaacaatgcttaataatatagtttcttccaccagtaaccatagctaaaagcctaaaagttccagctcaacaatctctttcttataaccccttcaactaaatcacattacccccaaactgtaatgtatcaagagatgataaatagatgataaatattgtgatcactgttccgacgaatttccgactttcaaccaccaaaatatgtatatcttgtagcacgaaaatgtctcacattggataggaacttaggaaggatagtagaccaataatttatacagacctaagagcatctcatgttatcaaattcaatataacagcacaacatcgaacatacatgtattattcaagtatcaaattgtactgttattgccactagcattttccacagttaacataaaactaaaattgatatcccatccaaacatatgatttttgagccaatttgcaagtgcctctcccacataatcattgattgacttaaagatgatctttctttgcaaacatgagcaatatttaaccatatatttggtacaagtagtactttctgttcctatacaaattttggcacaaccattacttatttgtgaaataagctcttataagtcttctctttctcatacttcaataatttcgttctttgaaagaattttaaacaacaaaacaactttactaaaagaatatatgaacccttgaccctctacaaatgcaaaaagataattcttccaaaactatcactgttaaatccgaatgcaacaacttgaccatatatcaccaccacttttagcctttcactttctgagaatcagactaacaagatttttattaaattaccaaaacaccaaacttaataaactatttggaataggtagcaaagtttcaccacacatagctccttaaacacagacacttagcagttacatatcatcaccacttaaactccttaaaacaacaacacactaaacactttataaacgaaagacacaaagcagctagtcattaattgacattaagatgagagaaaccccaaaacaccaaatcatcaagccgctcattggtcggagaattcccaccatgaaccaacaaaccttcctcaccatccttaaccgctttcgtaaacgcgcaccacccacgttggctcggcttctcctcttcattcccgcacacaatcctctcccacactaacgtctctgtatcaagctgataaacctctccagacatcttcccagctcccatgtgcataagctcatgcggctcttcctccccaccataaataacaatgtacttcccgtaagaaaccgccggaaacacgcttctcgccgccggtacatccccggtagtctccacagccttccactgttcactagccaagtcaaaacaatgaatatcacccaattcattaccatcaaacccaaacaaaacccaaattctcccttccacaaccacaagccctggtgctcctctgcctttacaagcttccccagccgccggatactcaacccatttctgatcaacaacatcgtacgcatgaagcgtattcacacgtcctttagcagtaacaccaccaaacacataaactttccgatcatcaccagccattgaatgatagctacgaccaggaagcccttcctcaacaggagccaacaatttccactcattggtctcagtatcatacgaatgaagaccgttgtatctccgtttatcgtcacggccaccgtagacatagatcgttgaaccgatcgttaccatcgagacaccaaaacaggggaaaggagcctctccggtcgcaggagctatcgaccattcttgagtctcaagatcgaaaacgtaaagatcgttatcaatatggatcgttggcttaagctcaccaccaaaacagtaaactttgttcccaacgacggtcatggcatgtgagcttctagccccaggaccagctcctttttgacccacctgattaacataatcacattacatttctaagatcaaagaaaccaaataaaagaatcttaatatgtattatagagattgaaagattgaatctttacctttaaccatttgttctccaccggacacatttttttcgttactcaccagaaagatttttttttagaggatgaaagaaaaaagttttgtggctattgttgttgatgctgttgcgtgtacttacttataggaaaatgtggtatcaagggaccacaattaaagtacaaaagtaaattacgatttctcttactaagaattaagtaacgtctaatattaaaagataaatggagatacgttaccatctatgatactaattcttattttattgtgacagattgaagagtatttctgtaatagtacgagacgtgttctatctttggcttacctattaagaaaaaaatcttgattaatttaaaaaattatttccagaattaggcgaggtatcatagtcatatcctcttattattaaaaaagaagtacaaattaaatttttgtctaatttagcctcaattttgatttcaattttgaattttgttcttccttatcaagggtaaaatcgtccaaaccaaataactaaattaaacaggatccgcgttttacatagacgggtgagttatgtttaatgggcttttgatcacatgtaaaactacataataggttaccatcaagtaatgcaatcttaaccataacacgattagttgtatatctcaacaatttttagtatctaatacacgcatattccatcaaaatagtctgcatatttaattacgattttaagaatcttcaatcatatattcaccctcctcactaatcactataaaatcgacatagacgagcttattcgattcttctaactaccataacacgataatacattccataaattagaaaaaaatcttataaatttattctcttaaatctaaaactaaccataatcaactaaacaatatttaccacttatctaaatatagccaatcattatgaactaaaccaaattcgaatcattagtgaggatccaatctttgatttgcaacttatcctgcaagatattttcgaatatttttgaaaatattagatccaacaaccctagcctccttcatcactataaatatcaaagtcattctcatcacaaaccaaattgagatcaagaacgattcgatggttatatcataatcaattcatgatagtgaatgattgtttgcataggtattcatgacgaagtggatgttcttctttgatgttgatgagtttttacatgttccggtgaaagagacgatttcgtctgtgatggaatctttggaggaatattttcagtttactattgaactgatgcctatgagtagtcgggtttgttattccggtgatggcccggccagaacttacaggtaacattcataactttgttgattttaatgattgaacgttaaccaaagcccatgtgttgtttattgagtgacttagaatattagtcacaagttttttgaaggtgacatataatatcaataagcatctgattctgtcaacacttggcctgtaaaagtctttgtgcattctgtattagtctcctatgtcggtcacgatctttgcttttattgaacatcacatgatattagtgagaaatgttgtaaagattatttcttttgtttgtaccaaatattgaattgtaattggtttgtatattttctgtttttaggaaggaacatatcggttattgatttggtttagttcagggactaatctaaatggtattttggttttgtgtttcagaaaatggggaattgagaaactggcatatagagacgtcaagaaggttccaagacgggatcggaaatacgcggtccagccggagaatgtattcgcgataggcgtacacatgtctcagaatctacaagggaagacatagcacaaggctgagagcaaaatccgttacttccattaccatggttcgatctctcagcgccgcgagcacgcactccttatgtgctagacactacaatccgtgatgttgtccttgctgtgagaacgttcgagttgagaacgattggtgatcggctgctacggacaagacaatgaagagatgaaaaacatgaatagtgaatctaatcaatctttagaaagaagaattaggtgttaagatgatttactttgcattgttttcttttgggggtatattcttttattgtatcatataatttgggtaatgggatcattaatacagtttcaaaatactctttagtatatatattctgtatgatttagaaaaaaggtctcctcataaatgttattgtctttgttttgccaaaaataaaagataaaacataccaactttggtttttaaagatcttataatcaacaaaataattacaccatctatcattatattacatttttgtcaccattttacttatatcaaatacacatttagtaattgatacacaactttaaacacaataaaatacatgattctaatcagtaaatagcctccatactaataaaagattccaatcattatttataccagttttaaaaaaactaaatatatgttactattttttaatataacacacactaatttatttaataaaaaatctataaaagctttcgcccgcgggaaaccgcgggtttaatcctagtagtatagaataagactcaacaaatttaaaaaaaaaaaaaaaaaaagtcaaactatattttgtaataactcttccggataaatacatgttcttgcacattaatttcagatctctaatcgtgtttttaacgacttgtaatacgtactatgcactttgagtaattgaggaacaagatatgatgtccacggtgtggatctcgtgtaaacgtggcggtggtgcttatctttatgtcatttttcatcagagggggtcacatgcgacttttattattgagagaaaaaaaaacagagacaacaaaagctttctgacaaaaaaagcttaaaagtaaaagaagaaaaagagaggaaaagaaggaatgcatgtagacaatgtcagcaagaatctggtgaataatccaggcaacatgaatgtaggttatacattggggccaaatttagcagtttcatttatactttaacccatcactctaaaaaaacattttgttgatatttttcttcagcatcaaactctcaaatctttaggcttttagttttatgtcttatgcattgacatcattgacaagttagaagagaacagttgtattatttattaggttttatatccattcaaggcatggcttatttatgtttggtggatttcaatgactatattttattatttgtttttaaatgaaccatatcatccgttgaaaaaattatatattagttcataagccatgtttgcctggatttctccaaaagaggttaaccaagttagaatacattggatttcaaggaaaagttaaaatgcattggatttcaaggaaaagccaatagaatcggtgataaagcctaaatatagtaaaattttacctcaacatcgttgacatatgtttcacaattaatttcattatttttgaacatgacatttatcgctacatatcaaccttatcctacattgccaatatgaaatatttatgcttggaaggtggtcactcaagtttctgataacatgacatttttttccattttagctattgtttttttatgttttaggaagcatttggtgtgattttaaggtcaaacaggaaatattcaagtatttatgaaatcaagaaggtcttaggtgttttggagcaaaaaaaaaaaacaaaagacgatcaaaatacatttttggacagattcgtagctcaggttttacatccatttaagacattcccgtgcaccaaattgagagattttggactctatggaaatgtagaagggtcaaaaaccgcaatgaactggaattgtggctcggtcagaccatttaagtttacccacctctccacacctatatctgcatgccaaacacaaatgaacagaatacaaaaacagacacatttataaatattagtttccatgtagactcgaggatgataattttaacgcaaatgactgttgcgtaaaacaagtttatcaccaaaaagaaaacgaatcatcttgttctctcatgcatatgtttcatacatgggtacagatctctgtatgcaggagaagagacatgaattacatgattatacttactacattatcggagtggaacacagtttaaagatgttcaaagttcactcaacacagatttttgaatacttttagttgcttgagacactgatatgtgattaccataaagttcaaaataaaacaaaagtatacgtggaagataaagaacaactgcagtaggcgatcgcataaaccaaaagattttggcattcccataaatcacaacaaggaacaagggaaaacaaccaagttgagcataccacatataatctttatacatatacatatatgatgagacctataaaaatcatttatgtccgactaatatagataaaactatgagcatgtcttaccaagtatcttcttgctctatttcggttttatactttataaacctaaacaagttctctactaactataacttactaactaatgtgttgtttcataagatcattatctagtaaggtgaaattggaaatgaagtaatagtaaactcaaaatgacctgaaacaggagcttattcttcttcccattcaacatcttcttcttcttcttcctgactcatctgtcctctcagttcccctactacatcagccactccttccctgatcatccatagagggaggttttccactctaggatcttcatcttccctggtcggattcaatcttgcccgattcaatcttgtccgattcaatcttgtctttctaaaacgtgcttcggctgaagcgaaaaaactagcagacgatattgaagaagatgaagatgatgcaggagcgcttgtagcagctactgttgtgtttgtactcgagatactcgaatcgggttccttcggtccagaacaactatgatcaggtccaaaccgatgtttcaagcaatgatcgacattttatagagaatgtcaagacttctttgcacctagaaacaggacattgtttcttcttcttcttaacatcgttttcgtagtttgagggatcacaatctgtatcattaacatgtttatcccaagttatgtttgaatcttcgtcagggtttaacctaaatcctatagcacaaaacggacaaataatcactgtgacatctcctctgtttccttttggacaatcgtgttacatatagctacaatgatccaaacaaagcacctgcaaatagagttttaaaagttagataaactttaccacagccattgttcctctctatttagaaaatcatgcaacattgtagatcgtagaaactagcattggaataaaaagacaaggagaaagagacctgaaggcagcgatcacatgtgaagggcaagaaatcgatctgcgtgcaaacatcgacggagcagtgtttccctagatctggaaattccggagtccccatcgaaataagggtttcgacgttcagaacaattcaaactcgaagaagtaacaattcgaacccgaaagatctaggtccgaggaaccgagcgaactatgtaaatcaaaatctctatactttgagaacacggtacgaagaacggagagaactaggtcaaacaaaatctctatcccttgagaactaggttcttctccttttataacacgcaacagtcggatgggcctccttaatgattaatatcttgatgggccttctctatactaatatatgacccaaagagaacccattccactatatcccccttctgccttgtgctaagtttttagtacttttccaagttacctaatcctacaagaaattctggaaagtgaaatttctcataaaatatatcatttacttatttcacttataatacaatagaataaaacaacgtgtagaaaacaatattaatctagcttatcttgtaattcatcaaaaaaaaaaaaacttaacaaactgtcacctttatttggggtcatcccaaaagtgcctccataattcctcacaatgaaaaatttcacaatacgcaacttaaaatattaacattttttcatcttatataaatccaatcactgactactattatattcatatcaagataaaactcaataaatcattccaattctctaatcaaaatgtggagcaacaagttcttcttccttcttccagttgtatgcatcgtagtgttcgctacttctcaaccattgccatcaccacaaccttcccaactagattgttggtcatcactagaagttattcccgactgtgtcccggaaattttccgatcgataacaaatggacagttcgggaatgtaggtccttcttgctgccatgcttttataggtctcgatactgaatgcatccctcagatgtttatcttcgctcccctcatcccgccttctcgcagactcagggatcattgttcccacaaaataattgtgccataaacattttgagactttgttagttgttacaaagagtttgttattctacatgttttagactataaatgtgcttatagtgttatgtttctgcttaattaactacgtacgttctctactataagatatcaataattaacttccatgtgaacatgtgtcatttagctataataagtgaatacgtactaggatacgttggtttatttatcaaaattgtacacattgcatttgcttcacaattgtttggatgactttacaaagcgcttgtttacttatggccttatgggttgtgaattttaatcgagcattgttcatattgtagtccttcaaattttgagttttttctcgtatatacacatatgtaaactccaatactcaatagctgaccaacatcgagttacaagtacgactaccaataaaaagattttaccgaaaataagaaacatcttcgatatatattttttgattatctcttaatcattagtttgcgatgtttatagtgcgggaattgagtttgagatcgactcaaaaattataattggttttctcaaaacatggattagacgactcatatattcattgtctttcctaacatgattatagtatggctctatcgtgaaggactggatagtctgtattttatatatctatagaaaaactaacagttttataaatgagttagcaaaatatacttttttttgttgctttaaaactttttttttctaattctatcccatattatattaattcgattttgttgaatgattctagaggatcgatatacccgaaacatgtttaaaattgtaatttatttttagttttttcagtgaagtaggaggacatttgtccccctcaaatcaccaaatttttaaaaaaaaaaaacttatacatgatttaaggattatgcaattgtattgtctgtccgtcatttgactcattttcccactggtaagagctcaacttcagggattaatgggcttaggcctgatccgtttaaaaaaaaaaatatatatcttcataagagagtttggccgtttggaaataacgtgtaagtaggacccacttttgtgattatccgccgcacagaagtctctcctccactccacaaatagcattcccggcgagagacagagagcgaagaagaagactcaaaccaaaaaaaaaaatggaagctgcactgctttctcttcagcccttcccttcctccgccactcaacgacgtctctctccgtttaacctccacaatacacttaccagaccttcttcttatgctcctcttcgtgctcaaaaggtttcactttttcatccaattcaatcttcttgtttctatcttatcctcagaattgtatacaatatgtaaatttcagtgctgattcattgattctcaaaattgatgaaaatctatgattcgagagttggtatcaatagcttttcagcttcaggagtttggaatcgatgttaggtaggtcctctctagtatcctggaatcgtttttgtgttgcttgttgaaaaattgtagactttgtgcactttatgaatctgtgatgtttgaagaaattatgtagtcatgttgagaaatgagaactaagtagctttttgttttattgttagtctggaatcacagaaggttctgattcagcattagaggctaaagtaagtgagcaagaagtgggaatgtaccagaatgaagtagttgagagtcaaggtataaggataaggagaagaccacctactggacctccattgcattacgttggaccttttgagttccggcttcagaacgagggaaacacgcctcgtaacatcttggaagagatcgtatggcacaaggataaagaagttgctcagatgaaagagagaaagcctctttatagcttgaagaaggctcttgataatgttcctcctgctaaagacttcattggtgctcttagatcggctcaccaaagaacggggttgcctggtttaatagctgaggttaagaaagcttctccaagtagaggaatcctgagagaggattttaaccctgtaagaatttacacccttttaaaccatcctgtgacgtgagtaagtataaggattgcaagaactatgtctgaaggcttgaaattgtaggttgaaattgcacaagcttatgagaaggggggagcagcatgtcttagtgttttgacagatgacaaatacttcaaggtaatattgtgaagaaaatgttctttgagaccaaatgaagtttgatattcgtaatgaagcctgtaatctattttccatatagggaagctatgagaacctgcaagctataatggaagctggtgtgaaggtactttctttctctcttttttttttggtttctctgtataattatccttttcagatactttgtcatacaacactgacatgcaacgttctaatgtcttgtcatgaaaaatgcagtgccctttgctattgaaagagttcattgttgaggcatggcagatatactatggtagaagtaaaggcgcagatgcagttttgttgatcgcttctgtgttacctgaccttgacatcaaatacatgattaagatttgcaaaatacttggaatggctacacttgtggaggtttgtaaccagtttcatatacgcctcaactaatgcttctgtctcttcctaatcctaattagtgtttttctgattttcttggttaccacttgcctctaggtccatgacgaaagggagatggatcgtgttcttgcaattgaaggagtcgagctcattggcatcaataaccgtaaccttggtaaatgcttgaaccagacctcctttaaagctagacatacaatccttcttgatccgttttatcaccttttctttcagaaacatttgaggtagatcttggtatcacaaagaagctacttgagggagagcgtggcgaactgatccgtcaaaaagacatccttgtaagtagtatttcacatcccctgtttctcttaccccttacaatgttacacacaccttacttaaagtttgtatatcctcaacttgtcttcacattgtaggtggttggagaatctgggttattcactcccgaagatatcgcctttgttcaagaagccggtgtcaaagcagtaagctttcacaaactttatagttcaagataacattgcccacaatgatattggttcacctgatcttagctcccatgtgattttcttttcctgttattaggttttagtcggcgaatctcttattaaacaaagcgatcccgggaaggcaatcagcaccctatttggaagagatgtctcagagtaaattccgagtagaaactttttgtatagagaaaatcttcattgaagtctctttttttcttcttaagtgccgctcaagtgcgcagaggcttgtgcctttacagaaatgtccaattattattattttcttgtcttacatacacattgtgtacttaaatttatccatcaaatgtcaaatcttggtcgacgttttaatgagtacatgaggataaatcattaactacggtaaatcggtccatgattcaataactgactgtcaccggtaagagaaaaaaagaagccgagttcatataaataaatagacttaacaacatcaacgatcactcctttattgagagaccaactaacataaaacgtaaagtgcaatgactgactcatggaagttggatgagagatagatccatctatttagtttaccaacctgagaagaaaacacatgagaggagatcatgagttcctttcctgcattctacatcttcgatctatgaacgctaagcagaatgtgagttacctggattcataatgcatcaaaggagctcaagaactagagcagaagcacctcctcctccgttgcacactcctcccacaccgtactttccgtttctcttctttagtatcccaagcaacgtgattagaatacgggcgccactgcagcctagagggtgtcctaaggagacagctcctccatttacgttcactttctcctgtttaggcaaagaggaacaaaatccatgtttatgaaaccacttgattaagttgattgagaagatgatgatttaacagactcggtgatataaaagacttactggagcaatcccgagtagcttttgatttgcaagtgctacaacctgtgaaaagtcagtttagtaaaaattacgcatcacaatggtttgtcaattatgtaaggaagaagacagatgttcttactgcaaatgcttcattgatctcatagtaatcaacttgagaagattccaaaccagcatgtgcaatggcttttggtatagcaagagcaggagcagtagtgaaaaactctggttcctgcagggtttgggtctcacttagtgaatggaatcagattgtattcaaaaagggaatgcaagattataagtaacgtacctgagctgcgtcaccataccctttaatttttgctaatactagaagtcctagctgaagagccttctctccgctcactaggacaagggcagctgcaccatcactgtcaaagagagacaaaatttactaaagagaaaaaaaagttgcaaatctaaccaagatccacttcatacgttacatgagttctctaaaagctaagaacatatatatggtcagctaggaaaaggaccttatgctagacgcatttccagctgtaacagtccctccattctctttgaaactaggacggagtttcctcaattttgcagcatcaaactgagacattgagacatcatacatgtagcaaatcatactaaattagatctcattttttggagttatcttaaccacaagtttcatttgctgacgtgtaatgcctcatacagtagaagatacaaatgaataaaaatttatgactgaaaacataaacatgaatagaattttctcaaaacagtagtcaatgcaaatactctattgttcagcaaagttcacttagaaaacaatctgtatgcaacaggtgaataacatgaaaaagcacaatctcaggttcactggagtataaatgcataatcgttaaaccaaaaggggacataaatcaccttcccaagaccttcgtccttgtcaacaatggttgatggcctacctcttcctccagaaacttcaacctgcataaccaattaccttagtatatattcaccatgtataacgcattaaccaaaaattacaaaaaatatactaaccgggacgatttcccatgtgaaggcgccagcttcctgggcagcaataccacgctcaaaactctgaactgcatagtcatcctgcatattcatcagtaagacaccaatcaactcatgttttgagtttccataaagaatgagcccaactaaccaattctagtagttcacagatggctaatgatcaaggcagtggaattgtacagaggatgtatgcagagtatctatcaataataagttgatggggtacaaatatgcaacaagcatcacgagtcttaattcaagaaaactaaggatcaacatacttgctgctcccttgtaatctgaaacttctcagcgcataattctgcacagcttcccatcccacagtcgttatagacatcccatagtccatccttcaacattccatctactaaagaatcatgaccaaaacgagatcccttcctgcatcaaaatccgaataagaaacaatgatgcatagagtaaaaagaccaaatgattccgtaaaaccacatcattttaccttgcttctgccaaatattttggtgtattagacatgctttccataccacccgccacaactacatcattgatccctaactggatactttgagcagcaatcattaccgctgaaaaaccaccaaacaaaccagaaaaacattgtcaaaagcatcaaatcaaaagtctaaaaaatgcagagcgcaaatgttccaaagttctcacctttcatgcctgatgcacaaaccttgttaactgtagtacagataacagagttagggattcctgcacctaaagcagcttgacgagcaggagcttgacccaaattagcactaagaacattgccaaagacaacttcttgaacaagagctggatcaacatttgctctcttcaaagcagctaaatcattaaaaacaacaacaagggctcgtcaattatacataaagctaaagattttgcacagaaacatgaactgttttttaatacctgcaatagctaaagatccaagctttgtggcaggtaaagatgaaagagatccgagaaagccacccattggagtacgtgcaacacccacaatgcaaacatctgattcatcaacattcatatatcaaaaaaaaaattcatccttcaaattcagtttactaatgaaagtgttttgttacctctaggattcacagattctgatgtatgggccattgctaatctacaaaatggtgtcaaaagtcaacaagggaccaatctcattaagaaccagatcccctataaacatttgggatctatgtgggatcatttaccttgattcttcaattccagaagagagcgccgaatggagagagctgaaagaagtgagtcgttgtgaaaatgacagcgaattctacaataaaactggagagagaaacagggacagagggtcctataaaagaggacgctttcttgtgatgttgttgttgttggtgaatcagcgacgataactacgatgaagagcaacacgactgctatatgatctgtctttcaaaaaataaaataaaaattatctgtacttcaaactctttaaatgttttaaaataaattattgttaaattactgtatcaaccccttcttctacataaatcatcattgatagcaaatatatatttgaaaataattgcacatggaaattggaaactttgttatttacgcaaatctttatttattttgttttgtggaaaacgcaaatccttatttaagatataatttgcacaaagaatctttattatttacacaaaatctctattttaaatatatttatttgttgtttgttgactcatttaatatatggtgggtgggtcggcgattgggacgaaagttaaagggtaaacattggaaacaaataattcggatggtaaaagatagtattattcaatttattttgattcaaagacgggattaaaattttgggttctaaattaggttcaaaagttttatgtaatgaaattccacattgggacatgtatttggagaacattctactttaagataaatatttctaattttttgggtattttgatttttgtttggaaaagtaatatactaaaatggataatacgaatactctctcccacacttaatccaaatggatagacataattgggtgagaaggaaatctaaatagctttattgtacattcccttaatagaagttaaactcttgagtcttcttaagttaataaatttattgtgggacaaactaaaccaagatagatttttgtgttcatatgagcttgttaaagtagaaatctaaaattgaaaataagatggttcattaagtttaattgtgcaagaaatcgaaaagaagaaaatattcagattgtcaccacgattaaagtggttctttgactggtctcatacaaagcaaaaaaagaagaagagagagttaacacaagaagcaactcctaaagataacttcccttcttctcattatacaaatctatataaatctattttaatgacaaccctaaacatatgggctaataagttatttctatgacaatgagtttttattttggacaaacttctatgacaatgattaagtgttccaataactgcagtttgtttgaccaagattttgattccaatttttaatttttattcgatatgcaattattaaaatccgactcaaccccaaattacgacccaaattcaactaacaaacacgaatgggatggagattgatttttttttttagtgaattaggatggggattgattttctgtctggaaatggaataggttgttgggaacgaaaaagcaatctactaaatactctctattgtaccttcccttgatacaaaagttaaactctaagttaatgaaattgtagttaggccaaagttttttttctgtttaagggcaaattataattatttattaattgtttatcaaaaataaaatatcggtcaacgcataattctgacaaccgaagtagaatggttatggtattggcaacataacttatatttatttgtgtatgtcggtatgttataacaatatatagtgtagctaacaagacatttttaaagtatgcatgtgtgactagatgatgacatctctttcgtataagtagcaaacatttatccatttttgtgctcatataaacttattaacataaaaatctaaaattgaaaataagatagttagttaagttttattgtgcaagaaatagaaaagaataaaatattgggattgtcatcaagattaaagtggttccttgattgatctcaccaaaaaaaaaaaaaaaagagacttctacgagaggcaactcctaaaaatacttctcttcttcttatcacacaaattatgaatctgttttgatggaaacctaaacacatgggttaatgagctatttctataacaatgattgggttgctctactaattgtagtttgtttgacaaagatttttattccacttttattttttgttcgataattccttatccaaacttgatttaaaccccaattttgacctgagttcaacaaataaacgcaaacttagcgaacaggatgagacaaattttctatctcgaaatagattaaatagttattaaaaacttattctttttatcaggattcttttgttctattcctttcacaactttgaattctttgaagcacttttgtataaaatcacaatcattttgttcagattttgggagctggaactgaagtgttgtttctaaaatcttatcaaagggatgcatgttgtattgcttttgtgtcgcttattaaactttcaatttgcacccaaacgagaaataagatcaaatcctcttgttttcatttagatttgtgttgacatttgtgttagtttcttagtgtaaaggaacaagtttgtgttgacatacattctttcttcgttttttcagtggcaattgacagttccttacttgctacttcctctaagattgtcacttacttgataagatgaacaacgatgatgtaagtttcttttttttttctaatgttatagaattgtatgattgagaattggatgttttttcctgaatttagaattggtcggacgaagagtgttgatattttcttcaactttgtactgctgaggaaaaagggaatagaagaaagacgagattaaatataactggaaaagagtccatcatgagatagtttgaagaaaaatttgggaagagatattcatgggataaacaattcaagaacaagtatgatgtgcgtagaagaacatacacaaaggttaaaaacttgcttcataacagaactgaaattacatatgattctgtgtaaagaataaatataatttttcttttcattacgtttacctaagtatttaagaaagcaagtaaacatacttttaataactaaaggtcgctgaaaattctaaaaattgtaacgtgaattctcaaaactgtaaaaactgattctttttattgtaccctatatgttaacgttaattctcataactctaaattcttatttttccatcaaaatcatgacgtcaatcaaactgttaaaaggcgagatacaaatataaatattgtactaatattgttaatctgaaatatctactattcaaacatatttgtttgaagtatatcatattacatgatacattttttggtgatgaatcaaattgatgaataaacatttcaatatgaaatttacttgtttttgaataattatgtaatacttttttttattagttatattttgtaaaaaaatataatattttattataaatttcatcaattgacacatattcattcatgacaatttttttatcaagcttgagatcctcaaaatggttttatcattagttatatttaaaattttaacattaaatcataataatataaaaatttggtgtttttcagttttctaaaattataaattatattattttggtattttgtatttaccgttatcgcacatgctagttaaccaactataaaacttcaacaaacgtaaaatttaaccgctaaatcaatcatttaaaatatatgataactcttaaaaccgcaactctccgtttccataaatttcagcagtctgcatttgaaccattcaagcctcgtagtttggtcaagaaccgattacgcggccaaatcttatatccgacgctaagtcgctaaccatgtggaaaccattatttatcaatagaaatcaaaacgacaaaacccgacctaaaccgaaatctcaaattcgaacccaaatccaacttacaaacctgaccttaaccggaaatcagaatccgaaaacattttcccttatagcaaggtttaaagaaagcaataacaaaaccctatctctcgtctcttctcccccaaactctcgccgccgtgataacccaaagttctcgacgaagccatgtctaccggagaagaaggtcacatggcgatggcagatagaggctctagaaagagaagagtcggcgttaagaaaggtactaaagcggcgaggaacaaaaagcaaaaatcaaaaccttctacttccgataggtttaaggttacaatgaagaatcaaaagctatttcagaagagagcacgagattacaattccgatgacgatgaagaagaagatgatgaatcgaagaaacaaccagaagtaacaattcgtgagaagatcttctctgatgctaacatgggaccaaattacgaagagattggagaagaagataatgatgagaattcagatggtgaagatcatggagagattgaatctggaatcactaagtttgctactgatggatgtaatgctttcaaaatcgcttttaaagctattatgaagaagactaaaggagatgatacattggtgagattttatagcagattctagttttgagttttgatttgggaatatagtgttgaactgtgttggtgttgtgtgtaatagggcccagttttatcagcacataagcatcttattggagagaagctagctgaagatgaagctgaaaagaaagctaaaggtcaagctagaaaggctaaacatttggtatgagtttggttgttgtgttcactattcgtttgtgttcttgtgttttagatgatgatttatcttaacaattgcttttttaagattgctgagaagggacatgttaaacctggaagttatttggattctcatgaaaagattcttattggtgttgctactaaaggaggtattgttgctttggttaaactctctgtttcttgagattgtttggttttttttttttgttttagtattgactctttttttcctctccatgaacttgtggtatcacagtggtcaagcttttcaatgctgtaagtttgtttctatgtctatttttgaggtttttattctccggtagtgattcgtatgattcttagtttatgtttttcaaataggtcaacaaggctcaacatgctcagaagggtttgaatccttcaaggtctaaagacgctaaaggtaggcttagaaattgatcgttggcatgaatccactgtcttgttcttatcttctaattctcgttttttatcctattggaacatccatcagtgctgaagaagcgaagaaaagaagcattcttgtctgagttagggaaaacaaaaacagacaccaaggtttggcatagtctccatatctcttactctctctctttcattatgatttatcttgagagtttattccttagccgtttgatgcacgtagaaacaagttagtattctgtcttgatctagctcctatagagagtcacgaaaagaatcacctcatgagtgagtgatagatgttagttataaatcagaagtattcttagtaaattactagtaacaattttgaatgttcttaaagccttcaactttggatgaacatagaagcaagttagtattctgtcttgagctggcttctatagagaaaggatcaccttcagtagcgagagccgttagttataagtctaaagtattgttggttagttaactagtgatattctgttggatggtgcaggctcacaaatctgaagacgaagctcctgtttgggctcctctacgagataattacatgttagcaaacccaaaactgaaggactgggacaagaaacaggtatctcttcattcttatccacaaatctggaatcacatagcttgcatactgatttatactctttgatctgaaacttaaaattgaattgtccgcaggaaacaagcgagggagatgattttgccggtttgtcaggagatgaaagttatgaagactgaagagtttaaactagtagttaaacgagcaaactttaattttgcctttgtatcatgcaaattttgtctgatcaatatgaatgaattcagttttttgatagtgcaaaaggatcctgaaaggttgtgattcttgtggttacgcttttagaaaatacacttgttagtatcattaaccaataccgtaaatatagaagtgatgatactccaaacttctacatggttattatttatatgacgtaaaaaaaatatacattcgttgttttgccttggctacacaaattataataggacaaaatttaaggatcatgaacctgaatctgtagaagagtttctagtttcacagtcaagtcatgatgccaaatgacagaagaagataacaaactttatgcaaaaaatgaggcagaactgcagaagcatgcgcctttctaagcaagtatgacgcttttgaggcggagaactcgtgttccttttcaaccaataatggcttccagatccatcgctgccaattagttgcatctctgtcttatatctccactttgtgatctttcattgttttgaggttttatcctcagtagcttcttgttgggctcatcgggtcgtaatcataagcttcaccggacttgacaaaccgtcctttcacacgccgtctcacatcagccctttctttcctagagacataccttactcgcttgtcaaacctatttatacaaaatatgttaaatattagctataacaactttcaatgatgaattaaattcctttctgtgtgcgtttatacttacttgcgagccttcttcttttccttgtaacgcataacagcgttattacgtgttgttgcatgtgaggaagcaataatgtcctgtgctgttggatggcaccatggttgtggctcccttgaaagctgcttcatcgatgacgccccacaatcttggaaatctccagcattactttctccagtgatgccagagaaggagatattcgaatgtgctggctttgatgaatagcaaattattggctcggttctacaagtcatgaacgaatctgcagatgcattattgcttaatgctggctgctgcattgagccctgaattgagaaaacacacaaaagagcataaggatcacagaaaaaaatcatccttaactttagtgatactagtctcagatagaagaagaaggttgacaaaacctcatgagcttcatctttctcgaaaagacttccaattccaccgtgctcgaagagatatcttgatgagttgaaggctgaaccaaagagttcttcatagttctcaagagccaagtctacttcatctgaaatgagatttccattgaagtcatcctcacatactccaagctcctacaaccagtacaataataagaaacatttagacgctagttgctttcaagatcttaccacaatatgaagaaaatcatgttaaaataccttagccattgatgaattttctggaacactagagtgatccataccttgtgcagccgaactggtttcaggctgttctacattaattttttggacaccagatttttctcctgtgccatcttcatctatagtcatcaaacccattccttgctcacaagcggattcttcagcagaagagatattcaaatccatacagaaagaccatatcgaggataattcggcactcgagggacaaccagaataacaattgatggtttgccttttatgatgtgaagtagtagtagaattcttgccgtcatggcctgaccaatcacagttttgacatagagaaaccctctcatcactacaccggacagaagctggctgtgcattacacctctcacataccaaagtccgcgaatgacgtttcgatagagcattagcagaatgaacattacggtcacacgaaagacacaaacacgctgcatcagatcgacaatacaccattgatctttgttcaccacagaaatcacacatataacccatctttcaaccaatctcaaccgtcacactgaagaaagcaagctcctttcactaacaaagaatcaaaccattttggttagtcccttatatcataatcttagaaggaaaaaaacttaccacaatacattaaacaactaacaaaagcttgaaacttggtatcgaaagcaagtccagaattagataaaagtccaatctttttaaacatctcttcctcaaagattgtaacttcctatggatgagactgttctaaatcaaagaccaatcaaaagagacatcagagaaaccaattaacatcgcagaaagacttcaaatttcagatcaacatgtaccaatcagagaagtgagctaaaaaattatagatttcttattacaaatccgagagaagtgaaagaagatccatttcaagatcagtcaaaaaggattgagaatcaaagcaaccctcactaaaataacaagacaagggttttaaagagctcacgtaggagagatcgtcaagtatcttctgaagcagagacaccaaaaatgaatgacttttgaaacgaataagcgatgattccacaaatttcttctttagctgcgtgtgaagaagggtaaaaggagaaacagatggatagacaatgggtgggttgtgtctgcaaagggacatgtaggcagaggcatgtgacataagctgataattctagaaacattgggtaaaaagttcaaaagaacccattttctaaggaccctaaagatatttttatgagtatgaagtcacgcgctcgcgtgtagacaaagagccgtactcgcgatctacaaggcacaagtggaacttttccgattctggattctcaaaagcgtcttcttttagatgctttaaggcttaaaagcccaatcacaacaatagtctttgctttgactttacaaaaaaccaaaatatcttaatttgagagacgcacatgaatgaacaaaatatcttgcctaaaaaaggagatattatttttgtaggtgaaaagaaagagaaagatcaaatataatatctggcaaattggaaacgtctacacaaaaaaagatatttgtgtatctgtaacactgacacgcgcaggtcggtgtccactcttacttatattattcaatttgacaaaatattagtacattaatttgagttgaaaacttttaatttgaaactatgtacactagatagtcacaatgctagtgtcaagtatttcattttttaaagacttttcattctttttttgcttcatgtattttttttaaaaagtcaaaaccttaataggctaattttttaaaataaaaaacagctttaattgataactaaataagctaattgtttttaattgaatttgtaaataaatagacttatatatataatggcctagctaaagaaaactaactcatatccataagaaacttaccaaattttcttatggttattcgattaacaaaaagtatggttaaactaatacaaactttttgtttgcaaatatctgattgtcctaactcttgagcaatcgtttagttggtatttgggaccaaactaaggtagactaaattgttaatttctaattctattccaacttaatcaccaaaagagatttaaataaaaacacacacactatgatattaatagtcttcattcaagtttccaagcataaagaaacaaacaaaagtcatgcaatggtccaaaaccacttgatgctgaattataacgactcaaaggactactccctcctccgctatctccttcctccgcatcgctaaagctctcatctaccatcgctccaaccggaacaggcttaaacaaaaacaaccctgaactcgctgcagtctccgaacttgcaaacaaccaatcatgaacatcatagtagaccattaccggtgttctatccaccatcaccatttggtttcccctaaatttccattgtagattcttcacgttcacaaccacgatcccatcaacgcttatccacatctctggctccgctgctccattagagctctccaccaccacttcatgttcctttctttgttcgtcaaaccttgcccgagtcgaaaacgttttcttcccaaatatgctttcttttttaaagtatatgaacccttccaccaatgccggtcttgacttggtccgcttataagccttttgctttaaatctcccaacaataaaacaacctcttcatcagaaactactgccacgtaatagtctgacacgggttcggggctaccgtttccagccaattttgctgatcgaagatcccaaaagacctccacaaagtttccctctacgtcgaatgactttgaccctcttttgctccaaaactgccatggcttcacgagatcaatcttacaacaataattcatgtcattgtctaaactcgacaccattacggtgagggaatgattcatgagattcttggaccataaaacggtgacgtttcgaaagaaccctgccacatgagcttggtaaccgcacgtcacggtactatgaggtgaaggcgatgcagccgacttgagttgtgccacggtctttggattgtccgttatttttgcagcaaatgccgtaggttggcttccgatagacggcattcgaaatgacaacatctttattacaaacctcaatgggttcaaagttaaaaaaaaactaatcaactaaaagaatgacaaacactttgttcttatttttttgcataagaattttgccaaaatgttgatcttcctctattgtaaaaaatggattaggcaagatagttcaacttttcctatatgtttagtaataaactgacaaaagtttgagttcgtttgattcaatggggaattggttttttgagttttggcaagagaaagagagagagaaagaaaaactgagagattatttgatggaacaccgataaagaaggaatctatatttgacatcttaattaatagtggcaaaatcgataaaaatggctttatgcagttcaaaatatgtgtaacatccaataaatattttctttatttagagcttctcaaaacctccacggtttcagcatccatctccttctctcctctcttaagatgaagccagccatgagagacattttgatcggaaatgagattaggattaaaaatatgaaggtgaatctatcatcaacaacagcatgtaaatcatcaccctagactcctagtctactaccctaatccatgattatactaaaagacttaccactaatctcatggaatattaaagatctcgatcgaaaatgtaacaatagtgattaaatctaaacatccaattagagagagaaaatagagatttaaaagaatctaaaatgttattaattacctctaaaatgagtatgcatcctatctttaattttacctttgttttgagattatcagtgtcttttactcttgttcatattaagctgaaactatcatcatgtgtgttcttatcatatgatgtctagctagaaaacaccgattgacttgaatcggccaaaaactgaacgacaagaaaggaattaagatattatctactaaaatagatctttgtgataatattctattccaaatatattcgaatctgcagcgatattttccttaatttaccaaaataaaatagatctttgtgataatacattaaattccaaatcaactcgaatattaacagcatcatataataaatcggaaatggaaatagctttgaaagcggtgagccggtgacacataaaaccctaacttagctatatatttatatacggagagaatagaagagaagagaagagtaagaaagcttagaatttttttagggttgttcaagagaaaatcaaattcttataattctagggctcaagcgaaaatgatccaaagttgtcaccgttagtctttcactacgatgacttattgttgtgttaccaaagaaaacataaggcttgtgttgtctttggtaacgcacaacactaagccatcgcagttacagacaacaaaatggcacgttcaagaaaagaaaaaagatttcgtggttcgtagatataaaaagaaaacaaaaaaaaaacattaggctcgtagtggtggaacccgtatttggtgtaaaacctgttggatctaacccataaacaaagaaccgtgaattacagttgaaattgtagatttcgtacatgacaataatttgctcgagcatcactttcatgattttgtggtctgtgttgccgtatttgagagcatacatttcatgttcgaaatctacgattttaactctaatttttggatggttctttatttcaattacagagggatatatctgtgtagtattcatactgtttccaacttttttttattttttttgttgtcttgttcatatcaagctaaaactatatacatgtagattgatttctctcctctcatgtcttagtaagagaagaagggtttttgcttttgtgagatttcaaatcaaatgcaaaatctgtgaatagatctcccatgatcacattatcatcctccatagcagtgtctattagagcattttcattggtgacctttttagagatatctttactatagtttattataaaaattaacattattttaatttgaatcatttattagtcatgtgtgatgtttgtaaaagtaagaaaatgtctttgcagagacatgaaagacactggatc

SEQ ID NO: 855 - DNA, 36824 bp, Arabidopsis thaliana
ttcctcctaaaagcactaaataacattttattttattttttatttaaaaaaaaaatttaaaaacactgtatttttttgtgcaatgaggatggtctaagaagctgatcaaagaaagatgaaaagaggtacaattattttatatactatctctgtcatgaatcttgcccattataatacattaagagaagcagttctttttattcttttcatgctctacatgttaaggtcagccaatgaaagagcacttgcactttcgaattttgatgaagagaaaacgcatgaacaacgggtctgtctaaactcttgtatgccacaaatatttatctaaagtcttcatcccaagcaaaccatctaatcagtgaagactcttataatcacattaaagttttcttcaaaaaatcatatactggtttttcaagacatcgacatcaaagttagactcaaatttctcacagacatctcagtccagcttggcccaatatcatcaaatcaatgaaatttcagtccagctgagcagatatagttggaaatttattaaattaatgacagagagtttacaaaatttagacccaaatgaaagaagaagatagctagtatacaaaattagttaataaattaaataaatatgtgaaaacacccttagctcactggctaaagggttaaaggtttgtctaatttgtcgttgtaaatgttttaagtgctaagtttccaacattccacgtattatataacataaggattagtcttagtcaggactttagtttggtatcttcgattataaatttttttttttttgtcttgcataactcttagcttacgcaatgcaagtcaatcatctaaatatccaataattgtttactgtattttcttttattatttattatttatttgtaaagtactgtattatttttctgacgttgaccaaaaaccacacaaaaaaatgcttttaacaaagtaattttttatttttattttaaatactttaaacaaagaattgtgaataagactgtaggaattagcaactagctttaaagaaagaagagttatggttttattagcttttctttataacaaactgaaaacgaaatcacaactatcgacaatgactaattgatgagaagaaaagaaacaaaagaaaacaaatttcttcagactttgtattctaccaaacaagaaatctaagccaaaacattcaaagcgatttctcaagcaaaactagaagatgaaggtaagtattatatggtttatgtatgtgtttttatggcttctttgattgacgttacaacatatcatttttttagcaaaagatcttgataagagtgactatgaccgatgacaaaacccgagcaaaagcaatgacaaaagcagttcagtttaaaggtaagaagacctttccacaaaaaagattaccaaactctgttggatctaatggttttataggcgtgtcagccgtggaaataaaaggcgatcacaggaaccagatagaggtaaccggcgttgaagttgatatgatccctcttatccaaatactcagaaagaaggtagcgttcgcagagcttgtgagcgtgaccaaagttgaaccaccaaagaaagaagacgagaagaaaggaggggacggaaagggtgcagagggaaaaggcggtgaccaaaaaggtggcgataagaaagggccagatgacaaggaacctccggagccaaaacctgtgccgtgttatccatggcctctgcagggatacggtgtaccttcctcctttcctcatcaaggatacggtgtgccttccacctttccccagggagacggtgtaccttcctcgtttccatacccgtgccatccggcacatccctacaatgatataggggaacccgtttacaatcacgaacccaattgcaaaatcatgtgaaatgagttttacagaggaagattgatagagagagcatgatgaccaatgtttttttttttattgtaaagaactaaagaagcactatgtttactatttagtcatatgaataaagctctgaggccaccaaatcaatttactgctatctcaacatgctcttttaatctttatgcatttcctagtaaatatttgtatgagcacagcaaaatcactcactattcgaaagattttgcacactgttcaaatgacccgacccaatcttggcccagaatcttctcactcactattcggattttagtttaggtataatcgtaatctttggaattttgaatatgatatcttgacttgtcattgtgcaataatgttctgactcctccagaataatcagcattttgaatactgtgaaatattactaatttaatattaaaatattaccactagatttccgaaaacacccccattactcttgctccgcaacggtaaacgtaacgtactcaaaggggtgttaacgtaatttcaactgaaaaaaactaacggttcccgagaacccatcacatattaagaaagaaaataaaaaagagatctttttcgcttttccacaatcacaagacaaccacaaaactctcactccaaaactctcaattttgccttcctttgatcgaatactacaatggcgtctgtatctgcaattggagttctcaaggtacctcctgcttcgacttccaattccaccggaaaagccacggaggcggttcccacgaggactctttctttctcctcctctgttacttcatccgacgacaagatttcactcaaatccaccgtctcccgtctttgtaaatctgttgttcgcaggaatccgatcatcgtctctcccaaagccgtctcagattctcaaaactctcaaacttgtctcgatcctgatgctagcagcgtaagcatcatctatcttcttcttcttatctttgttgtttaagctttgaggaatgtagttgagatcaaattggaactgttaattgttgtcaatttgcagagtgttttggggataatcttaggaggtggagctggaactcgtctttatccacttacgaagaagagagcgaaaccagctgtgcctcttggtgctaactataggcttattgatattcctgtgagcaactgtttgaatagcaacatatccaagatctatgttcttactcagttcaattccgcgtctttgaatcgtcatctttcacgagcttatgctagtaacatgggaggttataagaatgaaggattcgttgaagttctcgctgctcaacagagtcctgaaaaccccaactggttccaggggacagctgatgccgtcaggcaatacttgtggttgttcgaggagcataatgtcttggagtatctcattcttgctggggatcatttgtatagaatggactatgagaagtttattcaagcacatagggagactgatgctgatatcacagtagctgcattaccaatggacgagcaacgagccactgcttttgggctgatgaagattgatgaggaaggacgtattattgaatttgctgaaaaaccaaaaggggagcacctaaaggccatgaaggtactataaactttacgctacttctctgcttcatcatgcggccttgtaaattaaaaaatctcgatttctttgctcctaggttgacacaacaattctaggtcttgatgatcagagagccaaggagatgcctttcattgctagtatgggtatttatgttgtaagcagagatgtaatgctagacttactacggaatcagtttcctggagctaatgactttggaagtgaagtcattcccggtgccacttcccttggactgagggtgagtgtttatattcatgtttacaacatctagtttgtattctgatgctcaagcaagtctctgttactctatggtttgctttcggattcaacagcttcttgtagctgattatgctatgcagaaggcaaaacctgctaactttgatcatgggcactgcaggtgcaagcttacctatatgatggttactgggaagacattggtactatagaggcattttataacgctaatcttggaatcaccaagaaaccagttcctgattttaggtacagtaaccgcattactacactctctattgtatctgaatgattacttaacttatctgaattcttgatgcagtttctatgaccgttctgctccgatctacacacagccgcgttatttaccaccgtctaagatgcttgatgctgatgttactgacagtgtcatcggagagggctgtgttatcaaggtacaatcaaatcgcttctgttcgatatatgctttacggacatacgaattcaccaatgtcttatgaattttgggcacagaactgcaaaattcatcactctgtggttggactccgttcctgcatatcagaaggtgctattattgaagattcgttattaatgggagctgattattacgaggtaaaaatctgtcttgcaatcaatcttcttgctaagtaatgtcaaccttttgatgatggtggtcttctttgatgattgtttgcctagactgctacggaaaagagcctcttaagcgcgaaaggaagtgtacccataggtattgggaaaaactcgcacatcaaaagggccatcatcgacaaaaacgcacgtatcggtgacaatgtcaaggttagtgtttatatttggaacacacacaggatgtttagctttgttcatacttgctctgctcttaaaatgtgtttgttgtggaccttggcacagatcataaacagcgacaacgtgcaagaggcagcgagagagactgatggatatttcataaagagcggaattgtaacggttatcaaagacgccttaatcccaaccggcactgtcatctgaagtacacataatgctcctttgtttatttcttcatctttctaatgccctatcaataagttttctttatggctttttaagccccaataaatctactactagttgtaatgctgcttacgaaagagattacgaaatcatgttttcacaataccattgtctcttttgagaaaaaagaagaccctatgaatttcactaaatttatcttttgtagcttattatcaataaaattaagtttcttcaagtttattataataataagtagttcaacattattcgttttaaagatgttaaaactataaaattaattttaaatagatacatatatatatatatatatatatatatatatatatatatatatatatatctttttcgaaaaaactaacaaatgttagttttttttttctgttaaagttaatttataaacctacaaagtattataattaaatgtgattttacaaaagaatacatgttaaaaaaaatattaatatacatgaataacacacattagagaaatgtttgcatccaaatgataaaaagaaagaaagtaaagtgcactctagacaagaccaccaatattttaaaagggccataaagaacggcttgtgtggtttatttatgccaatgattggcatttctattcataaaacaactactttttggaatcattcaaaaaatggcaagttttcgtttgagtgatagttgagatgcattgagcttggagggagctgaaaagatccagaagagtctttttccaactcctcctcctaagattgagtctgattttagtgagtcggttgacatcagagattactctcagtttgggaagatttttttgaagaatgttctacggtgatatatgagtttgacgtcttcttctctgatcactctctgagctttgattcctctatgataatcatgactcctttatttcaatttccttttcaccttgttttaaagttcaaattgaattcatcattttctctacttttcaacatatttcttcaaaactcttagagagtaaaattcctgagagaaagatgggaagaaccaccagggttttcaagaccttccttgacaaacatacatgaaagtatcacctcatggagacttgtaacaaaaggcaattttatttgagatttgacccccctaacattagttttttatttatttattacatataaggttaactacaatgattattagatgttttggtacaaaatttccaagttgacccccatgacataccacattgttacaacgttaataaagttgagaaaaacacagttcaaaaagatgttaagatcctctcatattttctttgctagataaaaaattttctgattcgtccatgtactcttttatatcatcagaagcattaagcccagtcaaggtttggattcggttatgaataatgaccaatacgtaaaaaaaaattcatttaaatgcttacatgcattcagatatgaacaacaaccagaacatattgtatcaacaataaccagcaagtgatttaaaatggagtagaaatatgtttttaaagaattatacttctgctttagctccttaaagaattatacttctgtttccaattttattcagactaaaacatctttataataaaaagacagagaaacaatttgaaaaccaaacctccagaaatctttctttcttataatccaaaatggagcagaatgaaatatatctttagaaaaaatgaaaaaaaaatatgtgccatgtctaagacttatgaaccatcagcgatacatctagattgtagatttctcatcttcgctaatctgctatgaagcatcacacaactgtaacacttttaactaaaaaaacaaaaactactttacaagatttaagtattaatattttattatgtaactaatattcagctatgaaaatgctccagtagatgataagcttatatatttatttttattttcttataatgataaaattagagtttgattcttcaacagtatttgttcatgtttaagtagtaagcaatactccttatccaccacacccttctttttgcgatctcttcttctttgtactcatgactcggaacaatagaagtgcacattaacacgtcatagacaggtgaatgatgcgaagttctagatttctctaacaaaagaagtgctaattcatcccgatgcacattaattttcgatcctgtgtctaggtcattctctatattgctttgtgccacaaataaatgaaatgagttattaggaagcacgttgtggtgaatcttaaaagatactaggtcggaacaatgggacaaaagtagaagcttggtatgattatatgaacgaccatttaagacttgttggggagttttatatatacgatatatcaaacaaatgaatgaaatagaacagaaatattgaattagacatagaagtaagaagagtgattggcgttgttgtctctggagagaatggaacgtgcctcaatgaccgaacgaggagcttccatatccttctcttgtagtgagttcccttgtagcctctgcatttctgatgcgaacgtgtcctcaattatctgcacaagtgatcacaaactcagtttcaacaccaaacacattctctaattatggtttagtgtttaaggtttttagttttaccccaagagcatagtaagagcctttgtaccctacttcgttttcctttcttccttcaagaaacttcaataccacttgtgccattctatcccagaaaaggcggcacgaagccacaaatatctgacttgtgaagacatcatgcagatttgagactgagtctgtgatttgtaagcataacgtcttcatacgttcacggacttccacttctctctcattgtcttttatctcttctaagattctcttcagccttgtgtttttgtttgattgcgtctgaaacatccacacatacagagagattgtcataacatggattcaaatgcagaagctacgaggcgttatatcagttcttacattgctaacgagtttatcaaccgcggcctgcatgtagtttctgtattttgtcctgagcaagactgtgataacattcatctgctccccaaagattaacttcttgtcttctacaacaggaagacacgacgcccattgtctcaagatatcctcaactctgggatgtagaacatcaagaactctctttattgtgttgatgaaagttcccagctgcatttaacaagagagaatgaatgatgttccaacacaaatccttaagtcagaaaatgtaaaaacttctattgtacacgattgatgagtgactcttacttgagttggaagagagtagagaaccgatgattgccttcttgtcagcttctggacatgcatatttagcctctttggaatgctatcttttaaaggaattagaatgtcattgtattgcttctccagtgatttaacaatggctctctctacaattgaagcagtcttccaaaagtgtagatgaaaaagagagtgaaacctaagttagtctcgataattatccggtaggcggcaaactaatcacttataaatctgtagcttacattttccaagatcaatgtgtattgtggccatcgactaatcaccacttcatactctataagagaatcttttattctctcatatatgtcttcagcaaatggggatgttgagtgatttgttattacaccagaccatggaacctgcaaaaacaagccatccgtgcttaacagtcacacgataggtttttttattttaaggatcaatgcaaaattatcaggatggttaccttttctgctctgcatcggtcaagtagtctaagttccatatcatgtatccaaaccattatgtagttgtggaacaaccccctagagtctacaccaccatgtactgggctgtgtaatataaaatgaaacggttaaagagaaagaatgagttcccacaaatattgtgattgattccgaaatgataatgtcaaacctgattccccatgaatcgaggtttctttcaaaatctgaaactgctatgagaagctcattgacatgaggcagtgggcaggatggtggaactgctgacagaaatgctctgagccggtgacacagctgagtgctgtatacgacagcagctagattcgctaggtcgattgagcttgaacgataaacaaggtaatgagaacataagaccaaatcaatatcaagactcagagataatctcaagatgaaaaccagatgacaaatgtaagttctttgttcggattgaatcattttaccttgggagtacatgctcattggtgatctttatatcagcctctatctcattgcttatgattagaaaaagattcttcattttcaggtaggctgtagaaattgtgacggagtccaaaagaaaaccttcagagttgcaggaaacatactcatcggtatcaaccatgtgcttccgacacctcttctttgctgctgtctgcagtaggttttccatatgacaagaaaatcgtgaacatcatagccttgatatgttacaaaatcaagacaacttaaaggtatgaaatgtgtatactatttgaaaagaacaggtttaaaggtctcttagtggtagactttcttaatgataggagaacatatgaaggttgttgaaaacttgaaatattttacctggaggtaattcttcaaagtttcttgtgcttctggagacaatatatcatgaaggagggtaaaaacctgaacagctgaagaaagtgctgttgttgccgatacttgcaccggacaagatatgtctgccaatcctgaagggaagttttcatctaaggacttgtagttctcaaaaacagttgccatgagtttttctatctctatttcacaatccattaagatacttttctgcaaaaatagaacaagtcttcaataaatattcctagggagccatgaagataacaaaaccagcaaatttcaaactaaatgcaataattcgaatccaagttcatgattttggtgagatgtcagattcatcaatttacaaacaaaatgggaattacctcttgtctggttaaactcttctcacttcgagccattaggatgggcacaagtaactcatgaacaagttgtaagcaggtttttgttggagttgccacattcattacatgtgagagatatctgaaaagtttggtgcagcatatttgagctaaattccagacgaattacaatagatacaaggaaatctaactgaaatatctttatgaatacctcaacttggtatatgaatcagaaactccataataatctgcgaattcgcttaacagccatttccaagatccatccagccttaagttttgaggatggaatttttgggcacgtgtagccgcttctagtagcaaatcatatgctagtgtctccacaacaggtgcgttctagaatatacagaaatgcaaaacataagttaactcactgaacaaaacagataatgggagattgtgttggagaaagaacatacctttatgtgacagtcttcatcggacgtggttgtgctaccaataaagagctggatcttgccaacacattcttgttcaccatggtatataggccaccatctgacattatcattctagacaaatatagagttttcttcagtatatctagttaacatattctcagaagcaaaatggaagagatttaactcgggaaggacaactaaaggcgtatttaccggattttcagttaatgatgtgatagaaatcattgcttttccttgaactgatttcttcttatcttgaacttctatcataagagcgtcgccttcggactcaggaaagctgaaggagcagttgtgagtaaaactctatgtactcagaaaactataaaactagattgtggtactttccatgaaagtttcatttatttaaacactatggttacatgtaattcaaattttctcaaacaaccactagcatacacatttactgattttcaatagaaataaaagaacttacaagacatggtaacttccagttcctgactgcaaacaaacagaagatccttgttcaatttgaccaccttctgctgtgctcttcatttgaaggtagcaagagaattgttctgcaggtagaataagtcgtgtcatctcatatcaataaagggcttatctaacaaatgttatcttccatttagtaaactgtgtcaaaccagtggacaaatcacatattaaccgcctaagaaaattaaattcataaccaaatatcaaaagcaaaccttctgaaactgctgaaagggtagcctgtttaatagaagtcatcccagtttttacaagtgatgaaacttgtctgcaatactctgcccccattcctatttgcatattcattaaactccgcagcgaatctgtgcctctaagttttcgctgtggtatcaatcgaagtctctttactaaaacaataaaaaattgaagaggtataaatatctgattcatgtcaggcagctacaaaatcatcagaaaaactgatagtttaccttccacccttaactttctgacaacgtttttagactttaaggatggctttggctccgctttcacattgttgtttttctcagacgatcgtacaccccgaggttgtaagagaaacttgtgcaaactataacaacacataaacaaaaaggactagttcaataactcaacataagccaaataagtaatatatctcagaaaccataaagaaacacatgcccctacccaaatgcacctcgaagaatacgacactcatcacgcagaaactcagacgcctcagtagaaccctttgaccattcatacaaacatagtcttatacaagcatcatatgccaaaagactttgccaagcatattgaccactgtcattagaaacattttgtaagaaaccataataaagttcaactctttcattataacctctgaaataaaataagtactgaacctgatactatggcactcttctaattcatctgagcaaatttccgagattttcgaatcttccacagttttactgtccttcacactacaccaaaccatgattaaacacatcaaaactagtccgcagaacgaaattacaaaaaatctcgttaaattcggaaaatacctttcaccaaattcttcaactctatacaaatgtgaactgcttctcatgctttcttgcttactactctctactcctgcttctccacaaatctcatcctcaatcttctgaatgtccttttcaatctctaagctgatgctatcttcttgtccactttccattataggtggagcacttggagttcgtatatcctctaaatcccaatacaccgaaccctaaaaagaagaaatttaattataaattaagctcaatatctcaaaatgagacaaaatcgttaccttagaactcagagtatgtggtcgtcgttcactagctggagttgaattcttcaatgcgaatctccgaagctctaattcacaatctgtgactcttcgattcataaacggaacttcaattctcagattcttatctttcaacattcctctattcaatttcgaattcgacttgtcaccaaacacttcttcttcatcgtaacgtctcccaatcacttcttcttcctcttcatcttcaacatcgtaatcagagaataacaattcgtttccttctccggtatccgaaaccgattcgatactcatgttatcgtttgattcatcatcgttaagagttggagttacgaggattggcgatgacaggtttgagtttcgtttcagtggagattgtgaaaaggtagaaggaggaagattctcggagagtggagatctgatgcgaggtcgttgaagttgagccatggagttttttctcagcttggttcgataatgcttgaggaagctgagaaagagagaaaggagaggagcggctgttttggaaaaaaataatggcaacggctagttttgacactgttgccacttttcgtattattgaaggatacttttttccgcaattaatttattaaattttgaagacttttaaacactgttgtcacaattaatttatttttgtcgtttattattcacaaggacttgaactcttgaggaaatattttagtcagattattatttttgccgtaagaaaacaaaattgtgacatatttttatttagctatggtatgtatattatagtattgtacaaattgtcttgttttcttacaaagtttaaacttttggttatctaaagaaattctataaacatctaaattcaaaaattggaaattatgatataatttatttatttttgtcaaaaaaattatgatataattatattaaaaataaggtaacttgttacattctttatttcaaatcaaaagttaaaatcagaaacaaatatatgataagaatcatgagaaaagagagatatgagatagtaatacgagtatttagtaaatgattaaattgcggtgaacaaagatttaattcaatcaattactttcggctataattagcaaaaggtgattgttggtgtcgatcctgatcgaactctatgatcagatccacccaaagattgtcacatggaccaaaatcaaatgaacgagtcttcgagcgacatcaaacgaactagagagtttggaaggcggggtaaaagtaagaagagctcaggtttaattgataggtcgagcactcgaaggtcgaagaagggttcagttgaattcaaataaagatgttacggtttataccttattattttggattgatttaaaattttagctttagagtttagatttaggtgttgtaatacagattatttttgtttaacttacaaaatatagaacacatcaaatggatttttttctctataccatatacgtctatggttttacgtagaatgaaacattcatccaaaatcacaatttcattttctcagataatttttgtaggttttacaaatttctcaactgatagcacatgctaaaatttatgtgtgttttagtgattgcaaaatttaataaatttgtatgaagagattaaactttaaaagaaaatgaaatggggtggaccagctaatcgcgttgctcaatatctccaactacaatcggctacaactattcattatccggtacaatacacattataagaaaatcaaaattccaatattattaaattaaagaggttttactgaataattttttcaaatgtagaccattttaagaattctttcatataagtatataacaccataaaatttcaataatatcttgttgctcgagcgatgtccgtcaagccaagttacatggtcatctttttagaatccttaacgcgaatacaagaagtggaacacgatattaatcctaaacattggaaaactatgttgtgtggacaacgcttcttacaaaaggagcaaataggtctggacatatggtgattattgggtaaaacgcttaccttgctactgcaatagagccaaaatgaaccagacttcatgtataggtccaccccaagcatacattcaatgtgaagggtgacacaacaatactcatcacacatataaaaccgctcctttgggtttatttttttctcgcaaacttcacaccaatacgtcatggtacttgtttcctctccataagaaagagtaagcatatgcttatcgtgcttatacctcaccttttgaggtaaagtagcacacttgaaacacaaagcgaagtcgcactcaatgcaattgaatgtttcatttgtggaacaatgtcctaactctttgcaaacacaacatcttcgttcctctcctggtttcgatgttaagaacaaaggatccatatgacttgcatggaccaatggctcggaaattgtggcacactgcacgtgtaccttaaaacgacattctctttcactgcactcatagaagaaaccagttgtgcacctccaagaacaaattgaacatgatttcgtagcatccataacaaggtcagatcttcccactagagtaagcagatgtggatgtactgggtgatgtattttgcgagacagttttgcacattcttcatgaagaatgaaatcacattgcatacatgagtagaagttaccgaaatatatcggagtgatgcatgcttgacacaacttattctcgttgtaatctctgtcaatgttctcatcaagtttcaaatgatgatggtcatgactgaaatgtcgtatgattccatctcttactgtcacaaacggctcaatttttttgatgtcttcttcgggctctccctcgagttctttaccatcccacacattgctctgtgtggcacattttgaatgtgctgcataccaacaaccgtccttgttgcaagaataacccccataatcattatcgatctttctacgacaaacaccacaacatcgaacttcttggtcgaaagaaggagtaaaatggatacgatggaaatgacgagatatccttatgacacgtggtaagctgatacacttttggtggaccacaaagtcgcaagggggacacatataaaatggacagcttgaatgtgtcaaggcacaaacgttgcaagttaaagaagtctttcttggaaattgagcaagtgtatgctcatgccacttcggttggtccaaagacaatactcttgttctctttatgcaagcaatattcatagcataatcgcaagccgagcaataataaaatacctcttcgagatctttatcgcaacaataacattccctggttgtgtccccattcaacaagacaagttggagggaatgttttggatgaagagtatgtttgatcacaactggagccttttcatattctccatggttctcgccattgcaagtttggcagcgaatatgactaacgccttcttcagatatccagattttctcccagttaaaagggagacacttccacttgccattgctgctccacgagacttcttcgtcaatcacttgaaattttccttttttcaattttacttgtacttgagggtaaaggaaaataagccttttccactctgaatacatagagacgacgagtgagaatatttgatagatgagtgatatgagctccggctgtggctcgagactcaatgtttcaccaacgagggaaatgaggtaggaatcgagactcactcttttaaaatagcggaaaaagaggtcgggatctgcctccaggtcgaactctatgtccaggtctgaatctagctccgaaagctttatgtacacatatgtgtccgagttcgaatccatctccaaatgctctatgttcaaatccatctccaaatgctctatgttcgaatatgtgcccgagtttgaatcctgcttcaataactttgtcccggtatctatttcgggatggcaatttcgatataagcctcgtgggactcttagtaaacttccagcagaatgacgcaattccgggtcttgctcccgctttaaaacgctgacagatttgacatgagagatttctccagaaatgagagatatgagcttccttagcggatccggctgggaacccaaatccatagagttgaagagcgagactgcttgagtagtgagtgacatcatttccgtctccggctgcgcatccaaatcaattttactgaccatagatattatttgaggaatgagagatgtcttaatggataaagatattggttgggagattagttgagtaatgagagatatgattttcaacccaagattaatctccggctccggctccggctccggctccggctctggctccaaatcacgaactaactctggctgtggcttccaacagacgacttcgtcaattatttgactgatgagtgatataagctctggcggctccggtgttggactacataattctcgaatgagtaacacgaaaaactccaagtctggctgtgaattcgtgtcctgctccgaaataaattccgtagagttgacgagagagagcttgtgtgaaaagagagctatgagcttccttaacgaatctggctgggaatcaaaatccatagagttgaagacatagattgcttgattagtgagtgacatgagcctcgaccccggttgcgaatcgaaatccattgagctgaccagagagattgtttgagtaatgagtggtatcatcttagaaatagaatcccagtccggatctaaatatgaatccggattcaaacccacgctcagactatatatttgaaagatgagtgatttgagctctgactcgggattcgagttcgactccatagagatgctgagagattttttgagcaacgagagatatgagatgattatttggcttatgtttctaaatgctaatttttatacaaacacatcaaaatatcacgagacattctcaaacttacgggctgtccaactacaaagtcaatgatcaatttggagattagatattaattatcccaatactagtactataatattattacaagagtttagtatacgagtttatgcactacacgttctcttcataaacaaaattgttgaaataatctttccaatatttcagttatttaccaaaagcattgaacggtcgacttttaatttaatggcgccatggactttgtagttggcggatcttccctcattatattatatagatttgaaaaagtttacagccgtacaattttaaaatgtataggtcatctgaaggcagagtcaataatcagtttagatataaaagatgggctatatgatcgacagtcataccaagtataacccgtcatatggttacgtatcccaactaggcaactcaaataatgtatttttacttattctaaaaaaaattgcttggtgagataccaacatagtagtaaccatcaatctgattactatattgatgaagtttttatggaggggagattgcttggggaagctgaaaatgataaatcagaagaagagagaggcggcaatttcaaataaataaaggcaatgattagttttgacgtagtaccaaccactttcgtataattgaagaatattttagtgacccttaatttaggaaatgggtacaaaataaccttgaaactaaaaatacttaagtaaatactgaaaatcaaaagcaaattcttctactaatagaagaagatgtgtccacgtaagccaaaacaaaaatactcaaaacaatttcatgtcatttgttcacatcagtttacagtaaaattctataaattaataatgttgaaaccataaaattttattaatatataaaaatattaatttatagatagttgaggctaattctattagcttgtatactcatcgatatatttgtaatctttttttttaatttaataaaagacgtttaaaagattattatttttgtcgggtttagatagtttgggtcgggttgggtaatcgggtaattatagttcccttttgtaattggttccgaaaaaccccgaattaaatatcgtgtcggatcggttcggttactcactcaagatgccggaatcatttacacaatgaaaacttttctttctccggcgatatgcttcgatcatggtcgatcgcgaaactacaaatcagtaaagtttattcatccgattctcgcttttgcacacacgttctcttcaatggagttgtcagacgacaattcacgagcactagcggcgaaagaagaacagtgatgagcttcggtgacggaaaccttggcgctcttggtctttcatcatcgtcgattccaggcatgggaatggacgcttacgaacccaccgtagtttctaatttgccttccgatatctcttccatatccgccggacattaccattctcttgccgttacatctagcggtgagatttgggcttggggtcgcaacgacgaaggccagctcggtcgaatcgtaattgattctaggtaaaatctctacctgagaacccaattttgaattgatttcatcagagtaaagtagtgattgaacttgaatttgataggtcaattagtgagaatactttaagaatcattaacatgaatttgctagtcatgatgttatttaggatttggtgggtctcttatgctagtaatgctactatacctgatgttttcatgatgtgattagtagagattcaaggagtgaacctaagagagtggaaggtctagagaatgtgaatgtccaggcagcgtttgcgtctggagttgtttcagctgctattggagatgatggctctttgtgggtttggggaagatctaaaagaggacagcttggtcttggaaatggtatcattgaagctcgagttccttcgagagttgaaaatttagctgcagagcacgttgttaaggtttggataatcaagtctttgtataatcagctttaaaatgattttaagttttcataggaaggggggtttgattttgataggtatcattaggttgggggcacgcacttgcgcttactgtggatggtaaagtttttggatggggttatgtagctgatggaagagtaggcaatgttggacttccacttgaagcatctctgctagattcaattacagatgggtcgatgaaaggtcaccatgctgctggtgatttgaatcttgaggcagctgaaaagaaggttgtggaagcaatgagtaaagagaacgatatgccaattgcttgggaaccttgtctggtggaagaaacgtgtaacgagaaggtagcagatattgcgtgcggttccgatcactccttgatcctttgtcgtaagtaaatgagaccgttttacactatgggagagtatatattaaacaaaaagaggattagttttgtctgataggttttggcttatttcagatgatggcacacttttgagcgctgggagcaacatctatggtcagttgggtcggtctaaacaagatctaggaatgaaacctgttgatataactgaatctccgatctctatagcagctggtcttggtcattcactagctatctgcaacaggggtgaaagaaatattctctcatggggttggaaccgaagccggcagcttggtaggggaaaaccggaaaacctgccaagagaagtagaaggtttcgatggggaaagtccagcttcagtatcagcagggcgtgtgcattccttgtgtgtaacagagaaaggagaagcttgggtttggggttgtgggaagaatggtaggctcggtttaggaagctcgagcgatgagcctgaaccgatgttgttagaggatgtagagggttgtgttcttcaagcagtcgctggctttgatcacagcctgatcttagtggctgaatagccccacccaatatctagtaaacattgatcttgaaaatttatttcatgtatttacgtgcgatcagttgctttttaagtgaactggtgaaataaaattagaaagatcagcgagtaacaaaaagataatcagtaatacatcatgttctctagaaactgataccaataatccaacatgttattcggtatcacaacatttcaaatcctaacaaccaaatttccggttcggtcggttttttattcggtttccgcttaacaagtaaggtgataagaaatgcacgcgctgaaagactagcgcgtgaagagcagaggctattcgacgacctcgagacgcagagagatctccattggaaggagatgcagaacccgaactcatcatcttcactggtggattcaacctccgcccctaaacgatacactccacctaaccaaaggttcattctcgtcttctctttctcctttgctttcgattgatttctgagattccttctctgcctcacaggaaccgttcctcgaaccggaggagatcaagaggttcgttgtctctctcttcttcgattttgtatagcgaatttataggaatagagcttatctcactgtatagagagacactctgtttcactttgttgctttgtgtgtaattggtgaacttaagaaccatttttatagataataagattattgctaaacctgtaattttttgtagtcactgtattgagaaatgtggaggtttctgtaaaattgcattctcttgcatgtagaagatcccttttttaagaatttagttagcaactaatagaagctttaaccacttttgcttgtaatgtgtgtaagtgtgtgttcttggttaaagggtaaattgagctgaatttgaatggaacaggaagcttccatagtaatgagggagagagcagtcagtctgttgctgttggtttccagagggaaaactcttctccaaagattatatcagtagagggttgctctaggagtgaagcttttcagcttctcagtgatcgtatgtattcttacttcagtctttaatcatcttatggcttctgtatcaatatcgatgtctgctagtttaactcgactagatacaagtttagtatttatgttgctacggttaaaatagtatgaatcaggagattgataagagtaatatcgaatactcatgctaaacattatgagatgtggcaaggggtcgagttattgagtctggtttaggaccttgggagattgtgctttgattcggtttgtgttttacgattcagtgagaaatcaaagcaagtttcagtttctgatcctagcagagttctagtgccaatcttttatgcaagtacttgatttgtatatgtgtgtttttttgtctcattgtaaagaaattgactattttgattgtaggttggacagctgcaatgcatctatacaatgaccctagtgttgatttgtctggtgagtttaagaaatttgtttagtataaaagcttaaatctttccgattgtttggtataatttgataaaaaaattgttcctggatatatgatacacctatgtccccaccttgatcttgtatttatctaatttaacagaaagaccgatgatgtactatggtggggatgtgtggggtaaactgcctcactaagtgaagtcgtttcttgagcgggacttgaccattactgatattggcttcagcaaacaaagccatcaatgttgccaacgagttacagagccgaattcagtcgtggattggctggttataaggtctccaagttcttatcattgttattcctgatgtcaaaatctaatggttataactctatgcgacaattgtgaaacgctttcaaccttaatttttaagattttctctatctattcattatccaaatcttttttctaacaagaattaagtggctctcacaagttacacgatggcatgaacaagcctacgtaagatcctacaagactgaaaagctctaaagactaaactatcctgataagagaattaaacaaacacaaagatgcttgaagccggagcgatttggggtttaacatgcacgatgatgtctatgttctcctggtcaatgtacaaacagtttgtgctataccaagactatttggacaagtgtttttacaagataatccgtttggtctcgaattctgttcatgtccaattcactgaatacacaggagctagacggtctcgagagaagccaagcttatgatgcgatacgcaactacttatcctcaaaatcaatggcgtttataaagagactagtggccaacctcgttagtaatttagtttggacgaccacaaggcagttgaagatgtgttcaagatgtgaaggtgaagtggtcgtcaagtgtgcggaagagcgagaatcaatctgactcgaacaagagtaggtacttgactctgagtttccacaatcggcacaagagagatgatcacaactacttatctagatcatgtttcgaaagaagggaaagaggttggatcatgcttcgaaactttattttgccaattccttacttatttagtagatgacacagcaacaaaaagccatccgaaagacaagcacaaagtacgaaacctagcccaattagagaccacggaccgccaagaagaatggggcagatatataattgacaaagaacaaaaaaaccagaaaaaccggaataattcagaaaatacatggaattctatttagaccggattagtcttcaaatgcaaatattatcgattttgggtcagggctgttttctttcaaactaaatagggccggtcagctcgaaccaatcgtggttagcctgtggggaaaattgcgaaccagaagtagcaggtgaggtcggtcagaaacagatggttctcgctacctccacgaagtagcaggtactcttctttctcttttcaaaccctaaatcatcttgaaaccctaaactttcgatttgaatctttcggtttctgatatcttcaaattttcaattgcaggggcttacttttcctgacgatgaaacccaaatcctattgttgttaatatcaaattgaataatcaaaccaagatggtgaatttgttcttatctgaaccaaagtggaacgatgatgcccagaaaagtagtaacatcaatgttattttgcctctgttaaacaaattaggctctcaaattcaatcattggtgactcatggagctcgatcagaagctaggctttggctttgtagtgctctttccactatttctatatctcctagcaagcaacttaatatcttcatgaagttattgagatcaaaacctagaaagatgcagtttttatctcaggttttgacaatgatgtttgagaagagaccaaggaaacttggatttttgttagctaaaagaagttatatacttgagaagttctttgaaggtaaaagagtctttggtttcacattgtgtatttacattatcttaagattgtgcttgatgttgagtttttgatatttgtagggaatcagaagcgtatactagagtggttttctgagtttgcttatgatggtgggtctgatcacaagagaggtgcaaaagcattggcgcagtttgcgtttgcgaatcgggatatttgttgggaagagcttgagtggcgaggtaaacatgggcaatcgcctgcggttgtagctacaaagcctcattatcttcttgatttagacgttgaaagaactattcagaattttcttgacaatgtccctgagttctggtcttccaatgagtttgctgagtcgcttaaagatggacagattttgtttcttgataccaaattctttatagatctctttattcgtttcatgtatgaagaagatatgtatgatgtgtgggatgctgttgaggagtttcttagggaggagtctttctcttcgttaacacagcatctccttatcactcttgaagaacgtgacttgtgtcgatttcttgaattgcttggtaactattttgagccaggtattgaatcttgggatagtggtgactcgtctcgctggcttggggttcttctttcaagatatgttgacacagaatctatcgacgagctgctgctgctgagttctattatcaatcaaggtcgtcagttgctgcggcttgtacgtgatgaaaacgggaatgatgagggagaactgttgaaagaaaccatggcagagatatgcagaggtttggaaaacgaaagtagcttttctgtaattctgagagagctctcgaagatgaaacacatacaggtgataaaattactcgggctactttcttggactattcacttcagactatcagaggaatgtcagacgccagattcttgggagcttctatttagagaaaatgggattgagttccgcaggtctagtgaccattcgttgctaagctataatggattctctgaagaaagtgaatctgactcagatagtagaagccgtgtgtctaagaagaggcacaagagggagaagaagaaaagaaagaagaaaaagaagagggcttttgatgatgatgatgatcgtggtgatgatgagcttttagatctgcattcaataagtcgaagttggttgctatctactgatgggttttctgcaacatggaccagtgtgagttgcctattcttctttatttgtgtttcgtataatagatgtgtttcttatttgtgttgttttatcatctgagatgggttttttcaggtggatttaccggaatacatcgcaaagtattgtttgtcgacatggatgaaggggttattagctagacaaaaatgattcacagacaagtcggaattcagatgacaaaatagtaaggtattggtgacaacctcaacttgaacgttttcttgtactaaacaaaagagatttcaaagatgatcaaatcaacctaatggtttctacttgctcttctttacagatcctaccaatatgtacaaagtgcgaaactcgaaaatattcaccatatataggtataacatatgttcatgaaggtgttgaagcaatgaaagagaagaggaatgaaactgaatcagtcattatcactctatgtaaaaagtgtaacgtttttggctggattagtttccaatttgtgaccaataaaacccaaatttcgaagataagagtttgggctcagaaccctttattgcttctgatgctcagaactaatgtacagtaatcttttgcattgtgtagcttttgatagtgaaaaatatttttgaataaaaagcttatctactgtaccattctagcagcagcggttggcaaggaatcgcaaaccaagggttgttccttactgttaagacactctcatatatggaaagcaatgttaaatactgcccttgtccgttgcaacagctggctatctgtttcggcttttgtctgtctttataacattctaaacatttcattgtactcatagttcagcctttaaacagattactttctttcagatttgtttcaatttgggacccatctctcttttagttttgtcaaaacatggttctgtgtggccatggttttcaaagttcttagttttccatgagctcacatcgcagaccttgatttaaagaaaatgcttgataatcacacagtagctgtagcgtgcttaaagcctcgtgaaaccaaaaggtcgacatgcatttaagtttcgtctcttcgttttcctctagaaaggttgatggtaacaaatattaatgcctcgttaatctaaaagttggagacagctatcatcatcatactttcgactctttgtagtcctctctaaaggttgtgacttttgcaattccctttcatgtctatataaagacacgtatgttcagaatgttatctaacacttaccctctttatttcagagatgtcttcttccattgttaaaatcggaatagatagcatcaaaacaacggtaactgaaaaagagcgagatatcaaccgtcttgtgaagacattcttgtccaacaaaaacaacaggaagaagatcattggtcttgataccgaacgggtgcaaaagggaagaaagctaaataagaccgtcttgttgcagctctgcgatggtgacaattgtctaatagtacaacttcccgatgaagatgaagatgaaggtgaaggtgaagatgataatctgccactccccctcttcaattttctcaatctacccgagttcacatttgtgggcattggcataaacaagactatgatgaggcttgagagtgagtttggtttgacctgcaagaatgttgttgagattggacccgccacatggaatctgaccaatatgacgaccgatgtgaaatttaggatcagtgctattgtttcgactgagagaccatcaaatgccgtacttgaggactgggagaaatttgttctcaataagaaccagatcaagcttgcagcctccaatgcatactttgcttttggcattgggaacattttgttggatgttcagattttaagttaatgaatctagatttctgtttgtctttctttgtttttctttcttatgttcttcagtatcttgttgtagtttgcatttcaaccgttttaaagaccacaaaatgtggtatttggttcttcatttttttgttcttgttctctctgttagaccacaaagtgtaatattgggaaagttttgaggttaattagactgccacaataagcgttcaactagctagagtctgaatgattgtagccaccctaaactctgaggtcaaggtaaaggtataatattattactacaccacgtgagctattgaactgggcctgataattaaaagttgattagggcctattagaccacataacgaaatcttgagccgctgctgctagggggctgaaggatgattaattaagtgttcaacttgaagcaatgaaatagcttctgagagaagagagagttatgaaactgaaatgatcatcattttttttcttgggacaaatcagtcatcatctcttaatcttatctatgtaaagtgtaacttttttttgcgggattagtttccaatttgtgattaataaaacccaaattttaactaatgtataagagtttgggcttagaacccaaaataagtgggcctctatgcattgtctacctttagatagtgaaactattttagaataaaatgacaaagtagaactgtacagttttttgatgttttccatgaaaaagaaataagttccatgtattggagagaagagagtcagaaaaaaagagtcaaaaagattcttttgaaagacgggtaaacttcggagttccaagtaattattgcattttcatatacgctctgttcctggattcactaaatcttatttgaatacaaatgcatatgtagcaaatttaatattgtaactatatgtaaaatgttattttacaaaaaaacctccaaagtatttagtttttgcaaacttaccctcctaatccttaaagtacatgacaattgacaactacccaaccaaagaaaaagctgcaatacaaatacaagcctcggttatatcgatcatccaaacatgtgttttctttttattcaaaaacgaaaagcaaggagcattgtttgattgcatgaaaacgaaattaataactcagatggtaaggaagctcgttgttgaccctatagaatacatagaatgcttcaaaaaaaaaaaaattgtaacaagtgtcgttctctatagagaaacaacacaacataaaattcttaaaacgacattgagaaaaggtgtgtattactgttttttccgttggtggttagttaattgtcattcatttttggaatataaacggtaaacttttgcaaaaaggaatattacaaggatttgtattgcaaaaacaaaaacacatcaatagttacttcgataaaagtaaaaatggttgcagagtattattattactcaataggccctagctcagtcacacaggtacatccataatagtgccccattaacttctttcactctcttattgtgtgttgaacagtgacaaagaaagagagagagagctttgctttgcagaaaaaaatgcagaacttttggttcgccatcttcttcttcctgctaacatgcgcaccaccgtctcctttatcctacgcatccaccgtaactctcagccgtcgtctcctctatgactatgaatcacctcttcctcttcctctatcccccattagccctcctttcttccctcttgaatcctcccctccttctccacctcctcctcttccgcctactcctccgacaactttcgccgtctttccaacttttccggctaatatctccgccttagtcctccctcgctcctctaaaccacaccacacttcacctacacttctcctcccagctctctccgccgttcttgtcattgctacagtcataggcttagccttgtttctctacggccgccaccgagggcaaactcgtcatttaaagaactctcattgttctagtagcaacacaagcagctatggtgatgaacagagtcatatcaccactaacttcaacatggctgctactacttctccttcagaagttttttacctcaatacagaggaatctgaccatattagaaccggaggtacttttttcttgaagcaagactcgccggagatacgaccattaccaccattacctcctcgtagcttccaccataacaactatgaaacagaggtaaacgaagaagacgaagaagaagaagaagatgtgttcttctcaccaatggcttctctccctggctcagcgaactcaagcccttctcattcatgctcttcctcctgctccggttgggtttctccagctaggtcattctctatcaccatgtctccaccaaaccctagatactcagacgccactaacctccagtctccgtcaccggagagactaagagtaaggaagaactataacggaaatgggtcgtcttctctaagaatgtttagcttctggaatcaaaatatgggatttgggtttcctcgtatctcctctgcttctacttcaccagacagaggattcataagaacaccactttcgtctctctactcttcagtttccacttctcctgatgggttattccggaagtttctcgatagttcgccgccgatttggaatgactttagtcggaatgtgaagtctgttttgctctctcacactgcgtcatcaagaagagattttgttatcaacattggtgaatcttcttctcaacagagcaaagttcctgctcttcctcctccgaccagaccacctcctcttgttccaccgtctcaaccttttgtggttcaaaatgatgtaaaaaagcaatctttttcagaccaacctcccaaacagctgcattgggaacgtcttagatcgagctcttctaagtaagtgaagtgaaagttttcttctttctctttgtttctacttttgttgataagagtttaacgaagtctatcttttctgactgtgctagattgagcaaagagatggtagagactatgttcattgcaaactcgtcaaatccaagagatcttccgattcaaaatcaagttttagatccaagaaaggcacagaatattgctactctgcttcaactacttaacttaagcactaaggatgtttgtcaagctcttcttgatggtaaaataatctttaatgtattgccatttgttttgttttgtttttgtaatgttattgatttgtgttctttgagttattgatttaggtgactgtgatgtacttggagctgaacttcttgagtgtttatcaagattagcacctagtaaagaagaagagaggaagttgaagagctttagtgatggttcagagattggtccagctgagaggtttcttaaggaattgcttcatgtgccttttgtgtttaaacgtgttgatgcattgctttttgtggctaatttccattcggagatcaaacgtctcagaaaatcattcagtgttgttcaggtaatgctgatgattgcggatttacatatttgtgtctaatgatgtaatcttatgttatgtctcattactcattaaacttatctgcttttgcaggttgcttgtgaagaactaagaaatagtagaatgttttcgatacttcttgaagctatactgaagacaggaaacatgatgagtgttagaacaaaccgctgtggggatgcggatgccttcaaactcgacacgctcctcaagctcgttgatgtcaagggattagatggaagaagcagtctcttgcattttgttgttcaggaaatgatgaaatcagaaggcagtgtgagagctttagaaggcatcagaaacctgaatacagaactgagcaatgtcaagaaatcggcagacattgagtatggtgtactaagaagcaatgtgtcaaggatttgccaaggactcaagaacattgaagcgcttttgctacttagcgaggagagtggttcatatggagatcaatggctgaagttcaaggagaggatgacccggttcttgaaaaccgctgcagaggagattgtgaagattaaaatacgagaaagttcaacgctctctgcattggaagaggtcacagagcagttccatggagatgcttccaaggaaggtcacacaatgagaatcttcatgattgtgagagacttcctgtctgttctagaccaagtgtgtaaggaaatgggagactgattcccattgtaagatttttaatgtaatgattaggaacgcatctctagtttcattgtattgtaaccagtatgactaacgccatttctggataattctgtatgagtttttggaagacaattcattaggttttgatgctatgattctaattttgatgctttaacatgttacccttacgacaagcacaaatcaatgagttgcacaagtaagccatatctttggtcatattagcgaatcgtttagatacagtagaaatgcatctacatttctagttaatttgtggtcagaggataaacctgataagccaggtcttttaaacatagaaacaccataaccattactgaagaattgtgcctacacattgttgtttgcttgacttcaaagcttctgcatccatgcgctcgaggatatgacgagcttcttcctctgtggcaggaactacatttcgaagtttaaacccattgtttctggcctttgcctctggccttacagtgaacttgaagtagaatgtatttgaaacctacatcatatgtaacagaaaagagacctcaaaattaacataatgagcttcaaatctgataaggttcaagaaattttggcatgaagatagaatcagtgagcaagttcaattttaacaaccgtttaagaaagctccatcatcaagttagaattttacctcactggagcgaatctctggacttgtaacatgagcaacaacttcgatattgatgagcggacaatcctgtttatccagttgagtgtaaagaacacaggatttgaaacgtaagaaatccccgacgtccacctgtcatttaagtccattaagcgtaagtttacacagaagacgaacgtgaacaagaagataatggtaagaagtgatttggttacaaaccggtcttaggaaatcgacgtgatcaacttctaagaagtaaggcactagacccgcaaacgtataagcagtagagaaagccaactcaaatgctctatgcattaaaaaccctccaaagatcctaccatggatgttcctctgctgcggttggcatatcagcgaattctcaagacgagtgtctttaagaagaatgctgtttctgtcagcaagagctggcatgtcagagaaaatccttccttcagccaaccaagcctcaagcttcttacactccccgtgatcaaattcccttctgtcacctcctctcttcttcttccttaagttattcctagcttcagcttcctcaaagagaagtttctcaacctcggtttcaggagaaagacggttgataggagcagctttaccagtcttagaatcacgcgccacaaaaatgaaatttgcagttaaagcaacagaatctgaagaagccttgacatcttctgaaaacaacaacaacaacaaaacagaagtcttttaatttctagtttcaagatacatgcttgtaagttgaattagtagacgactatacacatactcaattcggattgcataacttcgagttgaatctcgatagatgaacgaccaacccaaatgacagaagcaacaatcttgagatcaatgtcgacacaaatcggcttctttaagacaatcttatgaacagaagctgtaacaagcaagagtggcctcgttgtactatcatcatcagaacaatgctgtatcacaatgtacagacacattcaaatacacaataagatcactaaaacctatactagaaacatagtcagaaaatcaaatacacaataagatcactaaaacctataatacaaccatagtcagaggacagagattcacagtatcctaaaaaaggatcaaactttatcactcaatttggcaaatgaagataccttgacggagatagtgccggctaaagcatcgagatcttcgagcaagatcccgatacggacctcgttccaaggatctctgtattgctctctgagaatgaaatcagtggagaaagggtagaaaatggtggtacggctatgagaaggagttctggtgagaagctggctctgtggtggagcgtctttaggaggatcgagaagagattcgaagattttggatctggcttcccaaagagcggtggtgacaggtgaatggtacatacctggccataagcttaagggttttcgggttgggtcagaggtggaggatggtgaagcgaaggtggagacgacggagatgggtcttggggaattcatggttgggtgaagaaagtgagaagctttgtttctgggtttttgaaaatgggggaaggtgaaagagaagatggtgaatcattcaaaggaaggacattgtttgatttttagttcctttgactttggagtttttttagattgtttctttttttgacatttgctttagtgtttttttttttacaaggttagcttaaagagcactctgtctgattctcatcaaacattctttattttctttgtctttttttctaattttacaatcaacaatttcaataaaatttgagaacgtatgcatgttgattaagcttgttaaaattatgttattgtgtgtttcttctacacttacaaatggtattggagccttacctagcacaagaagatattcaatcttagggaaagagactgtaaagaacatggagatacgatggttcataattcattggtgttggtcgaccaacattcttggatgccctaagctacgacattggataatcaagatatgatgcctaagatcatagggattcatcagaacgtttagacatcggttgtttgaatctgaatgtgagtctccaaactaatttattggagacggctatgtcgcaacaaagtctacaacagaatggttaaaacttaaaacataaattaaaaagtgtcgagattcagtgctctaggccttaagcatggcaataatttcctcccttttcttatatcataactcgttaaacatcaacaaagaggtccaaacgaacaataaggatgaatatataactcaaatcgtcagtcactagatgaattatgcttcgaatgaagggaacgctcctttgtcctttctatggagcaagtagaaaggggagacatgaaatgatcttgatggccataattcataattatccccaagacaccaagcaaagtatcctttcacattgcaaccagactccctaaaaacaggaacaatcattagagacaattttcttgttgatcatacatccatatacatatatataaaaattaagtagaagaagataggaagacgagtagaatccactcacttgatggcctaacggagaaaacagagatgactgcatatataatcagtcctgttggaatcagctataacatcaagggcgggtgtgtcaccaccggggctactatatcctagttagaccatcgttaccagttacacaaatgagtcgatttcttggaccgatttagaaataaattaactaaacatgcataaagagaaaaaaaatataattacaaggataagtaactcaccgttctcagtgatatagactaatgggtttccgtatttagttttgaagtgctccaacacgtttaaaattcctcttggatggtaataactatctgcattgaactgagaaagggaaacatagataaatcccaagtatatttatgtatgttatctttttcttaaaaataatgaaatatagggatggatcatgcatgcatacccatggacctatgggaccatctttattttcatctgtaaacacaaagataaagtaatgggatggtcacaaaatattgtaaacaaattaagaagatagtatttgtaaagaaaagttgtaactaaatagcaatatagatatagatgtacatgagaatgctgagagcgagtcattcaggacggtgagtctattcggaggatttgcgggaatggcatagacatactgagtttggtagtagttgataccaagaaaatcatatgaaccctttacaagtttggcttctttcttattgaactttggaaggcgtcgacccacaagttttctcatgatatcagggtatttaccttttgttagtggctccatgaacctattttatacacatgccttaataagtttctataaatgtacatctattatttatttttggatatattgagagatataccatcccaagaagaattctttgttcctctcagtcgcatctatgttggcttgagtgctatcatatggaacaaaccatctagtaatcatcacaactccaatctgtcctctttgttttggctgttgtgaggaagcattgcatatatatatataaaattatctagaatcagatgtcagattatatctttttcaaccagagaactcaccttatattttttccggtaaagatggacgactttggcatgagcaagaagctggttatgtgcaacgatataaggttcttccagaatctccggcgtaacaatctttattaagccaataagaacatcgacccggtgcatctgttcccattgcataacctctagtaggaacggtatagagttggttgatcgtgatccacttcttaaccctatcaccgaatatcttgaaacatagattcgcgtaatctttgaaatcgtctctgctcatattatagaatcatttcgttaatgcgagatcaaatcttttatatgttgtcatatttattaagaagtagcatggcatcgataacatacatgatctcatggttcaagaaaccttcatattcatcttgcagaacttgaggaaggtcccaatggaagagggtaacaaaaggagttatattctttgctaggaggccatctatgagatcgttatagtacttaacacctgcttggtttgattcccctcttcacctttcctcctgctcatatagatcgtagatttatttttacgacaaacaatatatattcatatatacatgcatggattaatgtgtacatacttggagcgattcttgaccaagcaagcgagaatctatagccgtcaaccccgagttcggtcattacgtctatatctttctgtagtaatacaaataatcacatgtaaattccacacgtagttgataaaaattcagtgactaaattcagtaattccacacgtattaacctgccagtgctcatatgatccacaagtgctgtctccattccctaaatcgggtcctcctttctctggtagcgtacaaagacattactatgaatgtatagagagataacgtaccgacacttctctcgtataaatatgtaagcctttatatatcaaccatgcaaacgacaaacctggatatcggtgagtgaagccatcccaaacgttaaggccacggccttttccaccttctatctgaagtgaaacaaaacaaccatgcaacgttggaatttagtgttagtgaattgttttttacgtcaaaattgggagaatatgtgatctgttgcatgcctggtaagcagaagatgcaacaccgaagatgaagtcatcatcgaaatgttttctgttgaaacgatcagtttggttacatgtgaatggcttggtctcttcgcacgtaatctcttcagctttgcaagtctccactgctaatagaagaactaagccgagtgcacgaaacttcatggttaatcggtacatgtatgttttcattcagctgcatggaaacctaatgcggtctcaattaaactttaaaagaagaagtttttgtagaaaatttaatctttgctttgtatatttgttttggtgtccttaaatagaaattttacatcaaggagctaacgaaatggaatcatggattcctataaaattggaagtgaaaaggtgatgtaagaacacttgttaattcttctattattgtcgacgagaattaagcaaaaaaaaaagaaaaccaagaattgactaagtctagttattttgaatttggtattcttgacccaatcattcgtcattgcaatatatttgtggtttgtccaatttcggacagagtttcgttgaaatctccatagtcagtgggtccaaatcgagcacatagttagtcttcaaagatatcccacgtgatgactgtattctcctcaaccaaattagtgctgcaaaatataaggcagcaaagacgtagtggcaaaaccaaaacagtgactgtaccacacacccaaagcttagtacatagtaataagagagtgcatctaacaatatatcatattacaacacaccatcgacgacgagaacccaaaaataaaataaaaacaatacttatacattatatatatctttggactgctacgactagagatgtttgtttcacaattcttacccttcctctt

SEQ ID NO: 856 - DNA, 74298 bp, Arabidopsis thaliana
gatcaacgagcaactatgagctcttcaatgaaatcgccttcacctgattcagatgggattaagatatcatcatcggcggtgaagttgtagctctctccaatggctcttagaagctgataaacttcaaacatggttggcctctgctttgctatttccggtagaacgcagttgcatgctactttgagtactttgaagatttcatcatccacaccgttcccaagtaaggacctgtcgattgcttcctgcagttttgattcacttgatagctttgtaatccattccacgaggttacccttgaagttttcttcctcagctttttcttcagatacttttgttacactcgttgctttttggcccgttactagctctagaagcacaacaccgaagctgtagacatctccttttggagttgcaaccatggttcttgaatactcgggagcaacataaccgaaatccccaaattctccattgacgaatgtgcttaaatgggtatcaattgggttcatcagcctagctagaccgaaatccgagatctttggctcaaactctgcagtcaacaatatgcatttcgagcttatgttgcgatggatgattctcgggttgcagctatgatgaagccatgccaatccttttgccgtcccaatcgcgattttcagccttgaaggccaatccaagggcttgaaggattcttcatctgcaggatgtaactgatcataaaggtaaccgtttgccatgtactcatacattagaagcctctccttattggcaacacaatagcccaagagagggactaagtttctgtttttaacagagcccaaagtcttcatctctgcatcaaactctttctcagagcgttgagaatcctgcaacctctttatcataagtagagacccgtcttcaagcctacctttgtacatagttcctgttcttcctgttgcaatgatattatctttcttgaattcctctgttgccttcataagatcgcttaatttcatctttgaaaccgatttcttaaacatgaaaacctgaacattcacaaaagcaccaaacatatatcataaatttagaacataaccacatacagcaaaattcaaatcaatgatgtttttaccttaacacctttctgtcctttcaagctctttgcccatctgtttccttcaggatcatcctgcttcttccgaacagcacccaatttacggaaatagaagaacaaaacaaccccaacgactaatgctgctgcagtcagtccaccaactgccgctataataacaactttaccacgagagctagaagcactcttacagtcatctagaggcttaccacacagatccaggttattagcaaacaattcctgcttaaactgcaaggtttggttgaaatttgggataggaccaacgagacgattgtcagacacagagaatgttttgagccgtccaagttgcgctagctggggaggaagagtacccgtgaactggttatgctgaagcataagagtgttcaaaaaggtaatgttggagatcaacatagggatttcaccagagaagctattgtaggagaggtctagaatcgtaacaagtggaatcaaggtgctaatgttggctggtaaaggtccagagaagttgtttctagaaagatctaaaccagtgagatcagcacatagcttaaccgcaggaggaaacactcctctaagaccataaccagatagcttaatactcaaaaccctattctcatcatcatgccaacaagtcacaccactgaacttgcagatataaccagcagtctcgttgccaaaaacccaagtcgataaatatctatttggatcctctacttgagatttaaaggtccttaagcaatctatgttggcctgatccgcgtcaaccaagctcgagagtagcagcaaacagagacaattatagagccagattacaaaaactaacctacccatcatcataaatccactaaattccacaaaatgtgtaaaatctctatgaactacagcaacaaaatcaagggttctcttcgatgagcatcaaaatcctgtaagcaaataaaaaaaaatcaaaactttattagcaacaacgaaaattggattatcgccagcgaatcaaaaagactaaagcgatctttaaaattgaagttgacttagaaaaatttacaacaacttacgaatcaaaatcagaaacacaaaacgaaagctttggtctttgtagtcgtcgttgtcgtggtggtggtgctcttgttcataagtgttgaagagcacaatgaagaaggagaagaaaatcgcatctgtggctaagtggttatgaatgatgatgatgatgatgatgaagaaaggagttgggaataatttaataaaggagtcgtctttgtgagtgagttgactgggactttggatcgtcgtcgtcgtctagtgaaagttcgtgaagaatggggcaaagaaaagagagacactgatgatgagaacgcaatgactcccaacaaaaaccaaatcggtctttgcgcgttaaatgttttttttttctttcttctctttttgacttttcaacatcatcatatatattatcttgtttgttaggagatggacaaatttttcttccatttggtatttttcgcttttcattcgtttttagataattctggatattttgtaaatggttttggtgttttgaccaaatcaaagaatggaatatgacatttacaagaaatgttttcttggtattagtttttgacaaataccaatgcataataatttgtatcacaaaaattgaatatcatgtcacatatttaaatacttattaggagtagtacttattttgttgttgttggaatctttaaattatgggttgacagttatatatatatatatatatataaaaagcttgttcatttagcagatgtacccgccaaccacggttcagcaaacaccccaaaatgttaattcgtgttgtttatgtattgtcagtttgtaacataacgattttagaaattttacagagtgtttatatacagagactctaataccatgtagactaagagtatatcgaatatatgaaacaagatgattacagagtgtttatatacaaagactagaaagctactgaaggaaacttaatattgtatacaatgattatgagcaattaacgtgattgacgatattgattctcttcattatcttgattgatatgattatccttgatagtcagtttgtaacataacgattttagagaggagataaaccacgaatcacaacctctagtctctcccaagccaaatccgccattcgtgacctgaaccaacttcgaaattcatttgatatttgtaatgttttgtaccaaatcattcaccatatataatacaattgtagaattccaacaatttgggaagttgtaagatttatttactcttggtttagtctttcctctttgacaaataccaatgtataaccaaactatattttcattgttgctcttattaagaaaacaatcatatataaattttgcattcaaaaaaattagacacatagtttcatccttggagacaatttatatgatcgaaacatccgatgaagaatatcagtctatgaaagattgtgcaatctagttttttccccattataacatagccttaagcatgaagccaaagcttcgtcaacaggttaaaaagattgggtgtttggtaaaaaaagttaaggaatttaaagagtgattgatacacatagatggtgaatataccaattaatagaaaaaaaggaggaaagagtaaattacaagttcccggcagtttcagacaaactcacgtgacgcaaactttaaagggtttgactagagccacataagctgtctggtccgaaccagatatgatagtgaagaacgagccattaaaccacaccagtctctctcacgtgccaactaagtaaaattgggtgtgcttaataaagtgtctgttataaatcgctttgcttccttttattttgcctctcttctactttcctctttcctttttagggatttcactttcctcttctctctctctctctctctgcctaacctcgatttctctcgatcgctcttcaccatggatctacgatcatgtggtccttcttgaagttttttgatctcttcttcttacgggtttttacttcgtttgattttcctggtaaagttgctttttttttatcttctcttgaggtatatactttttttttgttttgagttcatgttcgtgttctcttcactgtagctagggtttgttgatttctccacaatatagctcaaaatttctgctatgaccttgaattttggtcgtgaagtttgtttatgtgatggattaagctgggatttcatagaatcactgaatcagcttgcttgtttctactctcatttcgtcatctactcttctcttaatctgtatttgtattatttcagctaatttttttataagtacgtctgattagttcttgaggttgaattatctttgtgactaaaaaatagtgtgaatttttcttgaatggattcatttttttgggggtttcttgttcatttgtctttacttgccttgtaggccattttcttacatagttgtccactatgacttgtacggtcttgttacagagctaatttgtttttatctttaacgagtgatattgtcattggatagttttgactgatctttgtttatctgttcttgatgatttttttttttgtagttgtttgttgttcaaggatcgagatttcgtggagctctctattcgcagcttggagattggacttgtttgaattggtaacaatattgtgtctggcctctaatgtcgttgtactcatgtttgtttttatttgttcgggactttttaatcattacttaaatttccgttttatttaggctcttttgtgatggaggatactcggtcagttgcttcactcatggactctacatcatccaagattcagcagcttcagaaggcgtttgctgaacttgaaagtcagcgtgctgtaacacttaatctgaagtggaaggaacttgaggagcattttcatgggcttgagaggtctttgaagagaaggtttcatgagcttgaagatcaagaaaaagagtatgaaaccaaaacaaggaaagctcaagaactgttggagaaaaagaaggcagctgttgaggctaaggagaaggcggcgcttgaaaggcttcagaagaagagagacgcagctatgtttactataaacagtgctttggataagtataacaacgctcctgtcagtaaaccttctgttggtgaacgttggccacaaaatgctgtagaggattcatccaatgtctttgctgctgatagtattaccgatgataatccggatggtattgtgcaagatgttcagatctcacctgtgatgggaaattatgaggtgaaggcttatccacagttactgaaactgtgcggggatatggactcaacgggtctccataagtttgtatcagataaccgcaagaaccttgcatcactaaaggaggagattcctatggcgttcagggctgcagcaaacccagccagcttagtgttggactctttggaagggttttaccctatggaggcaccaactgctgatggaaaaaaagacgctaacctcttgggcatgcgcagaacctgtatcatgttgatggagtgccttagcatactgttatctggtctggaccgcaactgccttgctgttgttctctcacaaaatgttaagcatagagccaaaactattgcagaaggatggaatccactgctggaatctcttgacatggatgcttgcaatggtaattctttggaggctcatgcattcctgcaactgctggccacttttgctattgttgctgattttaaagaagatgaactcttaaagctgatccccatggtttcacgtcgccgtcaggcagctgagctctgccgttcacttggattagctgaaaaaatgcctggtttgttctcttaacttttagtatatggctgattatcttacaggttatgacatttcgataggaaagttgatgtttgatagtaactatttagtgagtgatagggtctctggtcaagggcctaaacatggtggatatctgtgtttttccttgtttagtttacacccagattctctaccttatcccttgatcttatctttaatgtgcactgctccttttattccaggtgtgattgaagttctcgtgaacagtggaaaacagattgatgcggttaacttggcatttgcgtttgaactcacagaacagttctcacctgtctcattactgaaatcttacttgatagaggcaaggcgatcttccccccaaggcagacctggcaatgcatctcctgctgttcaggcaagtgttccctgacttgataacttgcagttatagattaccttgttggtgaaaatgaagggctatattaatgcattttgcctagaacgagtgatcttatcttttattgaactcgttaccttttctcgagcatctggctatttgaaaaagtaaatcttacctcgctggaacattcctgagctctgttcagttagctgtcatattttactccagacttctaacaccatttgaaactgaaaaccgatgctttcattatcaattactttaggcgtatatcatagtacttgctgatgcaggatcagtctcatattgttgtacattattatgtgtgtaccaatgcaggatgagttcaatgagcgggagcttataggcctcaaaaccgttataaagtgtatcgaagagcatagcctggaagagcagtacccagttgagccacttcacaaacggattctccagctcgagaaagccaaagcggacaaaaagagagcaacagaacccatgaaacctcagccaaaacgaccacgtggtgctcaaccccgagtcactgacaacaacaacaacatcaacaacaacaagacaggatacggtagagtcatccctgaaaggtatccgcagtatgtctatgacaacagaccgttccttagcggtccaatcatggcagcacaacctccaccacctcctcctcctcagacttacacgttcaatcctgctcctgcacatgggaacttctacgcgaactgctatcagtaccaggctcctcctcctcctccttactttcactagtgataaaaaaaggtgaatggtaaaatgtgactgtgactgtgactcccctttggtgttaacttgtggcagctcttttttaactcctctccttagttctctttccctttgatgttgttgttgtgtacggatggttttagtatttttaaggatcaaccctactcaaaacaaaaaacaaaaaaatactcagattttcttattaattattatatctttaatgttgtattttattatttttccttaacctacacaggaggtgtaaattacaatactaaccctaatttgaatttcgaaaatatcttattctctcagactcggtccttcgaaattcccaattctctctctgaaatctcccgccaacaatcgaaatgagaatcgccgagatcaccacgccggacctccggttacatcaccgggaaaccgattcacacactcaccatcctcttctctccgagatcgagctcttaatccaacaatctgaagccatttccaaagatcagccgctacctcaatctctccctatttctcttagacaattcctaactcggctgagtcaacttgctccttttcccgataactccttcaagcttaccatatggaaactcagctttcgcctctggaatgcttgtgttgatctcgctaacgccgcctctctccaatcctctttaacctccgccgagaacattgcgaatctcagacatgttgccgccgatatgctttttctcgctaaggacgttaccggtgttccatctccgacgattaagtcctctctattctactataagaccggtcttgtttatcacagtctcaagaaattcgatctcgcctccgattgcttcgagagagccaccgaaatcgtctcgaaaattgatatcgcgaaaatttccgatgccggagaaaagaaattgtttctggatctaaacctagctagatctcgaactgcctgggaaatttctgataggaatttagctgtaacgttgcttaatcgggcgaagaatttgttgtttggttcaccggatcactacaaatcgctctcaaatcaattccttgcgtttggtaaaagctctttgtctagaggtgacgacgattgcagtctaaacgacgctcttaggttaatgaatgaagcgttggatctttgtgagaagggattaggtacagcaaaaactcgggaagatactacggagttcacggccatgagaatcaaaactctgcgtttcatatcagcagtgcatttgcagaagggagagttcgagaatgtgataaaatgtgtgaaagttctaaggaatggaggaaatggtagtgatggagctgatcaacatgcttcattacctgtgttggcgatgaaggcttggttaggacttgggaggcatagtgaggcagagaaggagctgagaggtatggtgggaaacaatgatattccagaggcagtgtgggtatctgctgtggaagcatattttgaggtggttgggactgctggagcagaaactgcaaagggtgtgttcttaggtctgctgggaaggtgtcatgtcagtgcaaaggcggcacttagagtggctcatcgggtgcttggtgagagtaggggaggtgataatggttcgagaattagggcgaacgttgtggctcagctcgtgtcagatgagagagttgttgctctctttgctagtgaagctgtgactaaggagaggaaggcaatacattctgttctctggaacaggtatgtttttgccattgaactttcatctcccttggttaacattggtgtgtcatatttattgcatcttagttaactgagtgattcagcttggttacagtgattgataggttttgttgttgttttcttgagtgtatgtcttggggatctaatctgggtattttctgctgtttacagtgcttcagatcatttccgtgctaaagattatgagacaagtgcagagatgtttgagaaatcaatgctctatattccacatgatatagaaaatagagttttcagggccaaaggcttcagggttttgtgtctttgctaccttgggctctctcagctggatcgagctcttgaatacatagaagaagctgaaaaggtatacatttatccatggaacttctattttcaacggtcctagttggatctttcaactcagaattgctaactagttttctgtctctgcagcttgagcccaatattgcttgctcctttcttaaggtagactgtcttttcccccacagtacatgcttattcaacatatggccttcggctacctcgccatatatatgtatctggagattgtttgagaaaaattgtttcagcaacttctctttgcttctgattcttgcagttcaagatctacctgcaaaagaaggaacacagttgtgccattggtcagatcgatgcaatgacgtcctgccttgatttttctccagattatctttccctttcagcgcatgaagctatttcttgccaagcgcttccagttgctgttgcttctctttccaagtttctcagtttctatatctcaggaaaaaaaatgccaaccacagaggttgtggtcttccgtaccttagtcactatattgactcaagacattggcagcgaaaccgaagctcttaactttatgttgcaagctcagagcagggcttctaagcttgggacagagtgtttctttggattaggagagactggaaagcgagaacagaattggtttgctgcgacttgctggaatcttgggtcaaggtgtgggaaggaaaagaagtatgagctctgtggtgaattcttgaggctggcatctgaattttatggctatatagatactgatgagtctggagaagacaaactgatgatttgcaggtccataatactaagtgtcaccgctatgattgctttggagaagcaaaccaagagcgcactgactgaaacccaagtgaaacttgctgcagaattgctcgtgagagcaggaaaggtcttatcctcctctttattaatattacctgcagagttttacctttcagtttcactgatgtttggttatatatttgcagattatgtcttcttcgctctcagatggtaaagattgtatcatggagccagaactcatctttatgtacactttacttgcgtatgacatacacggaaggctcaacaattcggcattccagttacttgtggtaaagacgtttgctggttccaagtcttgtcattacaactatcttctccaacttggaattttcgcctctcaaagccctcagtccaacccggacgtgtcaacatttgctcttaacgaatgcctatccgctctgatcgcatctgcttcaccagagtacccaaccatagctcttataatcaggaagctgatctccatagccagcgtccacaaaggcgatacagacgatgaagaagcaatcttaaagatgtacaaacaagcatacagaatcatggttgggttgaaggaaggggaatacccgactgaagaagggaaatggctcgcaatgacagcttggaaccgagcagcgttgcccgtgaggctaggacagtttgagaccgctaaaaaatggctgagcatcgggttggaaatcgctgataaggttacaggtatggatacttataaagcttgtatgcaggattacttggctggttttcagaccaaagtttcttctgcttagtttcattcatattaactgtctcattagtttaaatgtccatgaaataaatctgagatatagaattgttgaagatgtttagttcatatagtacacactaaatcccctagaaaaactaattaaaacatgtaaaactatatttctaatcgcttcttgcaaacagaatctgctctaagacatattcatctctcatgggaattatgcaaatcttactaagatcaaaattcatttgaccgtagatttttatgatggaaagagtttgtggtcgtgtagagttattaagaattcacttagttttaggtggaggcctaaacttaagaaaggacataagatactgactaagtttgatcatatgagatcgtttacttttgagatgaaacgactttcacaattttcctctgcttctagatttatatctgtgaccgtctgattatataatccttggtacttgttgattagttcttgtcggcaaaggataatactctccaaaagctatgggattgaaaggtgtttgttttcttttgcttaaaattgacctttgacaaattctgtccaatagaatcttcatttttcatattgttcttcttactttcgtaactaaaataataactttgagagaaagataagtagccaacctttagtactccacaacgaaatttctcttaaattgtaatcggttgactaatgtcatcctcctaaaaatttcgttaactttgaatttctctttttcttcttacgattttcttaaatatatgtgaatagaatagagaaaatgtaaaacacggcatgtgtaggctataactgtttatataaaataataataatgatgtgtaaagcaacaaacgtgaggtctctccttcctctttagttggaaagaattttaatggtgagaatttgtattcaaaccccaattttgctatcgtttcttcttgttctgcttttcttcatctccaactgttttgcttcgagtcaaaacaacgatgatgataaacggattcgggtccgggtcgggttggttttggatttgggttccgtggaagggaagatagtgcggagttctgtttccatggctctttctgatttctacgacaatcacaatgactacaaaacaagactctctcttttagtcagagattctcatggagagcctcttcttgctcttgattcaggtaacatactccattactcttgcacctctctatataaatcacctttttctctttatccatttttgttttgtgattattcatacactcacaatctttgtgaatgaaacagttgtagatttgctgcaaacagaaggagtgcaagcaataattggcgggaactcgttgctagaagcgaagcttttggcggaacttggagagaaagctagggttcctgtgatttcacttaactctcccatgtcattgtcattgagcaaatacactcacttgatccaagccacacataactctgcctctgaggttaaaggaattacagctttcctccatgggtttgattggaacagtgttgctcttgttttagaagatcacgatgactggagagagagtatgcattttatggtggaccatttccatgagaacaacgttcatgtacagtccaaggttgcttttagtgtcacttcgagtgaggattctttgatggatcgattacgggagcttaaggacttgggaacaactgtctttgttgttcacttgtctgaagttattgcaactcgtctcttcccatgtgctgagaaattagggatgatgggtgaagggtttgcttggattcttacttccagaagcatgagcagttttcatgatcagttcattgacgatttaacaaaggaggcaatggaaggtgtggttggtttcaagtcttatataccaatgtcaaaagagcttcacaacttcactttgagatggagaaaaacactccctgttgaagaagttactgggagtgagattactcggttgagtatctctggcgtatgggctcatgatgtcgcttggagtctggcgagtgcagctgaagtgacaaggatgccaactgtgacatcaactctccttgaggccataaaagaaagcaggtttaagggtctgagtggtaactttcagttggatgatatgaagttgttatcagacaagtttgagattgtgaatatgataggatcaggtgagagaagggtaggattctggaattctaatggtagtttcagcaatagaagacaattatcttctactcatgacaatctggagaccataatttggcccggtgggtctgctcaaagtccgaaagggagaagtctaagagagagcggtagaaaaaagcttagggttcttgttacatctagcaatagattcccaagactgatgaaagtggagactgatccaataacacatgagataacaattgtcgaagggttctgtatagaagtctttcaggcatccattgcacctttcaactatgaagtggagtacatacgttggctcaatggaactaactacaccaagcttgcatatgcacttcatagccaggtactaagcatggctcgattttacaattgcaagtacttttaaaatttgcgtagactgtgtgtgggaactgacttaattccattgataatttttgttgcatcccttagaaagacaaatatgatgctgctgtgggagatattacaattacttccgatagatcgatgtatgttgattttacgttgccatacactgaaatgggtcttggaattgtagcagcaaaggagagaagtatgtgggtgttcttccaacctctaacaccaaacctttggataacaagtgcagctttctttgtcttgacgggtattatagtttggttgatagaaagagctgagaacaaagagttccaaggatcttggcctcaacagattggagttgtgatttggtttggcttctctacccttgtttatgctcatcgtaagtaccttttcacattcttatataccaatttggccataagagaagagattgtagtgatgcttaccttttgttgcttactctgtgtgacaggggagaagctacaacacaacttatcaagatttgtagttacagtttgggtatttgcggtgctcatattggttacaagttacactgcaacattgacatcaatgatgacggtgcaacaaatacgattcaacgccaatgaagattatgtgggtcacctctcgggatccctcatcgcaaatgcggccctcaccaattccagcctcagagcaatgagattattgggtctcaatacttcagaagattatgctcaagctttgatgaataaaagtgtctcatatattgttagtgagttgccatacctgaaaatcctccttggcgagaatcctggacattttctcatggtcaagacacaatctaccaccaatggttttggcttcgtatgtatccttcttctgcatcatcagttgctttactcttgattttacttgttgaaaaagaaatgtttggtttgttatactatgttccagatgttccagaaggggtccgagttggcgcctaatgtgtcccgggagattgcgaagctgaggacaagcgagaggctaaacgagatggagagaagatggtttgataaacagcttccatacacaaccgatgatacatcaaatcctataaccctatatagattccgtggtttgtttatgatcaccggagtttcattcgctttcgctcttgcagtacttctcattctttggctccgagaaagatgggaaatccttgtgaattcggtcaatatatacttctcacaacgacttagacatttcaggatcctcttcacaagaactatccatcctagtcccctcggcctcgataaccccattggcgagaatgcggttcaaatggctcaacgtaacagacgataggaaatgagtaacatagagagaaaacaattgttgtgatgtggtacgtctctgactctgaccttggagcagcaaagaagatcctccagtgatccactagctcctgatccaagccggcttacgtctgaaagtataaatgattgttataccaattttgtaaattatagtgtgatcatattcgcaaccacttttgtaaatagcaaaaaggtattggtaatatattgagttaaaatttaacacatttagtttgagtattttttggagaatatgatacttttgcaaagaaaaaaatactttaattcttcattttataaaccttaaaaaatgtaccaaactttaatcagtatgtaaaagactcgtgcatttcgtttgttggtatttgtgtttaatttcttccatcaatttatttgagatgagacgactttcaccatttttctctgcttctagatttatatctttgactgtctaaattgtcaaatcccttacactaagtacttttgttgatttgttcttgtcaacacaagttaatacaaccccaacaaatatggagtttttaaccaaaaaaaaaacaaatatggagttctacgtgtaaaaatttcagattaaaacacatttgttcctacgaccgttgacaaatgtttttttttttttaagacaaatgatttttttcttttgctaaaattggttagttgacaaaattttatcctatagaatccttttcgaatttattccgtatttttacctttttactttcttcaccaaacattttgatagatttagtcagattctcttaaataatgaaatgatttgagagacaaaagagtagccaaactcgatagcccataccgaattttacgttgactaatgtaatttttcttaaaatcatgatgtcatcatcttaaactttgaatttttcttcaaatatagtacgtatgttaatttttaaaattggaataattagacagatgaaaaacaaaacacggcatgggtttatataacaacaaaataaaataatgactaaaagcagcaaacgtggggtttctcctttctctctagttggaaagtttttttaatggagagattttgtattcaaacccaaactttgctatcgtttcttcttgttttgcttctcttcatctccaggtcttttgcttctactaaaaacgacgacgttgatggaggtaaacgggttcagatccgggtcgggttggttttggatttgggttccttgaaagggaagatagtgaaaaactctgtttccatggctctttcctatttctacgctattcataatgattacaaaacaagagtctctgtttcactcagaaactctcatggagagcctcttcttgctcttgcttctggtaaaaacacttcttctctacaaaaactctcttcttctctgtctccattcacactcacaatcttggttttctatctcttgtgaatgaaacagctgtagatcttctgaaaactgaaggagtagaagcgattattggcgggaactcgttgttagaagcgaagcttttaggggaacttggagagaaagctagggttcctatgatttcacttgactctccgttttcattgtcattaagcaaatacactcacttgatccaagccacacatgattctacctctgaggcaaaggggattacatcttttattaatgtgtttgattggaacagtgttgctcttgtttatgaagatcatgatgactggagagagagtatgcaacttttggtggagcattttcatgagaacggtgttcgtgtacagtccaaggttggttttactgtctcttctagtgaggattttgtgatgggtcggttacagcagctgaaggacttggggactactgtctttgttgttcacttgtctgaagttattgcaactcatttattcccatgtgctcggagattagggttgatgggtgatgggtttgtttggatcctgactgctaaaactatgaacagcttccatgagaacattgatgatttcacaaagcaggcaatggaaggtgtggttggtttcaagtcttacattccaatgtctatagagcttcaaaatttcactttgagatggagaaaatcattgcctgttgaagaagcggagctaactcggttgagtatctctggcatatgggctcacgatatcgcttttgctctggcgagagcagcagaagttataaggatgccaaatgtgacatcaactctccttgaggaaatcacaaagactaggtttaacggtttgagtggtgatttccaactaaatgataagaagttgttatcaaacaagtttgagattatcaatatgataggatcaagtgagagaagagtaggattcttgaactctaacggtagttttagtaatagaagacatttatcttctactcataacaagcttgagaccataatctggccaggtgggtctgctcaaagtccgaaagggactagtctaatagatagcgatagaaaaaagctgagggtcttggttacatctagcaatagattcccaagactgatgaaagtggagactgatccagtaacaaatgaattaattgttgaagggttctgtatagaagtctttcgcgcttcgattagtcctttcaactatgaagttgagtatataccttggctcaatggaagtaactacgacaatcttgcatatgcacttcatagccaggtactaaccatgtcttacttaagtgttttatattataacaagtatttttttttttttaattgttttgtgttgcatcccacagaaagacaaatatgatgcggccgtgggagatattacaatcacttcgaatagatcgacgtatgttgactttacgttgccattcactgaaatgggtcttggaattgtagcagtaaaagagagaagtatgtgggtgttcttccaacctttaacaccagatctttggataacaagtgcatttttttttgtcttgaccggagttatagtttggttgatagaaagagctgagaacaaagagttccaaggatcttggccacaacagattggagttgtgctttggtttggcttctctacccttgtctatgctcatagtaagtactcaccttttcacatttatatatgccaatcttgttcagaaaagattgtagtgatcatgcttaccttttgctgcttatactatgtgtgacaggggaaaagctaaaacacaacttatcaagatttgttgttacagtttgggtatttgcagtgctcatactgactgcaagttacactgcaacattgacatcaatgatgacggtacaacagatacgatttaactccaacgaagactacgtgggtcacctttccggctccctcattgcaaatgtggctctcactagttccagcctccgagcaatgagatcattgggtcttaatagtgctgcagattatgctcaagccttgttgaacaagactgtttcatttgttgttgatgagttgccatacctcaaagttgtccttggcgagaatccaacacattttttcatggtcaagacacaatctaccaccaacggtttcggctttgtatgtatccttcttcttcatcgtcataagcttctttactctttctttacttttgacttgctgacataagaacatgtttggtttgttattgttatactatgttttagatgtttcaaaagggcttcgagttggtgcctaatgtgtcccgagaaatctcaaagctaaggacgagcgagaagctaaatgagatggagaaaagatggtttgataatcaacttccatacacaaccgatgatacatcaaatcctattactctttacagattccgcggtttgtttataatcatcggtgtttcattcgctttcgctcttgcggtacttgtcattctctgtctccgcgacaaatgggaaattcttgtggacaatctagacctctcacaacgacttagacatttcaggatccactttgtaagatctatacatactagtccccttgatgaccccattggcgaaactgcggttcaaatggctcaacaaaatagacaataggaactgattagggttagatcaaaaggtccacaaacaatctttacttgtaaatgacttacatatcaaagtataaatgctgtttagaccaaatccttgcttgtaaattgtatgatcaaattcaaaaccacctttatatagttggttcatatatgattagtgtctttcaaatggtatggttctcaaaaaaaaaaaaaaaaacaattaaggtggaaccaaccgaatcaatttttttttttttgtcacaagagtgtccattttgttatatcaacataagccaaagtttgagacaaacaacagagccaaattcaactaaacataagtgtaagacttttcaagcccaactatgaagcccaagtaggaaaccgcatcaggaagaaagaagaatcattgaaacagaacctaaaacacgtgtcatgaaaaggttaggtgctgaagacacgtgagaagaagaagatcggagaatcactggtcgccgccgaagaagattgtcgactccattgaaacccagaacgccgcgatatgcatgttgaatccggtgatagcaattgtcaattccaaagctctaaaaacaaatcttcaacttcatggaaattcaacttcaaaatcttcccaattaaacgtcaacggttcacgaactcaagcatcatattcatcaatcttatgttggagagaattgtgtttaggcaaagacgaatcacctaaaaccacaacactaacatagatcgcataatttattcaacagaaaaaacaaaaagcggcaacagatagccgaaacaaagccggacctcgccggagacaaagctgaaccataccagagacaaaactagtaaacaaaccggatggagaaacaaagatcgtgttcctctctctgaataattgaagagagagaagagagagaaattgatcttttccccttccaaccgaatcaatctaatatccggtttattgacattagttccaaaatcaaaatcaaacctagtaagaaatccgaaatgccggtcagttgtgggctttcagtttgggctgggctaataaaattaatgagcccataagctttttcaaagagaagaaaggagaagagagaaaccctaatctctattctctcccaatcttatatataatctctcttctttctcttcttctacaacgcctttctctcatgtctctaaattagctactctttcaaaattttgcagcttaaacgaatcgtaaagtactcctttgttgtttttttgggtctgtagtttttttttttttaaagcaagtctcagcttctttgattgggtcaagatattcacgatccaatcaattttatgaaaatcataacttgcgaaatagaaatcggcagtatcactcgcctggatctgattataatcatgattatccaggcccttaatctactggcacaatcttttgaaattagattttgttgttgttgttttgggcaaacgcactctgtcccaagaccattaattccatgttttggtgcaatttcttcgtttgctaaattgatctgtactccaattttaatcatgtcctcgggattattctctgtgatccctatatgggcacatgattggtttactatactttgattctttcgataccaaatagttttacataaatcgttttttaggagttagtttgttatttgaattgatatgtttatatctttgcagaagaataaatcttatctggtgtacgatttatgtgatacagtcaccaaggacggtaattgttttcggatttaggtttaatgaacggcttaggattaaacttgaaacatctaatgaatctttgaatagattatgtgagaacatgccttgaagaacatttgattttgacctttcgaacgaataacttatatatccaaaaaaattactcaattcgtatatcccgtaatttcccaatctgaagattataaccaaaatcaagaggcacgtatctaagactaaatgtgtcataactcactgaaattgttgttgaagaagaacagaagatactgatgatgatggataaaaaaacaaaaagaagatactaatgatggaagtccttcagttgatgaacataatactgaattattgatgatgaaagtccttcaattagacgtttggctttctatcatttaggcccatatattccgggtatgaagccggatcctatagcccgttggtatttgaacgggtcaagtacggatcagatactatgacatattgccacgggtttggcgctttttagaaagataagagatgcattagtcgggactcgggcggtatcttcggcgctataattttaattgggcttttaatgggcctgaatcttttgggcatattatccatttatgtttggaaggtgcatcaaccttttttgaaagtatacatgcagtatagtattcatcgcattcttgtttttttattttttttccctgttgtctatttgaagtcgttaatttttttcagtttaactggtttttattatgaactacattgagaatttagaagaaagagtgcttcatgtattaaaccaattgatgatatattctagggaaaaaacctcactaaccaaaaacttaattaaataaacaaacccacttgaaaccaattaatattacatatattaaaacattcgtcaatgtttttcggtatattgaagaaagggattaaaatcttcaagattcgcatggactaaggagtgtaaattaatgaaacgtaaatgctgcttcattgattaacttctgcaaagatgtcacaaattcatatgacacctaaagattatcgttcatactatacaaaagtaaatatcgatttacaaagattgcagaaactaaaccatacaagaacaactgaaatcatgtacaatcttcaatattcttcatggttgtacgtaactactcttatcaaactaactcttcttcattgattcttctctaaatatcgatttacaagattccagaaactaaacaatccatgaacaactaaatcaaatcctcaaaagacatccaaatttcaacacagaaactatccaaagtaacgcaaatctgaaatgagccaagaaacaactttttacaacgatctttaagtcaaatcagcacctgaatttgatatcgagtccatgcttgccatgaacacacccaggtttcaactgcgaatacgaatacttcttcttcttcaacgtaacgtttttccagaatgttctctttcccgttttcctaatcctctgaatctttaccagctcatgatcatcatcgagatcatcatagtagtcaaagtcatcttcttcatcagtatcataaccatcgcgattgataccatctttaacagaataacgtgaatcttcacaaagagagaccatcctcgagcaaatacaacctccgtcgacgcgatcaccagaagtaaccggagatgaaacagagtacgacgaatctttcgtggaagtgacagtatcggagagagtctcgaagttgaaggtgagggaagtgagtgacttgaaagtctcgaggtcgagaatcgccattttttgttttcttgcttcttttgtgatttttgatttttcactcacagaggaagaataagaagtttgttacaatttatagtttcgagttcaacaacatgcaaaaatagacaaggaagagatattggccgttttgtatcttcttgttagacatgcgtgctgtttgtactacgtgaacaaaaacgtcatgtagtttgtaggtagaatcgcataacggaatgtagtttaaagaaagcaaaaccttctcatgtagtgtttgttcttcatatgctttggattggagaatcggatttatgggtttaacacaagaaaatcaaataattccgactttagtttacaacttttttgtattattacactgacattgacatatatcgttgtactcaattagaaacttaaaaagtgcaaaaatgaacgatccttggattgaacataatttgggatttttcaccactgaaaaaaatccatttataagccatttaagttttaagattagatacgtagcactttgaatgagagtcttatatattaagatgcttgatttttaattaggtaattttatctggtggtttttcgaaaatatcttgccataccaacatactgtaattagagatgtactagagttagctcatcccacttgtagttttgtgaaaaaggagctaaccaagtagctgaggtatttgctaaatctgcaagaagtcacttcactaactacatatcgtttagtagtcatagtagtttaaacttatataacccctttaatataatgacatggtttgacgaaaaataaccaaataaatcactaatagtaacaaaggaagtaagaaaaaaatcatcagcaataattgacatggtttatcaaacttatgtaacatctttaatattatataaagtgaaatgacttgtcgacgcaacttatatattaaggttcattaataataagataaaactttagtgttttattacattctttgacattcgtcattgactaaattttttaaaaccacacttgacatgaatgttacataacaaatgaagccagagtactgacaaataaatattcaatcacaagataatgtcaactatcaagttgttttgacattctcatggccgtgtttgaaagtcgccgcatgaagcgctgaccaaacccaaagaagaactaaatccaaaagcagatcttccaacgtcaaactccaccaaagtattttccatctgatgtattcctatcatcaccgcctgcgccgccgcatctcctccgttgacaaaagccaagcaagccacgtcatcgctgaccttcttcatcgcgtttgcgggagacaatttccaaatcacaccattagctagctctagatcgatcctaggcacttggaaatttgtcgtcgtcgaaagacaaaactcaaagggtgtcgtgctactgacacgtggaatacccgatgtggcttgtgagaatgcttcgataaagactctgtatatgtcgcttcgtaacatagtgaaagggaatatggtgcttagagtaacgcctccatcaccgttgcggtcaaaagcaaaagcgtttggggcaaacaagatcctattcccgttaacggaaatacccttgagtcccaagaaatagttgttgagttttctagggtttgtaatcaatcgagtgtaagagagcatagatcttgcatcaatgtttctgagcttgtacggacctccaccaaagtaaatagcaccttttttcaaagggttttcatcagaaggaagacacaacgcaaacttcttctcgagtccgagtctaggtcgagtcagctggttccaagtggcgagagccgtaggtgcaagccccgcaaggccgaaaacaccgggagggaagtctacaaggaacggttgggggatgcataggtaataaacgttgttgatcgtgaccgaaggagatataggttttagagaagagatggataaatctccataggtgaattggtcagagttacatatacgttggaatggctcaaaagcggttgcttggcaagcacatactccattgatgattttgttgctgggaagagagcattggtgaggagtgaatctacgagttagagcacatacgggggagccacaagggacgatgggacgagggagaccatcgttgcatttacggacaagatagggaccgccgatgtgaatgaaaaactcttggtttgtgttgagtgtgaaggtgaagataggcaagattgtgttcttagagacggttgatactaaggctttaggtggatagtaattagccgagacgtaactataagtaaaaaacaaaatgagacagaggacaagaagactcttttccatcttttgcgtgtttgtgtttaagattgttggaaagttttaagatatggatataattactaggagaattaagaacgtatatatagctaattagagttgacattttaacatatagacatcacacacgttaatatgtacgaacttgtacacacaataatacggtccgaccagaacaactagatatatatattttaaaagattactatatgtatatcaagttgacataggagggccaaccatttaggcaaagccagtcctatatgtatgtcaagttgatagataaatttaaaaactactgatggatgtagatggtcatagactcaaaagacttatacgttaataagaaaaagaaaaaacttcaactagcatcactacttgtggttttatatgtttgttgacaattaatattatatatatagatatattgaaataaataaatagcaatagtttgaatatggaatgtgataatcactgatttgaaagttttctaggatatgataaccatgtgcgcatttttggtcaaattcgaatgacatatctttgctaatatgcgtataaatggttaaattattgtttgagaatattttgaatggaacatatttgtaatcaaccgtattaaaaatagatcatgcatgtcgaaagctagagaaaaagtctggtttaaagacgtagaattagaattggtcttagtatactaaaaccggactaaaccaacactagatttatgtagctcatagacatttcctttaagaccccgtttatagcaaccacaatgcttaagaggattcactctcttaactaaaccaaactgcttctatttcatcagcaacaacgacgccctttaaccccaaacgttgaagtatccacttgtgatggttttcctagtaccatgtccgttaccatttccgctgttgctagagcctaaacgatttcaagaaaccgtgaatcatgattgggttcttgagaaaggtgttagaggattagaatgaatgttacttaccatggaaagtccacctccttcatgcccagctgctaagtacatgttttgtaatccgggcacggatcctatcactggcttcccgtcaggcactatgatcagttaaaagaaaagttcaggttttgtgaacattccaaaggccggcttcaagtacttttggtttggagcattagatgcaagaagcttactgtaagggcgcaacccgactctcactttcctgttacggatgaaatcttcgagggaaatatcacgtaacttaggaaagaattctgcagcacgctcccatatgcaacggatgataaactcatcagcttcagtgtcgaacccgacaaactcacggctgctccctgaaattagagatggctaaatgaagataagagatatattgtgtgtgactgataaatatgttaagcacacataataagaagaacatggattttagtggacatagattgatgaaattaccaagaacaaggtttcctgatgtgtccattgtggctgtcatggaaatagatagcatccgttcatcgacatccaatcctgaaactgaagcactttgatgattcgagtaaccagcctccattatcccatgatttaagtggaatgaatcaaagttctctaccacaagcagatgcccctgcaaggcaaagttggatactgcaatttaaaaaaataccaaagcagtccatttcaagaagcttgcaaaggatcttcacgacaaataaagatatacttgctgctcttaaacaataatatcctcaagaacttggcttgccagaattttgacacctcgtgatgacaaagatacacttcaatatagagatttaaaacgagggaatataaattgggcaatcagacgagacttcaaacctttcttggcttcaccggaacgtccagcggaatgttgcagtctttaagcaattcatgcatcagagatccactccagcaaccagcagctactatagtagccttcttaccatacaagttgcgtttcaaagtcttaacgccagcaaccaccttgctatccccatcagacctgaatagaaatactattaataaaactctagtagaagaaagattagtagcgtccactgaagatttacatagatttggatgaatttgtttttgtgtttcagcctcttaatttaaggtaacaaaattaggacacagccatggtttttagtatacagatatgtatgttatatcgatgcctagattggagaatgcatttttaatttttggttcagaaaagttctgattcagctacaaagattaccaaccttattaaacctgtaactggttcattatagaactcggcatatctgcctgctgttgcaaacgctctattaccctgagtaactcaaataaaactaagtaaaccacaaaagaaaagtgtcagatgagacattcaactatcaaataaatacataaaaagcaaccttctcgatataagcaaccgcacgatgggcgtccaactgtgaatcatcaggaagaaatgcagcaccagtattatcatttacaagtatcgcaggctcctttaacaacaactcagcactagacaaatattcagttcttaacccagcttcagatagctcatgaaccttttgcttcagagcaacacattcctcagtggtcctaccaatgagcaagcttcctacaagtgacaacaatacactgaactatatcatctattttcgttgacaaacagaacgtaactaatggtgtatatatcatctattttcgttgacaacaatacactgaactattatttttgttgaacacgacgaaaatgacattgccaaaagaacctaactaatagtgtatagaacccaatagactaaagtgaagaaagaatcaacacaagatcatgatcaacaaagtcgctcaaagagctccaaattctatacaaacgtaaagtgggtagtcagtaaaaacctgtctttttccagccaagcaactcttcaggatcaagaccatcatcagtcaagctctctgcaagcttgtgccagagttcatggctcctcaaggtcaagtcccacacatcactgcctggtttcttgtgtgtcatccatatatatccctgccctgaaatccaaaaaccacaaatttcaagttaagtcaacttcattcacttcaagagtccagctttatttgcagaatccataggtaatgtactaatgtcaatcgtcagatccaatttgtaagagaagggttgagaattaccggcaccggtggcgccggagcaaggtacggctttatcgacaacagcaacagatagatccgacccggtaaggaattggcgggctatggttaacccaatgatcccaccacctacaacaacaacatcgaaggagctacgagaagctgtgacacgtagtgacagagaagctccatgttgggttctcttggtggagctccgagatgaaaatgggtagctcagtggtgttaaaaaggtgggtgattgaaggaaaatggaaaccattggagaagaaggtttttggtatcgtaaaggtttgaactttcaaaagtcaacgtaagaattagcaaagtattacacttcagttttattatgtgccaattactatctcagtgcttcttcacatttccacctactaatcatcttcttgtaatatggagttaatcatccaagtaggaacatgaatccaagttcctcagacatgaatctaatatgatatccgatcccggtttttttcggatatccgatccgtttctacaagactcaggtctgtctgtgccttggcagtagaatcaagaatcttcttagtattacaaagacgattgatgtcttctcaccaagttctattacaaaatcaagccttacagcataacattatattgatggtagattaaacactacgcataaacaacaaacacctcatctgtgatcttcaagcttctactgtgttataccaacactatgatcttctgaaatgatgggagtggcattgcagttttgctacaatcaggcccgaaaagctcagaatcgttatcttgctaaactacttactaagattgcaaaaagagcgaggagaatccctctgcttgttacaaagatggatcgctgtgatccggagaagtttaccctctgtgcttgatctctgcaaaaataacaagacacaggtcagtgactgagaaagccaacctaaaagctaattccttttctagacttacttttgtaatggtgagagccgaccacaatatatagagtttttaggaacggaattctcagatgagtcaatgtcaatctctggattaaccacactcaagtatagttcttggccaagataccatgaggctagattgtctattcgaaggttccacatgccagcattgtccaaagaaaccaagacggccgtccatgcaccaggaaacacctgtaaacaaattagccgtttaaaaccacatagaaacacatgtaacatttcggtttcaggtgttaagtcataaaacctgcgtagtagatcgagcaactgcatcacccttgttgtatgtgcttctgctattttctgtccacagaccaaagtccatccttcaagacaaacatcattctttaactttacaatcacattgtccattatctttcaacgtctggtcatgtaaatggatctaatataactaatggaaccttacccaacaacaaaaaatgcataaccatccaagtggtagctcttaacagtggtgtcactattttgaaatatgatttccacgaatcccttgaacgtgccgtttatgactgaggtatcaaccctgggatgcctattcattggcctttttgggaaatccaacttgtatacccctgagatgttgtattgctgagcaagctttaggggtgttgcaggaggtaagtatgatataccattaagagttgcacgcaatcgtccctctatcatctctggtggtcggttgacaatcacatacacatcagttactgtaatctggccatatttgaaagatccctgcgggtttggacgggcagctccagatgacaaattcaacctaccaaacagcattttcccatcagcaacaagtaaatattgcagttttgaatagaaatagaaaaggggtaccattctagccaagatatttcctagtatgaaacataactatacatagtcgttaacaaccttaaggatcgtgcttggttcattgagaaaaatgtgtccaactcaataggaggatcagggagtggacctgaagcgggtccttgggaattagagtagcgcaagacagcgactccactagctttgatggatgtagcaaaccttgggctggcaacaatgtagtagtcattactaccagactgatccatagtgaccagaaatgagaaagattgacccacatgtatatccatattcgtataattctgctgaattgtgtatgacccttctgtctcaacaagaagcaggttatgattctgtattctgaaattcaagctggtcgcaatgccactattgtgaacacgaaaacgatatgttcgtcctagtaaatatgaagatatgaatgttttcagagacgagagaagattcaaactataaacaaagtgaagattcaacaaaaagagatgttattataagatacctggttcaacgtttatggtcccaaaaggactaccattagaagcaaaaggtccaaatccattgatgacaataccatccggaggtcgaaggccgttcttactctcaacatccttcctcagcttctgattccacagaagtgtttcagatgttaaaacaagcatagcaaaagagacaggacagaaaacaataaagaaaggtttaaggctatatgtaaaaaccttatggctcttagtataccaatcactgataaagagagtaacatcaccatcaggaagagcgaaaggaaccggaatgatagcgcgattattgacaataatccctccataaccaccagaagctctttgaaaatttgtagaaggaaaataaaagaaactaccaatctgatctttaacttgaaactcataagtccaattccaaccagaaggaattggacaattagttcccaaaacaccatcttgccatgagtttttcctatgttggattccattcctgcatatcaccaccattacaaacaacatagttttagttacaaattcaattatacagatacattgaattgaacttaataatagacattattaccatgtaagaagcaatggctcatcaagattattcttcacattcataacaacattccaattcgtagttacgtttagaatcggaccaggaaattgcccatttatcccaattacctagaaatcgaatttcaaaaatcgaaactttgagattggaaatagatgattaatgcagaagatttttgaaacctgttgacgagtgccgagaggagaagcagagaggtaagagacagtccaatcgaagaagacgtagggatcggcggctagggctccggtaaccgacaagaaaacgaccaaggaggtgcaccataagggaggtggaaagcaccgcattggatctctcactctctgtctgagtagagcagtgagtgaaaatggagaaaaccatgtgcagagagatttgggaaagctttaaaccgcgtcttctgaatgtgaatacagcagaggcgccaaaagagaacatacttgctgggtcctacttcttcagaatttcagagaaattatcaaaatgtccataaacttggagaaattattcaatttaaccccatacgttttattttgaagtcacaatttgaatgttttatgactaaaagagtcaacattcttcatcccaacgttaccccttatacttttacttgtagctcaaattttctttttgtcacattgttcatattaggacaaagtaaaatgagtttttttttgtggaaaaatatcattaaaatctttaatttattgaaaactttgatttaaatcctcaataagtttcacctttgcgacaccgcgagtgtattattccgtagttggattggatgtatgtcaatattcgttgatgacatttcaattttaatatagtttttacacccaaaaaatacaaaggagcaaaataattaataacatcattcatataaagttcttaagaatatataatttcacagtaaaacaattttattctatagaggaatctgacgtagaatcatcgagtaaacttccattgtggctatcaggagatccgataggcttattcagatgaagaggttgctttagagtccaatacattatactcgccgtcaatgtcagcatcatcttctgattcacctgttcatatatatatttacacacataaaaaccaaatctttcactatagtgttttctattggttttgtataaaagttacctcgattatatcttcagggagtaagaaaatggagcaaccaagtttcctggctatgctaatcacataagttgcattcatctttttctcttcatctgtatattaacaagtgtccttattaaattatcaaacatgaacaaatatagaaacatatgaatataaacagttatagttacctgtaactccgtttgtaacaagactccagtttacggatcttggctgcactgaactcagcagctccaagaaaaataccccatcggataagctcttgtcctgtcaaattcaaaactttcttcgttactcacgcaagcccggttcgaaagataacaccggagagtattataccagctgtagagtacttaccctgaaactgtacatgcgtgttttgcatccgttgtttctcactttagcatttgcccattccaatatatcagcgtctgttatctctttgccgtttgaatgtagtctcaagttcttaagaagttgcaggatgttgtatctcatcaattgccataagtatgctggaagatggtttcaaaacaactcattattaaagttggtgattcataaaaacacacaattatagagttgagaaatttttacctagtatgagtttcttgtttccttgaacaatgtcatttccagcaatgttaaccaaagagaacttgagctgcttccctaatttcacaacttgattacagttttctactttcttgaatggcaatttgattggaggcttgcttgatactttccaattaacaatgcctggagacactttgtctagtgtctgcaatagtatccacctgatgaaaaacatatactcaatgtttaaaatacgttccacactgtattagccatttcttatactcaatgcagaaatactaacccatctctgagatcttcaaacacgttgtttatgtatactgaaccatcaaagctgttaatccaaaaccggaatgctttttcttctcttgaaatttgaatgtcatcagctagattttcaagaaaagatatctgtttcgtttgtgttgaaagtccgttcctgcgggaaagaaagaaaacatagttctgatctgttagacccacactaaaaatgttcccttttacatgaactgtttttaatattgaagtgtatttcacctgtgctggaatatatgtgctacaaaagcaagattaagatttggagaaccctcaacaatatctttcgccgtcaagtatctcctacatcccattttgtctgcatgttcgagaacaagttttgctctctcaaatgagcttttaactgctaaatgtgatggattcttgtgctctggtgccaggacatttaatagattagtgtaagcttccgcatcctacaaaaaaccatgtcataagccacataaaaagagtctatcactagaaacatttggtcaaaccaaccactagagaactcataacttgatatcagagacttttggataccttaacatcagaagagaagtttgtgacggttttcttgtattcagtttttctcaactgaaaattcatccatctcaataagatcttctcaggtggtaaactcattagctcttccacatcctgttaatcccaaaagttataacaaagtcaaaattttaattaaaaaatctgtccttttaatgtttcacttaaccaacaggaatctagacaatgagtgagtagtatgtaccttgctatcaccgaccaactccaccagctggggagttttcttcaagtttaggtctgctagcaattgtatctagacagaacaatcacaatgaaaattattcacacattcatcattagcaaaaacaaatagcagtatctagacattatagcctcaccttaatgatttgagagatcacaccgagcacaagatgacgctgcaattagagaaacagagaaatcttagtcataaccatcaccaaaatttcaagattactgatgacaaagtcacttgattcacatacccttccttcaatgatatcttgtgttcctatattaaccacagtacacccaatagccttggcagagttaagacaaagcgtatgattttcatttctctcccatggattaagcatactcttagtattaatcgctcgttcatcgattgttccaggaaccgccacatttataagcttactacatcacaccagaaacaaattcagaatctctatcatcaaagtaaaaacaattcaataatctgaggggagaagcttaccaaagcaaaacaccatcttttgcaacttcgaatagatcattcgaagacggattaatcggaaggcacttgtttagaaactcatctccagagagataattattgatatgagcaacataagaagatttctcagaatcactaatagtatgcaacaaagttgttgtagctgctttaagaaacgcagatgagtttttaacaccgcttccgattattgcgtttacatgcgcttgaagattcagataaatctgcaaatcaaatcaaattgcaattttcatcaccagaaacacaaagatctgtagattttttagagagacgatgatactaacccttaagtaaaactcgaaatcgacttcatcattcaaattcggatgaaaattttggatcaaagtcgctcgttcttcgttgcttagattctgatctccaactacttttgatttccccatccttgacgcgaggtctgatactgttagcttcccgctctctctcttcatgctcgtgaactatagaatttggaaattgacagaatcagatcgaaaatttcaatgagaaacaaacgaaatatcaaaaagcttatggagattttcttcaatttcaatggatctgacgtacgtacgtgagatttcaaactccgaagctccacttgcgtgaattggttctgtaaccatggatccgataccaaaatcccgacgaatcctgacatttttctctactccgaatctccgatcgatctcttaagcgaacttgaagaagaagaagaagtagagaagctctaaagcagagctggcagtgaaagaaaaaattcaaatttatgacgaaactaccccttttagctttttcgattttaaatttcgcaatcaacttttttattagtgttggcaataaaactgtgacctgtggaggggtccatgactccgtattgtcgtttgagattttgtgaatttccgattctaccctttacctttaatgacttctcgtgacattcgagagggtaaatagggtatttatgaagttacggctaataaactagttggagctgaatgtaacggtcgttttgagtaatttggttattcatcctataaggtggattcattttaaaagttcaaactttattgacttaaagtttttgaacaaaaaaagatgactagtttttctcaatatttgtttcttactatttttctgttaattagtttttatatgaaaagcccaaacaaaatttgatgtaaaacttatttataactaaaaaagaagagccaaaaatagcatttaaataagagacatatcctaaataacctagatatttagttattttcattaaaatttaacatatttttgcaaagtttagccaaaatttagtaaaattaaactaatttttatttaaattgaacaattttttagtgttttctcccaaaaatcgagcctatctgaactgtagatttataaaatcctaacaaataataaattctcttaaccgaattatctgaatccaaataaatatgaatcgaatccaaaccgtaattccaatgtttaggcctagatagtcgtatgtctttttggcctaatcaacgcattctcatatttcgaaccgcagattaacgtttagttcatgtataaaatggtcacatgtgaagttgatgtataaaacggctataatttaaaagttggagtattaaatgacatgttttccatttcgattatggtgaaacgacgtcgtttgggaactaacgaagactagttaatagttgttatcgggtctattaacgccaaataacatcgggtagattttagtgtggttaataattaagtttatatgaaatgaccgatcaataatttttacatgtattaaatacccatatacgaatttcacgtattaaataactatattttaaaagttcgcatattaaacgaacatttttcatctaaaatatttcacttgacaaatatttttcgtgtcaatatttttcgatcaaagcattctgaagtaattgcaatgctttgatctacacacataaaactcgttgacaaatctccattatgttttagaaaattgagtcagcaaaaagtgcatgagttgtagttaaaggttgatccgattatactacaaaatataactttattgctcatcttattctactcttaagtctataactattaataatcatgtataaaccactgttataggtaacgtctataatgttataagcatggacaaaatatttgatagcaatagtgtactaaaaagctactcctaaaagaggattaggaaataaagcatgtgccagacatagtgaatgagaaagaaagagagattttgtaataattgagaaaatatgaagcaatcctttgccatgcctactttatctatagcttcctcacttcaattaaattaaattatatttgtaattaagcgattatgtttatatatatacacatttatacattgtttctcattttaccatttgataaaaatattgatataaataaattgagatctttatatggcattataaataggatcgctcaactttgtctaagtaggcaatgaacttaataagaatcataaaacaccattatatcatttggacccctccatgcttcctccacatggttgctgatctcaactaggaagatttccataattgaaacctgattttgtgtatcaaactaagaatattaatgataaaaactgtagtttaataacttttaacaaaaaaaaaaaaagcttaataggttttatccttttgtgccatttacctagcttaaagctgcaagttaagtagtgttataaaaataaccaatattgataaccggtattatttgacaaaccaatcaatcattacaaacttattatgtaaagaattcttgaaatggtttgtttttgttgtaatttgggtatattattttgagataaaattttaaactttacataataagcaccaagccttcttagctcagtggtagagcgcgtggcttttaaccacgtggtcgtgggttcgatccccacagacggcgcatatatttcctaaatttttgtcgaattatttttttccaatttatccccgtcgtcttcttcgattctttatctttttttcctttgcataaacccaaaacctcaaactttttgaatccgaaacgagaaaacaaactatgttacagtccattcatcttcgtttttcctccacaccatcaccttctaaaagagaatctctcataattccatcggttatttgctcatttcctttcacctcttcttcgttccgtccaaagcaaacccagaaactgaagcgtctggttcaattttgcgctccttacgaggtcggaggtggatacaccgatgaagaattgttcgaaagatacggaactcagcaaaatcaaactaatgtcaaagataaattagatccagctgagtatgaagctttgcttaaaggaggcgaacaagtgacttccgttcttgaagaaatgattaccctcgtatgtattttgagttatctttcatcaaaacttgcttttgtttcgtttctctaagcttggcatttcgtcgaacaacttataggcattaagctttatgttacatgtaatcgttacttactcgttagtacgtatttctacgtttccatagagttatgttttcatctgggcttgctttagtgttgttttttgtaagctaggcttttcgtcgaacaacttaacggcgttaggcttagtagtttttggggcatattgttcactttttaatacatagaatcgttacttgtttattaagggaattattggttccgtaatggcttgatatgtctctgatgtgtagttggaagatatgaagatgaatgaagcatctgagaatgttgctgtagaattggctgcacaaggagttatagggaaaagggttgatgaaatggaatcagggtttatgatggctcttgattacatgatccaacttgcagacaaagaccaagacgagaaggtaaaccaattctgcattttccctctgaatgtacacaaaaatatttctagaattgacttgagttttgctacatagaacgaccaggatagctagaattgcttttgcaatgtagtgtagcaaatattacatgttctctggattttatggctgttgttagtcttgccattagttctgtagcataagctgggacaaaggattaaagaatttttgttttggattcagagaaagtctttactagaggtcgtcaaggagactgtcttatctcatctcaccaagaaatgccctcctcatgtgagtaatattaagattagtttcttcttactttctaaatttttcattagcttcatttcatgtttttaattttgtgtaagtgttgctccatatttaggtccaggtgattggtttactctgtagaaccccgaaaaaggaaagtagacatgagcttctgcgtagggtggctgcaggtggtggggcttttgaaagtgagaacggtactaaacttcatatacccggagcaaatctgaatgacatagctaatcaagctgatgacttgctagaggtacttgtgtttgtttaagtatagatatcaatctgtatttgagatagtttgagaatgtgaacaagtctgaggatttttgcagactatggaaacaaggccagctattccggatcgaaaactactagcgaggcttgttttgattagagaggaagcccggaacatgatgggaggaggtatacttgatgaaagaaatgaccgaggtttcactactcttcctgaatcagaggtttgtgtgacaaactattatgtccatgatgctgtgtttgtgaacattttttaaacattgagatacagtgacttgttgcttgatcgtcaaacaggtgaatttcttagccaaattggtagctttgaaacctggaaagactgtgcagcagatgatccagaatgtaatgcaagggaaagatgaaggcgcagataatcttagcaaagaagacgattcttctaccgaaggaagaaaaccaagtggattaaatggaagggtaagtatgatcaagtgacacattgttttgttaaaagagaagactttttcagtaggctctgaaccaaagatatgtcttcttttcttacttggcctacttgatgcgatctcagggaagcgttacaggaagaaaaccgttaccagtaagaccaggaatgtttctagaaactgtcacaaaggtatgtttccaacattcctcgatcccctatgttcaacagatgatagtaatagagaacattgaccacttttttatgtgatgtttaaatccaatcttgataggtactgggaagtatatactcgggtaatgcctccgggataacagcacaacatctagaatgggtaagttcctcataacaccaaaacatttgcaaccaaagtctcgtttctttgcattcatcatagtttatttctgttcacaggttcaccaaaaaaccctccaagttcttgaagaaatcgcttattagtaatatcttttgttacatcaagaaagactcgcaggtagagattgcgtcctgaaataatcttgatcggtatataatttgtaatttggttggttgatatgacatataatgtctctctactaaactatgcacatccattaaacctcaaaagttacatgtgacgtaaaataaaattggaaagggatagaagaaaaaaaagaataatggtagtgatattaacatatctttaaacccattcgaaacggatgggaaaaaataaaatcgtaacttttgtcctatgtgtaccattcagagttacacaatgataacaaactaaaatatttgatgacacagtatataacaaagattaaaatattcgagtaaccaattttaattgatttctttccaacggtttaatagaggagacatgcgaacgagacacgagtcctatagggtagtaaatgaaaagtgattagtaggggcatattcacgtaaataaatcaaaaagtaagggtaaaaatccacggacgtgagagcaattgttatatccatttgaaatcctcgtcaggttacacgaaacgattccgcttctccgcttccttcataaatatctcactcatcgtctctagattgttctttcacacgcaattttcatttctctcttaaccgtaaacgaatctctcttctcaaagttttattttctctctgcgatggctcaagaagatgttactgctgttgctactaacggtgctggtccggtggagacgcatcttgtcttcactgagttcaagcagatgttgctcgttgaagctcaaaaggtcggtgacgctgttactttctacaaatctgcttttggtgcgatcgagtctggtcattctctttaccctaagcgtaagcttgaccaagagcttcctcatgttctctcttctgagcttaatctcgctggctcttccttcgttgtttgcgacgtttcctctctccctggtttttctacgtaagtctctctctctcgttttggtgtttagcttctagatctccatgttttctgttttttttttaggtttttgttcgtttagtgtttgatttcgttttagatctggttttaggttgttttattagaagaaatctggagaataaatcatgtttagaagttattcctctcccttaaacacgatttttttgttcgttttagatctggatttaggtttttgaaatgaatagtttttggaaacttttataacgcttaaaaaactattttaagtggatgattgtgccttttcttaaatacgattactgtttacttatgtggttttgtttcttttttaaatcgttaaacagtgcgaaatcggaaggttcgggagtgacttttcttctcggaactaaggatgctgaagccgccgttgcgaaagctgttgacgccggagctgtgaaagtggaggttacggaggcagaagttgaactgggattcaaaggaaaagttacggatccttttggtgtcacttggatcttcgcggagaagaagaccgtgatcaccgacgagaacaaagaggtttagaatctgtcgtcggatctaattcttcgtcggtttctgaacaaaaaaaactatctattatcctaggtttatgcttttattttgtcttttgtggaatccggtaatcagtaaaccggatcgagtaggctaatgactttcggattctaatttcaccccttttgacaaactctaatcttggtgaaattgcatattaatctcgggctatattatgttttgttgatgatttcgcttctctatctatcttctataatcgttctgtgtttaatctgtgttctttgtcatttttgttggtttagtactaagggtataatcgtctatttggaatgaaaatgaaatggttagtgattagataagacggaattaagaatatttgttgttttggtgtcagagtgttgaatactgtgtcagaggtagtgaaaccataaacctctgtatttgtgctttgtggtttctctctatcgcttattggttacatatttttcgaaattgcccttccgtgtttgggccttgtgtagttttcgattggtcctctttcttttcttttgaccagtttttggggttaacccataaacgccatttggcagaaaatacgatttattaataacatccgatatttagaataggagtaataaaaaacataaacacacgtatacagagtcttttaacaagttggggcgttggctagaccacactgtttggggagagcagaagcgagttcaggatcaacaccgaaagaaccgagccatggagagttcttgtaaccacaaagacatgcaaaatcagcgtgttgcagagcggtgcagcaaggctgtgatgggctcgtcggattctccttgctaaccgctggtttgcactcattcaactcatcctggctcatgccgcagagatctatcgctactgatgtatcgaccaacatagccattatcacgatcatcgccatcataaccatagctgctttcttgctcgccatattattatcctcctctctctttttctatatgtttgtttgtgtttgtggtgttgaaatgaatgtgcatgagaaggtgtatatatatcaagttttagagaaacccgtgaaccagattggattgctccatatagtcacggggatgtgtttttccactttacttttgggagagggtcttttgtcatagaatcataagctttcggattcttatcaattatcaagtatcgattacacaatttccagtccacaaatcttttactacaaatggaaaaagaaaattcaacttgcacattgtatttgtatataaaattctcttttaatcgaaaaaaaacacattaataaacatccgcaaaatactgggcctgatatgagcccaagtaagagtactctaagaagtttcacaaattacgaaaataaaacagttagcgagtattactgttaagtgtcaacaacagttagctactttaaccacaaaacaaatgagaacatcagttagtatataaacgggacaaaatatagaacgaagaataaatccaaatctctagattctcaatttttttgctgttctattttcaaataaatgttttattttctttgagaatttcagtcctattagtgtaattagtgataaactcataagcatggcacatacgagatgattatttggtctacgaaatggtttagtggatttaatatatgtatttttatagttgatactttttcaccatctaatcgtttttcaactacaattactgtttttaccggcgatcactgttttaccgaaacctaaaaagtaaaaactgtatagtggcaatcattattttacctaattcacaattatcttctttttgttaaagagattttaggaaaagcaaattaggccttggccaacgaaggttagaaatagaaagactataacaaatgaccaattttaaaggtatatgagccaatggaaaagaatagaaaaaggaggagttcattcttcatagtcaaaaccatcaaaatttcatttgcaattagattgagatctattgttcatgatgaatttgatgcaacaacagcattttcatgactttgttttctctattttcatactattttttggtgaactttttgtgacgtttttatgataagtatttttgattttataggtttagatcattgatattattttgtgaagtgtgaaccatagctatgcgataatctcggtatgaatctaagcgaatccattaaaatatccttatatttaattagaatattccattaaacatggtaaataataaacaaacaaaggaaaacaccataatgcttaacaagttggggcgttggttaggtcacactctttagggagactagaagcgagcttgggatctacaccaaaagaaccgagccacggagagtttttgtagccacaaagacaagtgtagtcagcatgtttcagagcgttacaacaaagtaacgatgggctcgtcgggttattcttgctcaccgctggtaagcattcattcaactctgcctgagtcatgccacaaaggtcaatcgccactgacctctcaacgactaaactagccatcaccattacaatcaccataattgccaccttcttgcttgtcattttatcctctttattttttatatatttgttgtgtttgtggtgttaaaatgaatgtgcatgcaatggtgtatttattattaagttttggagcaaacccgtgaactagattggattttctttcttcacttttgggatagggtattggtcacttggattcttattattgctgctcttttttgtttttttttggtatttatcaattatccacaatctccagcccacaaatcttttactacaaaatggaagaagaaaattccagagtaatacaactggcacattgtgtaaattttcttgatattgataaacatatgttgcttcttacaaatatttgtggattaatggcaagtaatttgtatgccactataaccaagaaaaaaatacaacagttatttgtatgtcacttgctgattatttgtcactttttttttccggttaaaatttaatttaaatttataacataatattatatttacttttaaaaactaatttaaaataaaatatatctctataaatagtaaacaatcaaacagaaaattaataaaactagtcatgaattattgtttttgtctaaatcttattatccgtacttgcgagtatctaaattacgttatttgttatttacttgataacgatgaatcttgtctaaggcggatacaaaaccaagtaatggatgcagggcaacatatatttattaatgtcatagaccctaattacaacttatatataacttttttcaactaatacactttataactacaaatattcttcttatttatataggtaaactaatcaacatttgcaaatacttttttccaaaaataacatatatgaaaaaggcatttgcaattactgggcctgattttagcccatgaaggatttgtgcttttctagtgtttcgatgctttttaagagcttcccaaactagaatatcatgtaactctctccttgttcattacccatcaattccagatttttgaaattaaaaggagcttaaaaagcttattgcacatttcagatttgctcgcaaataaatgctaaggaaaaaataaaaaatttgaagttgaaaaataagagggaaaaaaggtttagcatgtcttattttatttctggatatttcaacttattttatctattgaaattcattttggatgctattgtcagttttataagaactcaataaccagacaaatctgtataactaaaatattttccagataaagttgatttaattttagatttgagtttgttttggtcaaagtatttatgatcgtaaacaacttaaacctaatataaaatctaaagaccttaaatccagattttacttgggttaccaaaacctgaataaacccaacccaaaacttattctggccactattagctacgttttctttattggcaacaaaagttagctactttaaccacaaaactaatgagaatatcaattagtatataaatgggacaaaacatagaaggaaaaaaataaaaagagaacgagaacgagaatctctctcaatgactcgagtgtcgagactattcggaataaaagaagcatacaaagtttactgcagttttcagacttactcacaaatggtaaagttaaaaagaaagtaatatgaagttgaaaaaatagatgaaaattcatttccaaaaaaaaaaaaagaagatgaaaaataacctttgaccattgtcttagactagcctttcccttcattctctgtgagaaaatccaaatcactagattctcaatttctttacttttactcttctatttaaaaaataaataaataagaatttcagtcctattattagtaatattcatggcacaaacgcgacgattctttgctctacgattttgtttattcaatcactcactgataataaattggtttaaaggttttaatatacgtatttctagatgataagtttatatatttcactcactctaatcttcctcaaaattggtagggttgaaagacaagagcataagttttcaaagataattattgttttacctaatttacaatcattttctgctaagcatttgaaaagaatgaaagcaaatcattcctatgccaacaaaggttaaagagactcaattttagaggtatccgagccaatagaaaaataaaataagaggaaaaggaggaattcagatttcatagtcaagaacttcaacttttatatgcaattagattgagatctatatggttcttagatttgatgtaacaactgattttctcatcaactttgttttctcttttttttttcaatttttttgtcaaacttttgtgatgtttttgatatttgatataattattattcatgttttatgttaagaatgatgttatcatgtgaaccttaactatatgatgattctaaataagtataatttacatttttgatcgttcattattagattttgtagtttcattgtgttcgttattaggattattaattagcctgatagagtataaataagtcttaggtcgcatagagaaccacaatagtattgggtgttgaccagacctataacttgtaacctctagaacctaacaggctaacactatagtgatgtagcattgctcattctagagtagttgtatcaagaggctccaaggagttccaaaaactaacaattattttgacacaaagtactcaaatgacgtatctaatatttcaaggtcccaaggaggagtattaaacaggttcattcaatgtgtagtagagcatgttcacgaaacctcaaaaacgaaaattaatatctcattttatattcccgtatcaataaatgtttttcaattatcctctcctgtttcacaaatgttttatactcactattttaatgtagcatattaatggtagccttgcaagtgatgttgattcttacttagcttaaaagtgatgttgtatcaattatatatcctactccatacatatgtgaatctaaataatgtccttagatatctttagatcttgaataacaatctatgcttatttttaattgaagttactaaactaatgaagagtattttgtataacgttcacgtatgtgaatctataaaattcgttagatatctttagttttgaatatccaatctattttaatttttaatagaagttactaaactaatgcgtagctatgttttatattaaagttataaggcgaaaacatcagaattcaagtaacatatttcgtaaaaagtaaatttaactgcaaaagaacacaaacccggtggattaaggatagaaacatagaaaagactaatgatagaaatgtcaaacgttaacagtagagtaggccaagcaacataaacaacactacagcatgacaactcaaaagcacgatatcttaaatacctaactacccaaaaagcaagctagggattttcagaagcattgcatccatttcgttttttttttttgtttttttaaatatttgtttgcaaaatatttatacaaactacccaaagcgtttccatttttaatttgcagtttaaagcgtttttattttttaaaaaaatatgaaaaaaacaatttcttaaaactcattaatagtttaaagaaaacattgttaataattttcaaaactgccttacaattactacagaattttagtttcgactcaacaattttgtttcccctaatgttcattgatatataatttggtgtataaaaaattaatctaaaaaatttctgatgattaccattttgtttaatttagtggttctaccaacaaaagttccatacttataagctcatcaataatccaacacaattgaaaattttcaaggcaaaaacatttaaccctaagatggcttactacaatattttctctagctagtgttaaactgccctaaccaagatatttatgacaacagtgaaaagcccattccgctgaattgtgttttttctaactgttttctcaatttcaaaggctgcaatgagcagttccaatttattatcctgctatcaacagtatcagtaattttgacctaaccccacctgtccgctgtcaatataaaacttacttgataaaaatattcaaaatttctagacatactactattaattattgtaaagttggaatattataaggaaaaagtaagagaaattgacaaaagataataaatgggattgcttggagtcgtggcaatgtttttggttgcacactgcacatagcacaaagtttcataacagaggtaattgttgcatgtggccccttcttcctaaagctcctttcttaactcttttgtctcttaaattttacacttcttttttcttccttttttcaaattggatattctgatacatgactataaatgttatctactccacacaacaacaaaaaaaacttatttaattccccaacacagaagatgtattacaagatacagtaataaatggaatgcataagtcagctttagaacccataaaacacttggtcaattcttttattagtgaaagtaacgttacatcaagtagtgtatcttttgttagtcaaccatgaaaaaaaacgtttgttatagaagtaaagttaccccatgtaaaaacaaaatctaaagccaacaagaaaactaatagaaaaggataaaaatttattaaaagatcaaaagtaaaaacagactacagaacattgtataaaaagaaataaaaaacccaaaaaaaacacagtagaattttgttaaaaagtaaaaaaaaaaaaaaagtagtagaagaagagtagctaaagcccaactttatattattttcacttaccctacactatatttttgaaaacaccactctatgctcagagacacacagtccctcactactctttctctatctcctacaagtagactttaagacaacttttgtctcagtgttgagtaatgtaaaatacccatctggttatttattacgcatagatctctctcttctctctttctctatttagattacttaaagcagagaggtccgaacatcatcaatcaaacccattcacaactactacgacaatggactacgtaagctccttcctctttcttcttcttcttcgtcatcttcttgtgggttatacaaagtttttaactttttatgttttctcaatcaggaatacggaggaggagagtactgtcggagaggacacgtgccagcttttggaagctgggattggaacgacgccgttccattcactcagtgtttcgagacagcaacaactcaacaaccagcttttcttcactatgcttcttaccctcaagatcgtgatctttacctcgccggtgatctctacgacaaccaccaccttgtagctccggccgttatcattgtccctcgtcgccgggtactttcttgattcatgtattcaacacgacgccttgagtttcttgatttagtcttatgttcgtggaaaatgtttatttctaggctaaagtgggtcaagaaccagcggagaagaagagaaatgtgtcgaagcagcaacacaactataagacggaggcgcgtgagtttaacgcgccggtaagctgtccaacaccggttgtgaagcggaggatgaaggcaccaaagcctgtggatgaagacttgtacaaagtttccccacaacttctctcagtcaaatccaaaagggtaattaaactttaatttaattaacttgttattaaattagtcttatctttgttagtctgcttcgattaatgattttgattatggaaaatgttaataattgagatttgcagaaaagaggaggaggtgggtttgggtgcatttcaaggtgttttttgccaacacgggtgctttgaagaaacaagcgtgagagacttgagtcagaagaacactttgtttttttttcttttctttttctaatcctattatatatatcaaaagactatgcttgtgagagtatgtatttatgaatgcgtaggaaaaaaaaagatgaatgctaaaagatagtagaccaatgtagcttttgcgaaaagcttagccatattatattaactaaactataaatgagacttggttttgcaaattatgtattatattcggctcagatcatctaattatatattatgttgatagtgtaagtgatgggtttggttagattagggatgtgaaaggagttaaagctgagggaggggaatgttgaatagtagcttagcttccttcttctactgaaagtttgacttgtcgcagagataccttactttttttttccgatttgaaaaagaaaggataattatatgaaaattattattgaaaatcagataaatggtctaaaagatagaaaaattgatatttgtagaaattggcagaatactaatgggagttatgggataagtgaataatcattgagtggattaattgaaacttagttggtcgaattattacatttaccagtccaaagtttgtgtaatgaatattgcaatatagttatatacaaattactagataagatgatggcttgtcacttttaactatagttagctgagttctatgtttgggggacttcatttttttttttggggggtcaatttctagtaactaagtaatgataattaaagaatgttggtaggttacaacttacaatcatatgttcttaattatagtggtttttgtcaaatcttcaggataatggtcgatttcaaggaaaaaaaaaattaaggtaaaatgtgagctggtttactatattttagggattaatgtcaaagcttttgagaatgccgtcgtatgtttttggtttggtaagtcggctttgcgtgaaactggatgttgcctttggtgaaaggatgagtacaatctgtcttctaaggtggagacaaactaaactacaattttataaaaaaaaatcttaaatatattaggagataggtactttttttttgttaaaggatttatattaggagataggtacttgtaagaaaattctaaaaatcctgtaattttaatttttaaacataagtaacttatatataagaaaattctaacagagcctggagacaaatacttcgataagcacagatggttgtaaggtcataggggaagttacgcatgtagcaaagccctctacggttgggttgttttggaaaaagactatcatttattggtaaatgctcaatgaatatttatgtgaaaatgtgatgcttttaaggggttttcatgggtaaccgatgaatcaatgaagtttatttttggggatgttaacgaagcggatatcagaattttaaggttcaagggatattcaaatgatgcatatcaaggttggcaaagaacttgaatcatcaatattcttcaaaatacgtcggtgcttacttgtgatgtactagaaagaaaaaagaagtttacaaataagaaaacatttatatgtcaaaaatataacataaagagtttcgaaacggttgtgttgattgaccatttggaataaattattattcaatgttaaatataaagagttttgaaccataatagtaaaagtagtatttgttatttgattccttcaatttttatcatgacgaatactccaatcttttgcatcgaatcaagatgatatcgaatttaaacggatctaatagatactatgaagttcatacctcttaaacaatacttaatagaaaaattaatatcatgaccaaaagagaaaacaaattcccaaatatggtagcataatttttgtttttttttcctggacaaacaacagagatcccattattaccaaacccaaaatacatgaaatgacttaatatcattatgttaccccagctaatatggtgactgatgatccccttcaccttttcttttcactactgacacttttgtaacgtataacaacgttgtcgaaatctcctacatttcgtttaacttttcactgtatactgatggtatttctttggaatccatagtctggatggatcttgtagaatatatgcttatataaccataatattcaattcattttcttggagagatatagccttttttctttagctacaaaatcattcttttttcttgttttgctttgcatttttctcacgatgttttataacttttctatagtacgtctttcataaaagcatttttctcaaattgagttttatccgttgacaaaaaacaaaattgagttatgtgtaaccaaaagactttacataacgttaaagtatcatgtgaatgttgggcgtgactcttaagtaaattatgaaagacttgctttctttcttattaggttacaacttacaactactaaaaatacaggctattaatttcctaaccaaattatttcatctttttatcatcttttgagtaaacaaatgaaaagaaaagaaaagaaaatacacgttcaaataaaggcaaaagtgagtgtttaaaaaagaatacaaaagttgtggaattatggcaatcaaatgtcattaaaggaaacacccacgctttaaaattagggaaagagaacggtagcactctaaattaaagcacatttaaagcaacaagattgatcaaaaaaaagtagaagctaatttgatcaatcttttttttctactttttttttttttactttgtcgcggaatggttgttttattatattttcgtttctattacaatcatagagaagtttttagaattaaatagttgtataattagaagtcaaaataggttggataaaaaataatctttctacaactttttactacttgtgatgaaaagtgggtataaatagcttcatttattccactacaatattaatattttgaataaattttaaagcctttttttttttttgtaaaagaataagtagaataaaataattgttctattcagtttgttttgtttaactattttcttttcatgtttattcctgtactgtttaattatttattgtagacccttaagttgatatgcactcctattattgatatattaatatttgatttaacattcagtcattcatagtttggacgtgggggtatgcgttttaacatgtttatgtataaattttacatttaagtttctcttcgaaacttaaagaaaccacacaaaaattatttttcttaaattttttaaaatttcggaatagtgaaaaaagattttaagaaaaccacttaaaaccagtaaaatcattcaaattacaaattacattcaaagtctaaataagaaagaaccattcataagtttcttattacggtattgtcataaggtgcttaaattttggggatgttaatggattgaggcacctaatacgtccatagacatgtgtttttaagttttaacgtatagaagagaaacgtagatggtgattataaaaacgcatacgtccacgttatcacgagttatggtcatgcaaaactaagctacataccgtataaatttagcttctattctccgtttctcgtttcttacgaaattacatttggtgtaaacaaaattacatagatcacattataaaatactggaaattggaaaacatctttattttgttaaaacttggataaatatttaagctattattttaaacattttttaataagtattttaatcatcttcatattagcgttttaaccattttacattcaaagtgcaatatagttttagtgacatatcattttgttcatatgtttatgtataatgtatttatgaatataaagccaataactcaatcattccgttacacaatttactaattcttctttggcaccggtttgatttcgttacacaattttcaagagaggaggacgccaattaagagtttggacttgggaatttcattgtactaaatttctgtcttctccacttccaaaagttattttgaccgttttcattgtatcctctatctaaaccaccatcatattacatcgaaaaatatacattacattataaatatggcaactccaaccaacaaagagcatttctcgggtggacttgcaaaggttttggcagaaaaatggcaagttgacgtaatgctcaaggcaaagaatagtgatgagggttcagctatctctgcccacaaacttattctggtctcttctttcatcttctctctttattgatatcatcatctgattcaagaatcactatgatttttttatatttttgctttgtgtggttaatgaagttttctcaacgtatatgttcggaatttgaataggcatcaagatcggaggtttttaagaatatgttcgaattagacgagttcaagacttcgactaaacatgtggaaacaattactctttcagagatgaaacatgaagagttagaagcttttgttgagtttatatgcagtgatggctcaatgctttctgccaacgtgaaacaacatgctcgctcactctatcttgcggctgataagtatgagattctgcatctacgagacctatgcagaaccgagcttatatcttctctgagtttgttgaattctcttgacctccttgtgctcgctcaaatcccttttgacaaagtcctcaacgatgaaagtttcagttatataaaaaataatataagtacgattgctagctctgatgagttcaagttgttcgtcgccggtaacccaaatcttgccgtggagataatgaaggtttctctcattactcttactttacgctgttcctcctgtggttcaaaccatagtcttcaaggtatgtactgttgtaattgttgtcgctacggtactcttcgtttgatctagagaatcacaatgtattttaatttctgtcgtatcacttcgataaatctcatgttcacattttaaaagaattggatttcttcgttttctaaaacttatatagcaaatctcatattaaaataattggcttgtatatctatttatatctaataatatcttcttactatgcaaaaacaagacaaatgttaagaaaacagatcgattttatataaaccaagcgtattgtgtaactttattaatcatctcaaaggtacccgcgcacttggactagcaagcctttattaaagtggaatgtgttgttgattgtttcgtgattcctaatgagagaattggtgattgatattgatcatacagttattctactatgaatgatgaaggttgtgaatgatgaagaatctctctgaaggacaaattcgaaaacgagttactcaacatattgaaagttctcttaacggcctcacactttaagatatttcctttttaagtatgatatctcggtttgtagtgaattcaatattttttgtggtttttgaacccaattcctgctatggagataaatgtaggctactctgactccaacgattaatccatatagttcctactagcaaatctgtctagtatatgaattctatctcaataccactcgatctctagaatccattcactgctttaacttagggccataatgcaagcttaatctcacttaccccgcggcagagcttatatgacaaaagcagacaatcactaggtgaaaacaagtcacaaccaaattcgttgagggaccaatattcagagcatgacacaatcttcttcaacttcttcattttctctcggcaagatcaagtcaacttgaactcaaaggccaaacttagattatttatattagaatgacatataaaacatggaaaaaaaatatagtaaattattataaaataatgtcttacaaaaaaataatgtcttacaaaaaaaataatgtcttacaaaatgttttccaatgtacaacgacaaatagaattttcacaatgaggtatattcttctttttctcaatacaatgaaatgcacattgttggcaaaagataattttcatgtcatcgggaaaatgtccaatatgttcgtatgctggatcaatagtagagcttaatgaagggatagaaaactgagtttttccttctaaaatagattttgtcatgatatttgatgtacctagaaatagtttttttgaaaactttttaaattaaaatataaatataaattgatcaagaatgaacttacatgatgaaaccaaaactgcaatagttagaaagaaaaaaagtgtcttcattttcgttaaaatgttcaatattttaacaaaaacaaaaatggaatatatttgtgttttgagttttggttgtgatgttttaaagtcaagatagtagcatatttatatgtgcttttactaatgttacatagtactagtagttaatgttttatcaaacatattttcttagaaatcatagtcaaagaaactataaactttaatttacagtttttaatttaaagtatttcacccgtttcacaaaaagtgttgtttaattttttttttttttttttatgttttaaatcaaatctctgtgatgtagtttttaaaatcaaatctctgttttatctatgtgttttcaacttattaattaaaaataaagtgtaaaagaaaaatttagatgtttttattaatttgtgtgaaaaatggtacagttgttaataggctagaaactatttacctgttgttacatgtatattggcggtctaagcattaggcttaagttggtcgttttgctcttttatatgaatcacaagttataggctagaaactatttagggttcttggtgtgagtgaatagagtgtttaacatatctattgttttggttgtggggttgagaagattaggaattggtgactgactaattgtattaatgttgtaaatctgattaaagagaaaaagttcaattaacgttgtaaatttgattaagtgatttttcaattgcgtctacatttacataataacataattttctatcgttcgatccaaaaagaagttgatctcttccctcaaaacattattctgcttcttgagggtcacgttctcttgtagcatcgattctttttccttctccaaatttatggcatcagtttggaaactagctatggtctggtcatatagtcttatactatttttctaaggtgaataatctctttttatcgtcaaaatcatgatttaggcccatcaaccatatatgcataattgcattcaaacaaaataaataaagaaatacttactttacatagtgaaatatagacgtcgtatggaaaatggaaacaacatcaacaaaaaaaaatcaaaaatcaaaactcttcacaacctatctattgaaaacgaatgcttattgttttttacataactttcaaaattgaattagaggcaataacgacagtgagaatttcaaatttcatttctgaggcaatcgcataattcccaccggcgatcggagatgagcagcgcgagactgtgctctcttgtggcggagctaggttacgaaggcgccggaaaattggatcccgatagcttcgaatggccgtttcagtacgacgatgctcgacctatcctcgactggatctgttcctctcttcgtccttccaatgtcctctctctcgccgaactatcactgtatgttctcatttccgctctcattctcagattcacatcgaatgtctcacttctcaatgttgtttcgtttccggattcggttgaatttgtcttggttttggtgaattaggtttgtattccagtttgatgaagcttgaattgttgcaattaggcaaatccttgtggttttactttcgattgttgttgctagcttcctaaaattttctcattgatcaatgttttgctgcatttagttatctggaacatattagcaatgaatcagattaattttctttgtcgttaatctatgtagttagttcatatatcagtggttaatgggttgttctcttgtttctggatccagatatgagcaatttcaacgagatgggaaactcttagaggtaattcttgggccattctgcttgtgattttttcttaaattttttgagagttaatcatatctagaagcatccgtcttaagatgttacttcattgccttcctatggcgcattttgttctcttcagggcgatgatctagaccaggcatatgatagcatatcagcattttcttccaggagaaataaccaggaggccgtttttggagcagaagaaagcattaaagaagtaaggttagaccttcatatcacatatgcgaatctgtactttctgtttcatgcctattataaggctcttgaaacaagtataactgtccagttttttagtgtggattatcatgtgtgcactaagtttattgaccgatggtgcactgttaaatgttttttttttctcgtgagaagtttattgaccgatgatgcgctgataaatgttttttttcctcgtgagaagttggttaattttgttgagaaatttggtttcatgtcaattaccttgttaggtcatgcgtttacataagttacgtacttgtaggtttctttgaccttggtgttttctataaatgtattttgttattccctttgagaaatttccagggactgtgtttcacatcacttggatgttcatgtatcactagattttgctgatgtagtcgtgtataccaatcattacatggcacccactgacagtttcttttaattgacagagatgcaactttggcgcataaggctgaagccttagagttgcagaggcagctaaggcggttacaaactcaatatgatttactcactggccaatcttcagctcttattcaagggagacgtgctcgagttgctgcaacttctgctgtctctggacagataacagctatagaagacagtttatctgctcgaaatttgcaggtttgatacatgtcctacacaattgtaaagtggaatgcaattattttggtttttgataagtttgtgatgtttccttttgtattttactgtgatttagatgaatggagttctaggaagactggcttccacttctcaagagctggcgcattatcattctggcgaaggtgtccttcgtatcccttctcaatcttttggtttaactttttcatatctggtgaactattgtaaatctgttttgaagctgaaatttttaataggcttcaatgcaaaataccgtcaaattagcagcatttgggggaggaactttagctctggtagttatttgaaagattgataagttagatcgaggttatatttgtagcaacttttggatttcatttttatgaaacttttctataagttgtattttctgtagacatttcttttggatgatagacgaaaaggtggttttcacagctatgtcagcaaaatctaactgattatttcatggaatatgtattatagtaaattgtcatcaaatcttttagctaacttaattggttgtttcatatgtgcagaggatggaatatacttagcatactccgatttccatgcctacttggctggagattcagcctgcacaaaggagctaaatcagtggtttgctaagcagctagacacagtaagtgaatgacattagtggtgaatacattgctgatgatttcaatttctcttcatcgtatagaaaagtctagcaagagatcttattcctagtaccttgtgagaaatgctgtagtttgccactttttgagaatggagagtatcaactgtattcatcttgcactctttttaatgtaattatctgctgtcatatcaggggccataccgtttagttgcagaggaaggaaaatcgaaatgctcatgggtcagtcttgatgatacatctaacatgttgcgaggtaactttgctacagtgtgattttgtatagcagaaatatatccctgtggagttatgtaacttccctctgtataataaaattcctatgttttgaagctattgtgcatctataacttttctatttacaatgcagcagatttggaaaagtcacagcatcaacgtgtagctgaactccaacggcttcggtccatgtatgtattatgtggtactccggcaatataactttcagctttcactttgaccgttactctggatttggataaagtcttttagttgagaaaaattgtactcagaaatatagaaattaggatttttagaattgagggcattcagtatatatttagggcatagaaaattgtggacttttcacgcatacaagttttctcactctccaaggcattttcctggttactcacagctttggaacaagtgagagacaatggattgaagcccaggtggagaatgctaagcaacaagctattcttttgacactcaaatctcaagtaacatcagtggaagctcatattcattttgatctacattctctgaggtaaaaagaacatgcagatctagtcgaacatcaaaggacgagacattgataaaatcatcattaagtctttaacttttcatactgtattctggtgttcatgttcttatctgtgcaggagaaaacatgcagatctagtcgaagaaatctctaccctttatcagaaagaagaaaaactcttatctgaggtttgtttatgtactcaattttaacgtttcaaatatcgtgtttccaaactatgaaaaactaggcacttctttgactaactacacatgttaatccgttcttctttttagactattcccgaactatgttgggagctcgcacaactgcaggacacctatatcttgcaaggtattcagcatttagtctttgctctttacctgtagcttttggataatttggggctgtcatatcattttcctcatcataaccttgtaggtgactacgatctaaaggtcatgcgtcaagaactgtatattagtaaacagaaagtggtatgttggcctggccttcagttttattagtatttctgttgattagatctcttcaagatatgttggccacaatactgtgtgttttccatgtatgaaatacgaagatctacttgttaatctgtctttgatattccaaattttttgttgcagttcatcaatcatctggttaatcagctagcaagacaccagttcttaaaattagcatgtcagctagaaaagaaaaacatgcttggagcattctctctgctaaaagtaattgaatccgaacttcagggctacctctccgccacaagaagccgtgtggtatggtcatattcatagttaccgtccatgctttcctgcaacttttggatattgaaactaattcatcgtttcactatatatacaggggcgatgttcggcactgatacaagctgcatctgatgtgcaagaacaaggagcagtagatgaccgtgacagctttttacatggagttagagatctcttgagcattcactcaagtagtcaacactatcattttacacaaattatttcccctttatctgacattttccaaacctagttttggctgataatcttcatctcttgctgttatagatacccaagccggattatcaacttatgtctcagctccagccatcattcagcagatagttgctcttcaatccgatctgtcgtctcttcagtctgacctcgagaattcccttccagatgaccgaaatagatgcattaatgagctgtgagtccagaattctcaatctcttttcacagaaacaagtatttacgatgctcatatatcacttttgtctcttctctgtttctcaggtgtacccatattcagaatctgcagcaactgctctttgcgtcttcaactacggcacaacccatattgacaccttgggtaaaataattctcagttaccaattttagtcgttaatctaaaccaatatatgaaagttttaactaaatgttgtttccttcatgtattattagccactgatgaaagaacttgatgaaatggggaaaatcaactccaaactctctacagcagtggaagaggtgacgcttgagcaccgcaataaaagggaggtgagtcttaattcttctcctatgaatgtatatatatagattatagtgaaatagacaatctgaatatactactattgttgcagattgtgaagcatcacgccaaggacgtggaacttcaaaggcgggtatttgtggactttttctgcaacccagagcgattgagaaaccaagtgagggaactcaatgcactcgttcgtgctcgccaagcctcatcatcgtaggttctcacttctcaccataagtacatagcacaagtgatctctcttagttttttgtcatttcactttgtgattgtattatctagtggttgattgattttacttactgcccatcttctattgtttctgagtttcgtggtttgttggggttatttgagcttttcttctttcgttagtattttcagttgtataattcttcttttgcctcttatttttttgtgtgttacatttgttctcctacttttggttttaaattcatcattctcaaaaaaataatttccagttcaaaagcaatacaggttattatgaaatgagggcagacagccaattaatacacgaactatggttttagtcactactataagtagatgaactatagagatgtgtagattcatacaccaacttccaaatgatgtcagtttgtgtaaatgaattggccaaatgtttaaatgtgatgtaaaaactaaaaatttcgcaatatgctatcgtaacaaaatgctagaattcgtgtattaattggccatttccccatgaaatgaatacatacatgcatctattgaaatgtcatccattactcacatttctcaaaacaattgatgtcaagattcgtgctcgaatctgtgttgtttagtttcaagatgtccttttccaaatttaaatgcccatctcggaatccatcttggagaggccaatagtaaaactatagttaaaccaaacaaacattgtagtgcataaatactcatgtgaacttattttacggttgatagaaccttttcggtgtttcctaatcaaactcaaattgttagtgctaaagaaagatataatggatgaaaatgaactacatacttatagtgaagaaattcaggatcaaaactctcttggtgaaggggattgtgactcatgagcggatggttactgaatgatcaaacaccatctagtctaggaagtgcgatcactctgttctgtagcacgtttgcttcaattgtaatgtggtcgacaatcagatgccaaaccgtgttgtgtcagataaactttcgtactcaggttatgactcgaacttctgctagatctacatttccgtgacacactgaaaatgatagtaccaagaacctgaaacctatgcgataaatgatcaattcaatccccgagtgtatctctcagcatcaaatggctgtctctgtgcattccaattcaagtctctagagtctggtgctgcggcgttcattggtgcaaaggctgcaacataacagagttacaaaagacaactgagaaatccagaagcaaataaacgtaatttaaaaacgatatgtaagaaacatagaaaaggtatatatcctgtattagatatgcatatcagtctatacaaatcagagacacgaaacgacagagagatcaacaaccgataattatactatgcaactcaagcacaacataccacaccctctaacgcagatggcgaactacaaaacaaatcaatataatttcatattcacctctccattaactgagatttgaaaatactttgcaatatttccacttatgatatatcccagtatcagactcatgcaacaaaataaggatcaatatgcttggcttaaacctagtctcaagtgcaaactgatgcgtcatctttgttttttcatactaacaaatcataacctctgttcatgcaggaatagaaggagtatgaatatagaatatcctgcaatacaaaaagatactaggcgatgtagactaacctttttctctcattctcctttctcagtcatactcaaatttgtcccggatttgactcactttctcccagttatcatcaccttgtgttgttctattaaacccctgctcctgctgtcattttaaattgtcacaagaatcaaaataccaaacaatatcagattatagaaactagacacaagaaaacaacaacaaccaattcaaacttataaattcaatacctttattgaatcattataaggacgcctattcctgcaataaccagagaaccaaatccatcaatacaccataaaatcgacaaataagcacacagtacagtaacattgctatctccacaaataaagaaacctgtatggattaaaatcttcatcatcttcttcagcagactcataattagcatgatctctcgcaattttcttagaatatccttcatcccaataaagcctctcccagttttctctaacctcattatacaattccatgtacttcttgcaccatggctcatgctcctaatcatactaatccaatcagtaatcaaaagctacacattcatattcagtcctctaaatcctaacattgtgaaaagacactgaccgattctttaagaacgagacgagttcgtcgcatgaactgctcacggagctgtttccggcgcttattggggatattgtctctcgggattgtgaaacgctcacgcagaggtacgtgatctccgatctcgtgcatctctccgtcgacgatccaccactctgatttctcctctttcttcttgagtggcgatagagagggaaatttgttccgccgtcttggctgacttgcctccgttctcatgaaccggagtaaggaagctccgttttgaagcgacggcgtcgccgaaccgagacgtcttgcgacggagagcatagctggtgaagttggtaagtgagcgttcactgagtaaacctatttgcatatatgattgtaccaaaccaaaccaaaccggtattgcatttatagcaaaccaagtcggtttttgttagttcgtttattttttccattgatgcattatgatccgatgatttgtatgcaactatacatgttggagtctagaacataaataacttggttacttaattgtcttgcatcttaaagaaagaaacataagcaaagagccttattttgcacacatatacatatactctttagaaacaaacttactcttttattagactatgcgattacggagagagatgaacggaagaaattctaccaacactaggaccggttttagccggatcaagagggaagtaaaacggataaaactcgtaccggacatagcaactactatacaaaacacgacaacctttcttgttgtggcaagttgtcatgaagctcccgaccgcagttgcaaagcattgagcgcaatccaattcgcttaagtctctcgtgcattggaccaaaccgtttagtgtcacaaaaggtgtcaattttgtcttacctttacctaaacctttattcttaggtaaaacagcctcagacctaattttgtcaaagagtgccccgagctcattatcgaactttttggggtcgatttcggttacgttagcgacgttgaagtatataagaccagcccccgtgtcaagcttccctatgaaattctcttggctataacgtaagaagcagaaatcgtacaagatccttgagtcggattggttctgacacacttcacggattttcttggccgcgtcttggatacacgtggagcaatcggtattgctgatatctcctctacattgagcaagtccatacactttctctttgttgttgtaacttgaagaagttgtggtcttgaaaccttttgaaggagtctttgagacaagcgtcgcgagaagagaatcgatgttcttggagacttggctgcttgctgagatgtttgaatttgtgttgcagagttgccatattgaatctgctgctctgcagctacatacaagagccaatagaaggaaacatttcacaactaatgtcttcattattatttcttaataaactttacagtttgttttgagtcactagaagaagagactgattttataccaaaacgttatctattctagaacgttgatttttttagaagtcggtcaaaacgcataacaacaagtgggaaataattgtttatttatttatgatcaaatacaaatttttgttgaccgagaagtctatattgtggccaaaatcttgtgagtttgtgaccaatcaaatcagtaaataaatattagttggtcaattttactttgtttttttcatttgtgtattgtagaaagacaaaatggataatatattgaattgaattaaaactaaataattttcgttggaagattccaaaatggcatcacgtgtaggtcaacatatatggagcaggaattattgaccgtcgatttatttattgcttcttatttccaaacgtcaacgttaacgctaaagtggcgcaacatcgaccacttctctctacaaaaggtcttcaatgactaatcatattacataatatcaccaccacaaaaaaagaaaaaatataaccaccattgaccacttctctgtttcgagagatgttcgtatttattttacgatgattttttgtacgtgttattgtgcacaatttcagccttgatgaatgcctatgttaggcttggtttgaggtgaagattccgtattgcacaaaaacttgttccggtacttggtgtagatagatactaatcaaaataatttgaagatttacaagttggtatggaaatagtattgataaagaatttatatttatctttaactaaaattttttttatattcttttttatttgggtttgtagattaccatttaccaacatatcttcttttcatgttggaaaatttgttaaatgaaaaggcacatatataattaaaaatgaaaacttcctgctatattatttgggaagtacattttaaatataatcttattttttgtaagtaattacataggtatgccattagaaataaaatttaaagagtaaattaattcatctctttaaaaattaaaaagtcaaatactaatttaattaattaaatttaattaaaacaaaatacattatctaaattatcatattaattttttattaattattatagttcacctctcatctttatatgattctatttttgcaaaaaataataccatcgttataaaagaataattatatttttttcgcatatgacataacttgaatttttaaaaagaatataaactgttcaatacatgaaaaatattataacgggtcaaaaatagatttaagaaaattttctactgagtactgagtcataatttgaatatttatattcaatttcatacatattattttaaaatttataatcttatatattataataattaataacatattatatttttttatgtgtatgatgtgattcaatttttaatacaagctggaaaatcctagaattgacgggtttaaatcgatactaatacaagatggtatactacaagtgaaactctaaaaaattaacaatcaaaatacaagtgtataattttaaacactaaacaatataaataatagcaacaaaacatatacaactcgcagtttactatacatttaaaattaaataaaataatatcatatatttataatcatctttacaataaaagtttttagtttaactaaaatataaccttacctgcggtatactgcaagttaaaattataaataagcagattaccatcacgatgtctgtaccttctcacatacacacctatcaaaaacttaaaacctttcaaaacctcttggtatattcaaattaggattcttcattcatggaatcattattccaagggttttgggatgtcttatgaaataattttggcagaagaggatgtaaatttttttgaataaaaagtagtcagcaaaacatacgtttttttggggagtttttagataattaaatcagagaataaggttgggcatatgagtaacccattcgagttcgggtagaacccgttcggatttgggattaatgggtatatgatttactacctaatagaataattttaaatattcggttctggttcgggtcggatccagttgggtttgggtcagtttgcacaaaatgtttcagaccctaaaaataccaaaaaaaaatagaaacgagaaatttgtatgtagatagcgggtctccaaaaaaaaaaaaacttttaaatttgttaagttttaataaatttaattatatttgaatatattttactaaattttgacaaacataacaaataatttttgaatagtttagttgttttaaatatttaggtccaaaattaattgatatatttagatttataattataatcttagataattagataatattacgattaaatataattaatactttggatattaaattaatgtttggatttttgaataatctttttgggtaacgggtaatttacggaccaatcggatatccacgagtttactaaaactctacccaataaggaaatttcctaaaattttaacccgccttaacccggttttttggttcgggtattaggttggttatcgggtccgttctttagttagccctattaaagataatctaatataggccccaattaggttcacatatataaccaaaatactatacaaagactaattctaagttacgccaaaaattatatcctttattacaaagaaaacatgttttttaccaaaacaacttgtatacaaattttacacatttacttaaaactacatatgttgtatttattataaaaataacatttttaaacaaagtcaatctaatgcagcattatatgcaaatagtacaaacattgaaaaatattatgacatcatttttatactatactatttcttgtgtaattcgaacaaagtatacaatttaatttataaaaaatattaatgcccgtgttgtacgggttatgatctagtatgtgttgaaaattgaaggttgaagcgaatgaaccaaatgatagtggggtaataatctactagagagtgagttgtgtagggctgaaggtcgaagcaaaagaaccaaatgatagtggtctaattgtttctattagagaatgagttgtcatgtaggccaaggtcaaagatcaattcttctcaaacgtgaaattaactaaatcactccatttgatccagtggtagatttagaataagtttctaatgggatcaaatgtattacatgaataaaaataaagaaactcgtacctatgttaacgaggtcaattccataaattttaaccattttctctaatttttcttaatttttaataacaaatcagttaaaatataaaagttattggggtcagttgatcccactccctccaatgtggctccgccactgatttgacccatcaaaacagtgtcacgttttatggccattagaaaacactcaccctacaaaattagtcatgtggtaaaaacccgagtcacacgctaattataaaacaaaattaagttgaagcgaacacttggaggatgaacgaaacaattgttattgcaacttgcaagttagtaataaattcaatatttcttttgtgtgtttgtgtctgttactctcatttgacttcaaatccagtctccaaaactatcttagaagaggtgaatgttacagtttgttaccatcgcaaggttcttgaggaaatcgtggagtggtcattcacttctttgaaacaagttcattttaaccactaactcatacattacgaccaaccaacaccacacaataacatcatttcatgtactcattatgtgaatatgaccaaataaatatgtctcatttgagatttaatcataatcatacatccaatatccattcttcagttttaaaatgcagtggtggtcaccatgactcacctatgacagttagtgtatccaaactaaaccgaagactgaaccaatgtgcaagacggaattatcagtttaccactggaaccttaaccggcctattcaatcaaaccaaccacccaattaagtcaatcaatcaataattcatgaaccaattagaattctagttaaccggtctagcttacatgttctcgaatttgattcaaactttaaacagatttaatgaagcaatttaaacagatttggaaaaaaatctcaaaactattcaaaccacagtaaaatatatttataaaatcacaattaaaaatatagcattaatcaactaagctagctagcgccatgcacttataattttacagagtttctaaaatatcctgactcttttttaaaattaatactttgttaacaatgaccaagtctaaaacttatctaaaaacgtgtcaaataagaaaaaaaaattagcaatttgaataattcaagatccctttaactcggaactaaagaaggtaattatttttaaatagatatgttctgtgtgaaaaaatctaatatcttctatatatatacataacctttcttcttttcagttttaaaaccatcaattcattttaatcatcgatcggtgatgaagaaaatctttcaactgtcatttactgtttttattattttcatcagtcttgtgctaggttagtctatacatttagaattatattaatatattacatatactcgttctacaacaaactgattttggatatcatactattattgtataacatcagttacactaagttatgtaaaattatagcaagagttttcactataaaattacacaatatcatatttagcattcttatgtctgtttcacaaaaaaaaaaaaaaaagcattataatgtctaattcattttagatttagacaattgagttgctagacctaaaaaccaatttcgaaatgtatatgaaaaataaaacaaatttccacctattttggttaattattttaattattaaaaattcgtcctgatatattgtaagagttattgtagtataaatttatacggcatatttcccttgttttatttcatcttcgattctttatgttcgtggtgcaaagatagatatgtattttgcctcataaatgttatgctccatagtttttgatataaattcatatgatatccttgaataaattttacgtaatctgtttttagttacaatatacaaagaactctctaaacatttttctagattagaaatatttttctctagtttttattaccaaactgacattttatattttaaatattatgaaaacaggagtggtggggaatgtacaacaaaaaagaagtaatcgatgtatcgactttccagttaacccaaaaactggattgtgtgttctcaaagattgtgagtctgtgtgtaagaagacaagtaaagggttagagggtatttgctggaagtttaatgccaaaggaaaagatcctaagcaatgcaaatgttgtggtttatggcctccactttactaatgttgctacccatttatttttaataaatattcgtattacaaagtaataaaatatttttatgaggtttgggacctattattttttacttgtattcacttgaaaaaagtaacatgaagctcagaattgtgggtgtaaattgcggatcgaatctactccttctcgcctataaaaagaacacctcctcctctcattttcttcattagtttttgctcagagctaaacgaaattctctcctatttttctctttctttttaaagtaggtctcaagagtatatgatttatttaaaattcgaagattctactatcgagtattgcgataccgatcttattgtgattgtattctttctttttatttttaaatcaggatttcgtgattttaccgttgggtggataaaatcgaatagcggagcgaagttagataattttttttcatatgaagtaaatcgaggtttgaatacattagatgaggaaaaatcatattataagcatagtgtaaataccaaccatcactaaacacccacaaaccttaattcatttgttatccgtaattgcttagcacaagaaataatcaaatattatttaaatagaaaattaaaaaatggcaattttgtatagcaaaatatgttattcttttgaaaattccatctgttacacattcctctaattctatcgattggaaaaatagtattagttacaattcccttctaaagcatccaatggccataatttttttatgattgttaatgaagagaaaacagtggacagtgtcatcacatggaattggttgtggataaaacaaaacaccccactccatacatgatccactcttctcctctcaatcttcatcctcactaatgaattaataatacatttaaatataaaattattgaattcattatttgctcgattcggaaaatcgtaattgaattcagataatggaagctagaagactcgcgatcctctgttctcacctgaacccacctggtccgaacccgacccgagacccgactctcagggtctccgattgtagctctggttcttccggcgacgggaaagtggaatcatctactctccaaaacgactgcgttttctgcaagattatccgtggcgagtctccatgtctcaaggtttacttttatgtctctgtttcttctaattcttatacagaacagaactaactaaactcttactttgatgcagttgtacgaggatgatatgtgtttgtgtattctggatactaatccactaagtcatgggtaataaccatgattctttgtttaagatttaccatttgctctgttatttactgtgcgtctatgtagttttgctttggttacttgattacttggcggagttggtttgaatgtttatcaatggatagtgttatttacatgtgttagttattcttgaatctaaaaaggtatgaactttattttgtgtgtgtttcaggcactctcttatcattccaaagttacattatccaaccttagaggaaactcctccctcagtaagttcctcttcctacattaaaatgttttatgctcatggattttgcgtgttttgaacatattaatttgctagttttgtgttgttgttgtttggaagtattttagtatatcgaaaatgtatatgcgtataagattttgattataggtctcctccaaggagcatgcaggttgttgctgccatgtgttctaaagtgcctcttatcagtaacgccatcgtgaaagctaccgggagtggtatgttcgatcacttctcatttctccatccatttcttatatgatgagattatttggaactgtctttacatttatatttctgctggaattgcatagaaacctgagcattttgatgatggagctcctcctactttcccttagcaaccctgaatctatatgatcccaaccccatttctctgcacattttatatagatggttcacggaacctttaaaccatacttactcttatgctaaacactggttacttagaagagtaaaagactcgaagtatcaatctcgtcattagtttacgcaaccaatggatactttacattgcttgtgaactaggtttattgttcttatttagtgatatagcaatctttttgcaagtgaaatagagttataacggggtttaccacttgctgtcatattctaaagtaatcttgccattctttctggaatctttaaccattttaaggtgtatgattctgactctcattcgttgttcgaaactatttcatcttcatcagactcatttaacttattggttaacaacggcgcagcagctggacaagtcatatttcacgttagcacatactgacttccccaactttccatttctcttatttcttgacgaaggaagtttctactaacagttccttttttgtttgcatttcagacacacattcacataatcccgcgtaaggaacgtgactgcttatgggcttccgaggtacaaaacaagatcaaaactatacattttgaaaggtttatgaaagttgcctgatgtgatagtcttttgttttgtttgtgatgacagagcttacggagacactctctgaaacttgacaaggaagcatctcaactggtatcgtgtgttcgacgacacttgtgcagccttcctgaagaacaactggttcaaccctcgtaaaagtcccttctcaagaaacccattgttgtaactttagatacagaatccaaacccaaagtatattctgtatagttcatattcagtctcatttgatttcatctaaattcttgaatctctgttactttatcaagatttagtgatacaagtagaagttggtctcattcaaatcagaggcttgttaggttcatctccagtaatcagtctcatttgatattatctaattcttgaatccaaacccaaagtatattctgttactttattaagatttggtgatagaaaagaagctgttaagtctcattcaaatcagaggcttgttaagatcatctaactagtaatactcttgcatatatataatccaatttgagatagaaactcagcattcttctccttcacagcaaaatcatctcttgtgttccttctccatccatcccatagctacagctagggctgcgactttgaaccaaaccaaaaaccgaaccgagctcaaccgagatttttgtttccggttctctttgcctacaaacattttctttaactattgcttgcagtttttcagaaaaaccttaatgatagactaatactatttggtgtaggctgtgtaactgattaaggtttttctttatcataatagtttatcagccactgcctaacaatagtaattattgcaaataattttgggatataacgagactaagtctaacttcaaattgcaaacaaccaaatccaagtcgcatttgggactaagtctagctttaaattggaaccacaataaagtaagagatatttttttgttctccaattagaggaattagttcctcccggtcccacgtatatatgaagaactcgctcgaagtgatagagagaagatgaaaatgattacaaagctaatatcttgggtgatatggggaggaaaagagaagggtcatatacgtag

SEQ ID NO: 857 - DNA, 66084 bp, Arabidopsis thaliana
aagctttatagaggagctaccaacggagattctaacgatgattctaagaaaattaccaggaaaacaagcattgatctgccgttgtgtctccaagacgtttcttagtgttttagactctccttgcttcatggagagacatcttcgtgatgatcatgatgacggtgaacctccagctttgctcacttatggagtccatgatgtagcagtcttttataagctgtggatgtgtaagacgatgctggaagagagtgatgaagcaaaagtgttgaaggtggacgatcgacacctttggaattatccttgcatagaaacacaatcttattttcaccctataagctcgggtggactaattctaaccagatgtaattctaatagtccgtttgtcttcaaccctatacggaaagaggttatgaagataccagcacagggggacgaaaacgcatggaaacagcctctaggattcggatatgatcccaaaggaaacactcacaagatcattagtgtttgggagacacaagagcacgtgcttgtggccgaaatattcagcctcggagatacagacacaaaatggaggagcttagacatctcctcttccgcctccgctctacctttcggccatgtttccttctcttcttccacggtgacaattggtggatatgtttattggactgccactataagcgaggtgagtagtgtctaagtaatagctttgcctcttgttttcataacaattgttaagctgtcactaagtatgatgaaagtcatgaatacaaatgtaaatagggtgtcagacaacaagttttactattatagcgtatcgataatttattgtatacatagaattttggattatacctttaatttattagtattttgtatgatcgtagttttatttcttacaaatatttcagggatctcaaggggcttgtacatgtggttgtcgatctgctgagacaggctatcggttggaaactaaaaattggacaaagcacatggtcctatataggagacatttgagtggtttcctcacccaactatcatccaggggtctctcgtccaactcttccgcctcactaatcttcgagggaccttggcaatggtggatttttcttccgaggagtgtttagggttgtggacactgagagacaaggcgagaggagaatggtctttcgactacagatttgacgccaatgtgttcagagacaaagtgggatgcttctgccgcggccatgactggagtactaacagattacatgtggtcggtgcttggaaggaaggattgcttctacggatttgggactctactgtctgtatttacttgaatttcaagacaacacgtatggagtatattgggtttgagaatgagattcaaggattaataagtcgggatttcatcatcagttatactcctaattatctactacgtctcaagacttactatgaccaatcaagagtcatatgtgctcatcctcatgctggtgcacgtcttcgaggacgtctccattttatgcttacgggcgtagatgatcttctttatgagtttaggtattgttttgatactttacactccacatttgatgagcttattggttttaggtataatgaagaccgccgtgaaaaagacaaactacttgagaaaattgtaaaaatgaaggataaagctgaatggatttttctttaggaccatctcttctcatgagaaccctttccctttcccgttttaaatattaggtgagtctatacttccggatcgagttgtttaattagtttctgcctgaatttgttctctaaaacaattcagacgttggagcattatcattggaaaacaacaacagtcattactcatctattatatcaaaggggcaacacaaaagagatttagcatatagttttataaaacaattccacaattgtcattactatacccttagacacaatttgcaaacaaatcatgatttagctttgctttggaactcttttgcttatatctcttttgttttcattccaagggcggacaatattattgctaatatagttcttatggctatttcgagctcctccacttttggtgtataagattctttcatatatttttttggtatttgtcgatttgatccataaataccaaactagcaatagaagtcatgtccaacgacctaacccccaatacaattttcaaattttactttaccaaacctaattccctcatttttcttaccaacatgagtcgttactcgttaggccaatattcaatcaatgtgtttttagatgtaaacaactgcattcaatattcatacatgcaaatccaacttaaccacaactaatttcataaaagaaaaaagaaaaaaaagtatatgttttcttctgttacttgttcgtcttgttaacttctaacctacaaatgtagctgctatctgtaaccagcacagttattttccttgattattttatcgtcttcaatttaataatttcggatcgaacttctaactacgactaaaggggatggatctgcgtccaagttggccatacgtgtatatattatacatagaataattcacagacctcatgatttttattttcattttggttataagtttaatatatagatgctatctgtaaccagcacagttaaaaagctcttcttaattaccatattaaacttatatttctgatatagctaggacgcattttcctaatagataattgctttttaaaagaatgtctttttgtaaagagtgtacagaaaagaaggtactaggtaggcggttttgtacatatgacattgacgaatcttttttttctaatgaaaatttattcttaacaatatttatttgatatcaacttgaaaataaatttataagcctttgtgaattctcacagcatatcacgaccacttgaaatttgttttttcttacattttttatatatatgatctcgcataagagagagaacctgtaacgttgttttattcttggtcaagtgtgtattagtggttatgtaaagactaaatagggtatagtcgtatagaattcgtaattgtatatgtgaactatactaatttaataagtgttagtttatatatgtatccatcttttgtcgaggattatatgtatctagtttgtacttacatttacaaaccagaatatttacaaacagtgaaaagtaactttataataaaacatgctcaattctttatatactagaacataaatcaatatatatatatgtagaaattaactaaattaatttcttttaaatgataataatacatttggatcaaaattataacaagctttaaaaatcatttaacattacatataatttggtttaagcaaatagtactgtagcatcatcataagtaatttaacgtagaaaaatgttgtaacatcaaatagtagttcagtgttggtctcttatgctagttctagaggtctttgggctcgtaagtcgtatctacaaagacatttaacaatttgatgagaaacaccttctacttgagccttaaacattatatattgtggtcatgctatgggatacagagaacactcgtcgatgagtggttaatagccttgaagacatcaaattcatcctttctagttgtatggtccctaaaaaatctccagatcagattaaaaataataataataataattgcatgccttagacttgatcggaatgagattgatgaaaaatttggagttctatacttcgaaggataatcacgcatttcataaaattagttgattatatgttcttcaattcaatcagagactccaactagatcgccattcgattaaggaccataatcaaatagtctctgatagagtctatgctggaattgaagtacatataatcaaccatagagatgagttggagatatacttacggagccttaggaagattgccaactctaaaaataaatataagttcctaaagtgggcatgtagtatgagaacgaagaccatatgaacatatgaggtaaaattcgggcggccatcaccaatcaatgttcaaattttcaaatgctcgagagatacgtcagtacctctcggaacaagctctcgtgttagggcagtaggtgctttagggctttgaaaagtggagtcatgggtgctaatgaatttgatatttcatccgccttacgttcacggaccacgaatgtatataccatcatatcattgtgagaaactatgccgcattatcaacgactttttggaagttgagatatatatccatcaatgaaacttattatggtttctattcaatgctacaagaattgactaattataatgccaaatacagtattgaagtcgcaaggatcatactacaaaatgtgtccataataataacgttttttttcgtaatccataataataacgtttataaattatagtgttagttgttaacatctaaccgtaaatacaaccaactttaacaaaattttttttactatatcggttaattgactcttgtataagttaatatatatccaatgaataacgccatagacttcaaaaattcaaacgtatatatttaaaatctgagaatatctcctcaagaacagtgttaacatctaatcgtagatacaaccaactctaaccaaaaaaatgacatatatcggttaattggctcttaagtaagttaatatccaatgaataacgccatagatttccataaatctgagatgatctctgcaagaacggaggtttttttttggtcaataagaagaacaagtttatgtactaaaatgttcctttagaaagaagtgaacaagttggagaccgtgcttgtaaaaccccttatacaatagtagactttctttcatttaagaaatttaaaaatgattccaaataaaataaaataaataataaactttgacattcatgtaaaattttacgtcgatattgtaaaacaattacatatttattagcaaatatctctcaacgtcaaaggcccggcaaacaattcctaatctccgcccgttacggtgcaacacacaaaatgataattgaattactatttttttataactatattacgttaaatgatttattaatataaaaaaacgtaatttaatgttccattaaacaactatataaaccaacttagcgaccacttaagcatttcccttactatttacgttctcttctttctcctccgacacactccaaaactcataaatctatctgatgcgaatttgactaactctttcgtaattcaggatcttactacaaatctttaactcaccaatcttcttcttattcaaagattagagagaaaatggacaacgagctgtttatgaacacagagtttccaccaccgccggagatggcgacgcatttcgaacaccaacagtcttcttcatcggccatgatgcttaattgggctttaatggatccaaatccgcatcaagattcttcctttttatgggaaaagtcaacggaacaacaacaacaacaaagcatctttgactctgctttaagctcattagtctcatcaccgacgccgtcaaattccaacttctccggcggtggcggtgacggttttctcatcagagaactcatcggaaagcttggaaacatcggtaataataataacaactccggtgagatctacggaactccgatgtctcgctccgcctcatgttacgcaactccgatgagctctccaccgccaccgacgaattcgaattctcagatgatgatgaacagaacgacgccgttgacggaattctcagcagatccgggttttgcggagagagcagctagattctcttgttttggtagtcggagctttaacggaagaaccaatacaaatcttccgattaacaacggtaataacatggtcaacaactccgggaagctgacacgtgtctccagcacaccagctcttaaggctcttgtttcaccggaagtcacacccggcggcgaattttcccggaagagaaaatctgtgcctaaaggaaaatccaaagaaaaccccatttctacagcttctccatctcctagtttctcaaaggtacacaaaattttcccggaaagttataattttttcgtcaacttttcaaaatttggaagacccgctttttttctagcgtcactgttggaagaacccagttctttgaaaagtcagcttttatataaagtgattaactttttgtatttttaatttcttagacggcggaaaagaatggtggaaaaggaggaagtaaaagttcagaagaaaaaggaggaaaaaggagaagagaagaagaagatgatgaagaagaagaaggagaaggtgaagggaacaaaagcaataacacaaaaccacctgagcctcctaaagattacattcatgttcgagctcgacgaggccaagcaaccgatagtcacagcctcgccgaacgagtaattatttctctttactctctacttctcctaaaatcttatatagtaaagttgacctcaattatccggagtttgttaaactccggataaaattggcaaaatattctttagattcggttaaattttaaaccaaaatttcgagagagtcgggctaatgtatgagttggaacactagttgcgaggcaaaataaatgctaagaaatttataggttttggcacaaagaaatgtataggttttggcccaaaacttatcggatatgaagataaaacaaaatataatcacatttagtgaattcttgatgacattgcaagttcaatgatctagtttaaattttgatcagtactgttttttttagtaataaggggataaattaaacctttattagttgtgttaattgaatttgggtttgattttgttctttaatgttggtttaggttcggagggagaaaattggtgaaaggatgaagcttcttcaagatcttgtgcctggatgcaataaggtgagacttttatttttatacttttaagtacatgattatcactgattatttttcgttatgaactaaattgttgattagtataattagaaaattaatgtctttgtttttctttgtttatacgatgaaaggttactggaaaagcactgatgcttgatgaaattataaactacgtacaatcattgcaaagacaagttgaggtataattattatttggtttcatctaaaatctaattaattgtttcattcattaatcaccgaatttaaattatttgcaatgatttttttaatctatttttctaatattttgtgtttaataatcatgggcagttcttgtcaatgaagttatcatcagtgaacgacaccaggctggattttaacgtggacgctcttgtgtcaaaggatgttgtaagtcaccttaaacattaacatcaatttaacaaccattaataatgataatttgtaattattcatttctcaaatccttgttttttttttgctttttgtttttgtcgtcacttttatatatatatatatatatatatcttaaatacttttttcaatccacccattagcattaatcaggcagctttttattttcttttataaagtaccttttgtaccttttctattgaataatatgcaatcttttttttttaaatgtgttttgtgtaatttgattttttttttcagatgattccatcaagtaacaaccgattgcatgaagaaggactccaatcaaagtcttcaagtcatcatcatcaacaacaacttaatatttataacaataattcacaattacttcccaatatttcttccaataacatgatgctccagtctcctatgaactctttggaaacctctaccttagccagaagcttcactcacttaccaacacttacccaatttactgactcaatttctcaggtttaaattactcttttaattttcttcttcaatctcaagttttatataacaagtttttttttttcttttgtgttttcagtatcaaatgtttagcgaagaagatttacaaagcatagtaggaatgggagtggcagaaaaccccaacaatgaatctcaacacatgaaaattgagctttgatcaaccatttttttcaaggtctcaaggaagaaaacaagagaaaaaggattgatgggtgtacataaaccataccaatatttgtgatttattcatatactcatctccatatatatatgtatacacacttttatggaaataacctatatttttttactttttatactttatattatcatcttccaattcattattagcattattagggttcaattgtattgttatccactttggattccttttgcttttctgatgtaatatcaatgtaagtttcttaccatccactacaatccaagataactaatctactctaaattaggctaaacaaaaagaccactttttatatttatttgattttaagttaattatagaaagaccatcgttttcaaaatgtattgtaaaattaggaacttattgtcacaatatttttttatatgaaagtgtacattttccaaaaaaactccttttatgtttttattaaattaaggaggtcaaccgggttggaccacgggttaattagttaaaatttatttaataaatttaatattaatagaaattttagaatattttataaaaaatttttgtagtatttaatataaaacaaaaataatcatatcatatttaatcaaatataaaattatattatgtttaacagaatataaaatcatttacacccaaatatatatatatatagaaaaaatcaaacaataataataaagtggttaaaaatttgaaatccaataaatgtctcacaccgtaacaaatatattaggagatcatcaatgacagaaataaattaataaaacatcgtgaattaaaacaactaatctcggttgtctctctcaccattcgattcaattttaaggcggtattgtaaagtcttcaccaaaatctaaaacatcaaatgaatttaagaactgaaaaaacttttaaaaataattgaataaagtctaaaatcccatattttattgtaaaatcaagagaactttttaaaacccacacccggccggttcaaccggtttaccgggtcacgggttaattgtgagtttttgtgggtttttttggttttgaacttgttgggttttaacactaaacccaaaccggaaaagtgttcaaatcacgggttaactggtcggaccggacggttcgggtctggcgtgaaaacactggtgatcagctatactaaaccctaacctggatcctatgcaaaattattcaacgtagttactattttctaggtcaataattacaatcttatctaaatcaaatcatttacatcaaacacttaaggacaaagaactttccgacaaatatcattagacagaaagaaacctctggataattaataaatttcttaatgatggtctatgatctaaaataaacttgatttaaatgatatatcaaaatacgaaaatttattgtttacattcgttacttcctaattagtcaacatcactttcattcctagattctttttgatttgatatttgctaatgttaaccagctgtgtgaggtgttatgtctttatctctattgtctttggattagaggtgggatttgaaaacaatattatagtgagatcaagttgtgatttctgaaaattaaatgtcctgcttgtaatttcttgagatctactgagaaaaggcggaatcttatgtttgctttttctctaaccggtttaatacataatcaaccaatgattcaatgatcaaccaaatatctttctctaattaataattttgttccattattttaatcttatctttccgtagcttaaatttctgtttgttccaaattccagtaggtgttaggtcctaactagaataaacatgaccactgaatcatgtatacaaatctataggaaattaggtcatgtatgtcttatactattaagtatgtatattgctcgattgagcttgatcaccttccagtatgtgttttcgatcaatttatggcaagtttttctatcatattcagttctagtaaggatttctcaatcaattttgttttggtaaagatttttcgatcaatcctgattacgttaagatttatcgatcgatcaatcttgtttatgataaaaaaaattctgttcatttacacttcaggttcgatcatcttcaacatcgggtttttctcgatcacttctgataatatttttgataatatttggatttgttcgactatttcttataccggataaattttctcgagcatatttgttttggcctgaagaattctaaatctatatcctcatcattatgtctatttaagtggcttagctgaccaaccgaattatagcaaagattgcaccatcttatttactaatctaagtaaatgtaacatattgatcttactaaatttcaggtgtcttttaaatagggtcttatttatgattatgcaaattatgtatatgcaaacaaaattcatttttttatcaaacaatattatatgtcaatatatagatatgctgattttttttcttcttcactgtggcgaagttagtttccatatacataaataatctttcaaaaatgcatttttcagtataacaataatataaggaaacaatgataggtataatcatttctgattatatgaagattaactgataaattatgtagagtactagtgtgaaagggaattaacaaaaatatagcaatcacatgggtctgcactctgattcgtggacttagcacacagaataatgatattggattttattaatcaccaactactttcaagttcataattgaaaagttgttaattaaaacttctaaactaatttataaatctttatggttttattagtcttcacttgcagctttagttataaattcataattaagaactggagattgaattattggacgcaggaataggtagggtgaattataatttgcttttgtttactaatactttaatttaatccattctattttgatcactagaataaaaagtagaagatgctttgaatgtgggtggtttttatatttttaatatcgaagagtagttgcatctcactcggaaatttaatgatattaaaaaatggttacaaagtaatgacagtgtacatgtgatatactttttatcttcacaaatgttgtacagtggcaaatcactacttattatgttgaagaaagcttattcttcttttcttttcgaacatttcccaaatccattagagtggtccatttctttttgattatgtagtgttaacccattaaatattaatatatcttttataacaatctattggaaaatctatatctttggtaaccaaaaacttgttataaatataaaacgttacgttgaaatatttgacccggcctatttatagaaatttaaacaaataagatgcgaatcaaagatactttacgttggatttgtacactaattttgatagtcccgtcaagcagtcaccgtatagctaggtcaaaaccattaaactagcacatataatataattccatcacaaaaggttttccatattaattagagcttcatccatcaaatcaacatatatatatatatatatataattattgaatatgtaaagttgaatatatatgatgatcacacatttttagatattctgaatattgtttctatattaacctagatttaaatattattaggtagatagaacttttttgtttttgaacaataggtagatagaacataactactagatatgatatatcaagctattggggtcattaacttggagtagatcctcgtttattacaagtctgttttataacaactctgaaacagtaacacacaccaagattgattacaaagagtaaaaacagaaatttgtagacttttcacatttagtttttggaatcaatgcgactctctaaagtgattcaaagactcatgccttggtgtcaatactcatcgcttgtgcttccttctgagttcctttctgcacaatcacagttcatacaaaccagaatattatcagctcaataaagctttccctatttttacccattgaaactctcctttttaagaaactacttacgtgtggctcaagcattttcgacaacatgttgctgtaaaacttagcatctttcttgttatactctttcaccttctccttcaacttcttatattctatcttcacctccctgtgcatacccatgttggaaattagaatacatcgcaacgaaaaaaacaaaggaccaatagaaaattactcacttgttgtctggatcgatttcgagagctttcttgatatcaagctcagccagatcaagatccgccgtctccaagtaggcatgtgctctcctatacattgccttcacgttcctactatccatctccaacacctattcacattcgtttcattcactacttagtcgttcatctccaattgtaatatccaaaattactgaaactgaaatgttttgtttttacctttgtggacaattttgctgcttccttgtaatctttcagtttcagcttgcaagctgcatcattcaggttacaggcaatcttgagatcttttgatttctttttctcctcttcgtcgaaagttgagtcatattctatatatttgacaccctgcaatcaaaacttgatgttaaaatctaaacaaaaacataagtttctttagcaaatactaggaccaaatcccaaaccctctcgtatctctttgaagctcttgcgtattttccagctttgaacaacacattgccttcttctttcttcttgcctgcagcttctatcctttcctgtgtgttcatatcccaagactctttctcctgcatcaagagagacgatatcattagcacacttaagtttcttcataaagaaagaaacaacactcagaaagtgaatcctctcaccttgatgaaagataccaactcgacctcatagtatacagtcgagtttggcggtattacagccagctcctgttttgattcagaggaaccaaaagcatattccggtgaaattgtgatgagtgctacctcacccttcttcatgcccatcacagctttttcaagcccttctatcacttgttctgcacagatcaccaatcctctgtcatttaatatcatagccgtgaaatgtcaaatacaaaaaggaaacaatattccaagttctgtatatatgaatattataccttcatcaatcttgaactcgaacggctcctcatcttcttcatgacctttcttcacaaacacggttgttccatcttgaagtttaccaatcaacttcactgcaacaaaaaactcgttgtcagatcacatagcttaaccatagcgtagaggaggtcttcagataagacccttaaagatagatgctaacatttgacaatcgctccttcattgggacgctcatatccttctccttccttgagtattttcttaataaccttcctgtcatcagttacttccaccacagtcttccaagaaaccaactcaaggtcaatctgaagggttgcatttggtgggattgcagcttgaagaccatcagaagctggtcttccaaattccccaaatccatctgtacaagtcagagtgtcacacatcaatctaaattcactgattcatcgctaaataaggacaaacaccaaataaaatactcacattgtggcttcacagtcaggagaaccttctcccctcttttcatggttttgacagccttagaaagcgcaggacagaaatggcctattacacgagaagtatttagatcctcgaatagctaataatatccggttgagaaaaaaaaatactaaccctccttgacagtaaactctacaccatcagactttccaacaatggtgccatcctcaagccgagcttcatacttgactgccacggtaccaaaccataaaacaaatcagaaccaacaacatcgacaagactatattccagcacaaagaatcaaaccaaaatcataggaagacgaaaaacacgcaccgtaaacttcatcaaggtcttttggcttctcccatttttctccttccacaattattttcttagacacaccaccatcaccacatatatccttaacactcctccatgctatcaactccacatcaaactgaagagtagcgttcggaggtatagtcggcggtgaaccggtttcaccatatgccagctcaggaggaatggtgaaaatagcattttcacctttcttcattgtcttgatccccaagtcccatcctttaatgacatgtcctgaccattccaaaccaaaacaaaattcagaactcgaaagacaccgtaattaaatagtaactatcgatcaaaacaaactctcaaccaaaacttctctcacaaaccggcctcaaagaagacaacagccttaatatgatcctataatattatccgaatccgaaaaaatccgatccaaatccgaatacataggcctcacaaatattgttgcaaaatagaaaagtaccttggccaagagtaaatttgaaaggagttcctctgtcacggctcgaatcaaacttggtaccatctaacaaagttccagtgtaatgcactgcaaaagaaaacacaatctgagaacctgattcacacatatattatcatcagatcagacttcagcaatttcaaattaccttcaacttcgtcaccgttctcaggcgtgtcccatttttcacattccttaacaagtttcttcttcaatcctgattttccgatctccatttcctcgccgattttcagataaggagcagagtcagcttcgtcattgtcggggagatccatatccatctcctctggctcctcttccggaaactggttctgcgtgtcgaaatcgtcttccattttctgatcaaatttaagagagtgaaatcgataatcacgagagaattctagagagtgtgttggcagagatgagatggtttgagaaattgtgatgagaatttatagggggagtgaagaaagagtgttttggggtttttctagagacttctgattttcatttgaatccttgagcctaaagatgtgtcccgatgtttccagatactgactgttagcgtgatttttatttttatttgttagaacactttttatttttcttttgagcgggtctcgttaatctaaaattaataaattaattttttaaaaacacacaagttttgaatcattttaaatacttaaaatttaaaatttgattatagaagcattatttttgtgactagatttttttttattattctaaatcaaataatattttattttatacaatttactattcatcatccttgactaataaaaattaaaaagagcataaagacttaaacgatttatctttttgaaatatctatagccgtggttttatttacaataaacacaaaaactaaaattattagctagttaattgatctgtatttcgtatggttggttcaattttttttatgatttgtggctaactagtttatgtatagttatgcctttgagttcaagttgacttgatcttgccgggagaagaggaagaagttgtagatgtctcgctctgaatagcggtctcaacgaatttggttgtgacttgttcccacttagtgattgtcttcttaatctctgtttgttgtgccgttgtgcatgtcaaatacccatctttcttgcctttattctaacttactattctactatggatggtttctaactctttgatagtcttcacttctttttggtaagtttccatggactgcttcacctatattgtgagttagaagaacatgtagcaagtaacaacagaaagagacgtatcttttttgtacctttgctgatttggttccaattcttgaccgcataaatgtcatgtcatcagatagtttcccagcagcatatttgatcgtagagaagaaactttttttgcttttgggagaattctttgagcgtgcagccattatacccttgagtttctcaaagaagacctcgtattcctcctttggtggacactttttttcgaggtttattatgaatatcatgacttctttggaagtctcagcctcaacttgtgtcaatgttatagcgtttttctgagttgctgatccagcacttccactttcagtaggactaatggagcttccaccagtagtgtccgtaaaggaaaccccactgccagaaggattgctcgtaggacttccactagcactagcaagcttctaccggtagttcaggaactacaggaatgcctaagttagagcctgaacctgtagtgtctgtgaaagcgcctccgctaatgaagctaccaaagcttttgctattatcgctagaacttccttttccgcttgtagaactttccattgaaaaagagtttgttgtgtttacaacaattgtgtttgtgatccgagtaataaccgtctccatttcaagatcccttctttgatttctttttgatgttgagctgctagcttcatggattcttcgctctcctctttcttgcggctacctataatctttcccgcctcagttctcataaatttaaaggtatttatgacatccattttctcttcttgaatttctttcttaatctgttatacatatgcaagatgaagtaaataaaatgtttcattagccatacattttcaccttcaagaaaagaatgtatttcgaagtaaatttgaatttacttgtctagttgtcttagaacattctttctcgaggtccgacacaaagaccatcactactttaacggtgcaaggctctacatccttcaccgtttgcggatctggaatttgaggtaaagatggcttaatcttcaagtgagctgaaacaatgtccagaagggacacagatacaaaaagaatggtgaagcataacaacagctgaactcatgccattattctatcttgtgagaaatgaaggttgaagaaatttatttatttgttctgctttcgtagatatgtttagtgttcaatgtttagaatcattgatccactgaccattgagaatttggtggattgaggtcaaaataatagcaaagagtttcacaaaagcattgatggtaaacttttgtattttgccattgtagttgtctttttttttttgtaagacgacactgcctaagatttttcttgacccctctcattctgcgcatagatcaccattgaggtcgctaagccgtactgtgtaatttgctttggctaactaattgaagttgagccaattatgaaaagaaaatgttaaatatcaccataacaatcatctgcagtctttacgcctaaaagccaaaagactagaaaaaaccctcccatagatggtttctttgtattatccagagaactcttgaagcaaaatcgttaaagaacggagaccggatcatagctcgtcatttccatatccctcatcatcttcatcccctccgtattcttcaccaccagctggtttttcatttaccgcaataagctctgtgtcaaagatcagtgttgcaccacctgaagtttgcaaggttgtttttagttataatgtcgaaatcccgtatttttttcacaaacatgaatacacattttaaaagcttattgatgaagcgtatttataccggggatagtaggtggagagccttgttctccatatccaagtttagcaggtatctttaacttcctcttctcacctacacacgctcctagcaaaccttgatcccaacctgcaacaaaaccgaaaattaccattgaaggaattaagaaaatgttaaaagaaaagagatactcaaaagccaaaagcaagtcactacctttgataacctgaccacttcctaatttaaactcaaacggatcacccctttcaaaactcgaatcgaatacagttccatcagtaagtttcccctgccacataacaacactaagttacacaacaacaaaaacaacaataaacatttcttcatgacaataatgaatcccaattttgttataagatctagcaaaaacttaccctatagtgcaccttgatcgtatcacctttgtgagcctgaacttcacatgtttttggcttaaactgcaaaaaaaagaaactctttattatctctgaatccaatcaagaaccctaagtatcttacaaatttgttgacaagatcacacttgtcaaatccaaaagactccaactaaaccaaatggtcaaaagacaaaccaaaacagaacacagcacaatcaaaaccagatccaaattcacattccagaaaacaacaatgaataaaccaatattatagctagaaacagtatacgagatcgttcatttcctgatcggaaaatataaaaattaccttgacaccgatctgcaattccgacacatctccggtcttcttggcaaaacctataaacagatccaattacaaggaattagattggaaacaaagagatcatgattttagcacattcaataatgagaaagaaagatgaatggagaaccttggagtgaaatgagagagaagaagatcaaaaagagagagtaacggagactcatcttgctcgccataatcgcttctcagttctcactcttcagttttttccttttcttcagtgtatagaggtaatcttattgggcctaggtaggcctgtggggttctgcatttttgtaaaagcccatcttttatctctacaagcaaagttgaaaatttcggtttaagagttttatcatttcactacgttagagtcttatatttctactagcaaagttgaaaatttcggtaagagttttcatttcatttcatttctttctaaatctactcaagagtgttcactatggtggttacaccggtatgcaaagagttatttaacgagcaagaagacaactacattatctcttaattatattagaatgtttcgcatgcatctaattgtagtttaagttgctgtaatgttttacaaataaaagttttattttataatttcacggtttaatatctttgtttaatatagaagaggaagcaaacaaagatgagaagctcacacaatctcatttgaagatttatgtcactatttaaagttatagaaaaaaacagttaatctctattattattatcatattctattctaattttttttctagtatgtcacatattatttaaaagatgagatgagtgtaatttttttttttttttaataataatatagactgcggtacaaatatctagtaacaaaaatatttatggttttttaaccattgtgattttatttagaatatcttataatattatgggacaaatgaagaatcttttaatttttaactaactaagctaaaattttaatttatatctcagaaaatgattcttcatatttttgaattcgaaaattctagcttgatgaaaaaccaaaagccatttcgactaaattcaaagaaaattacaaccaataagactttcatagtttaatgttacaattaatatccaaagaaatttattaaaatgaaaaagtttttaaggtgatccttgaagagtttttatattacccaaataaacgtcgctttactttactagtcaacttacaaaatcagcattaaccacacaaagcaataaacaaaaaagattttttaccatttgcttaccttatccaaatctgctcccactgactcttccttcaatcttctcctctgtaatctcttcacaatcccaaaaaatctcacaatcgttttttgcttatctctttcaatggacacctctctctcccaccacggatctctcccgtttcccccatcgcgccgcaatttcgttaaacaaaaccgcggcggcgattgcgtttttctcccctcgcgtcgtaagttccgatacgattcgttggtggtggtttccgctgcgtcttcgggacagagcatcgacgcgcctctagttccacggtcgcctcagggaaggtttctaagttccgtcttggtgaaaaaacggcagctctttcatttcgccgtcgctgatttgcttaaacagctcgctgatgataaggaagcttccttatctcgtatgttccttagttatggttccgatgaagcttccctccacaggttccttttaacctccacttttcttaatcacaatcgcaagtgtttgttgtcactgtagaatcgccgagttgtagaagaaaacaaaatctgtaaaattgcagaatccagaaatgtttgaatctttggttgaatccagaaattatgctaatcaatggtttattagtgttggttatcactatggaatggttgtttctgttttatgttctatgatctggcttttatatggagactgattaacgtatttgaatcgatgttttgcagaaggatagctcaacttaaggagagtgattgccaaattgcaattgaagacataatgtacatgttgatcttgtacaaattctcagagataagagtgcctcttgttccaaagcttcccagttgcatttacaacggaagactcgagatctcgccttcgaaagactgggaacttgagtcaatccatagctttgacgttcttgaactcatcaaagaacatagtaacgcagtcatcagtttaagagtgaattcgagtttgactgacgattgtgcgacaacggagatagataagaatcgtctcagtaaagtatacacagcttcggtcttatatggatactttttaaaatctgcttctcttagacaccaactcgaatgctcattatcacaacaccatggaagtttcactaagcaactgaggcattacatttctgagttcgatcccaagatattgcggagatgcgcaaaaccaaggtcacatgaagcaaaaagcctgatagaaaagcagagtttagctctttttggtcctgaggaaagcagcaaagagagcattgtgacatcgttttctagcctgaagaggttgcttcttgaggctgtggcgtttggtacgtttctatgggacacagaggagtatgtagatggcgcgtttaagctcaaggagaatgagaatgcagaggaagaaacaaatagcagtgtttgaagtatgtatgaaccagtttgctagaagaaaacttgaatatcttttttggtggacattgcatataatatatagattaaatcagggtcaatggctatatgaaattatttttgtctatagtttgagtaatcatatgtatagtgtataatggatgatttaatagagagattggttttgtcattttatatatccatcaatatattgcaacttcagaggaaaagaaaatagttaaaaaccacatttattctaggtgtctctcatatttgaccagtttctcatctctcatcaattttcacttgtggacgcatgttagttaattgaaaataaaaagacaaaatttatatgtaaatgcagtatactgtatactgaatatagtaattatgtttttagttactactccttatgtttcacaaaaagtatcattttacaatttttaacacaaattaaaaaaacatctaaaaatttcttttacctattgtaatacactttttatttttaattaataattgaaaaaacagaaataaaacagatatttgattttaaaaacggcatcgaaaacacaaaacaacaatctttgttaaacaaaacaaaaaaatcttaaaacgatattttttgtgaaacagatgaagtattttaaattaaaaattgtaaattaaagtttatagttttttttactatcatttataagaaaatatgtttgataaaacattaactactatgtaacataagtaaaaccgtaccctacaaaaaaaaaacataagtaaaagcgcatataaagatgctactatcttaactttaaaacatcacaaccaaaacgatcagcaaatacgttccatatttttttgttaaaatattaaaatttttaaagaaaatgaagacaatttttgtctttttaactcttgcagttttggtttcatcatgtaagttctcattcttgttcaattaaaaatatatatatatatatatatatatatatatattatagtttaaattttaatttaataagttttcaaaaaactatttttacgtgcatcaaatattatgataaaatctatttcagaaggaaaatctcagttttccggccctgcattaagccctaatattgatccagcagacgaacatattggacactctcccgaagacatgaaaattattttttgccaacaatgtgcatttcattgtattgagaaaaagaagaatatagctcattgtgaaaattctatttgtcgttgtacattggaagacattttgtaagacattatatttttagaataatataagaaataatcattgtgactgattttctacctttacagcctcctttcaatttttaataaaaattaataatatagaattgaaaatacattgagttatacatttttacatatatttaaacgactatatacactgaatctttataacaaagaaaaaaaaatcaaaattgtaatttttgtttgtatcttctatatgtattaagtgttacatgtgttatttataaaatgtttgtgaaggttatcacataaaatttactcatcatctcatggtttgcttttttagaagagaatttaattttagaaatagaatataaaatcataagtcatatatttctttttttgaatataaacaatccgaaaaaatacctagaaactatcttgtttgttttgattataaacaattatatatatatatatatatatatttatttagtctaaattttacgatgtttactaattgcataacaaccgttaaattagaggattgaatctatcaaaaatttaaagacaaaatattataataaaaagtttaattaaatgaggtattttttatcaataaaaaacaaagtaacaattaaacgtccaattaaaaatgaaatatttttttggttttttcctacgtcggtaactaataacgtcacaaagttgatggtatttgaaagaattagcggcaatttattccccccataaattttcatttgtgacctaaaattaactttccctttctctctccgtgcctcttcccattctctttcaatcttgtttgaatctccctcgattttcatttctctttcaatttcaaaattcgcacctcctcctccaaagttgttgaaatcagattttgttgaccggagagtagttatttatggaggaagatgagccaatgggcggcggcgagtctgagcctgagcagaggaaatctggaactccgagactttacataaaagagcttgtcatgagaaacttcaaatcatatgctggtgaacaacgcgtcggtcctttccacaaggttaggattttacgctgattagatttgggttttctcgaatttgagcttctatgtcaattacagtatagttttcgaatttctcgcttttgaattgcccttgcgaatttcagtttttttttcaatttgaagatgaatttgagcatatttttcggatttctgtttttggctagtttgaattgctcttgcgaattacaagattttcatttgaatctattgattcggaaaattagatttactgaattgttgaaaattcagagtttttctgcggtggttggacctaatgggagtggaaagagcaatgtgatagatgcaatgctctttgtatttgggaaacgagccaagcaggtacttgatttactcttgtgttttcttttagtcactgaactttgtttgagtaactcttatgtttatttggtgttagatgcggctgaacaaagtttcagagctaattcacaactcaactaatcaccagaacttggatagtgctggagtttctgtacagtttgaagagattatcgatttggtaaaacttgttgtctgcttacctattattagactttggttaagctttctagtaatgtgaattgtttatttttaactaactcaggaaaatggattgtacgaaactgttcctggaagcgatttcatgattactcgggttgcattccgagataattcttccaagtattatatcaatgagaggtcgagcaatttcactgaagttaccaaaaaactcaaggggaaaggagtagatcttgacaacaaccgtttcttgattcttcaggttctcactttacagaaacagcttgttgaattaacttgtttccccctctaatattgtttcttgaacgttgacagggggaggtagaacaaatatcactcatgaagccgaaagcacaaggtccccatgatgaaggttttcttgaatacctcgaggatataattggaacgaataaatatgtggagaagatagatgaattaaataagcagtgagtaatctatgcatttgtactgtttcttttagacgtaagtggttcctgatttgttggatgctattaatataactgcaactgcctctgaaatttaaggcttgaaaccctcaatgaaagccggtctggagttgtgcaaatggtgaaattagcggagaaagaaagagacaacttagaggtttgttgacgtttttccttcttgtatgtgacccggttttgttgtatatgttgctgatgtgcttttggaacagggtttgaaggatgaggcagagacttacatgctgaaagagttatcacatcttaaatggcaagaaaaggctacaaaaatggcatatgaagatactgtagcgaaaattactgaacagagagacagcttgcagaatttggaaaatagtctaaaagatgagcggtaagcactactaatttttctttaaaatatcaaagaaattatataaactcatttgtaacaaatatcgtaacatttctgttacagagtgaaaatggatgagagtaatgaagagttaaaaaaatttgagtctgtgcatgaaaaacataagaagagacaagaggtatgtctgaaatcaataagatgtgtctgctctcatgcttattgccgacgaggctaaattcatttttctctctcctaactttcaacaaatggtgaatcaccttatcttcctttgcaatgattaggttcttgataatgaacttagagcctgtaaggagaaattcaaagagtttgaaaggcaggacgtaaagcatagggaggacttgaagcatgtgaagcaaaaaatcaagaaactcgaggataaacttgagaaggttaatagttttggaaggatggttgacttttttatggcgtgcatataccttacctgtgttcttatgcaggattcatccaaaatcggtgatatgacaaaggagtctgaggactcaagcaatctaataccgaaacttcaggaaaacataccaaagcttcagaaggtcttgctagatgaggagaagaaattggaggaaatcaaagcgatagctaaaggtgtgttatgctttaggatattagtccccaaataatgatgtccttgttaccctggcagcttctttaacaacatcacagtgaaaagtacttggaattggcaacttcttaaacatgctagtacccatctataacgattagcttcttgctcaagagtaagcttgttcagttaataatttctgtcaattttgttacagttgaaactgaaggttaccggtctgagcttacaaaaattcgtgctgaattagaaccttgggaaaaagatctaattgtgcacaggggaaagcttgatgttgcatcatccgaaagtgaactcttgagcaagaaggtacatctcatatagttataacgatttgcttggagtcaagaacttttgcttgtcaaaataacttggctcgtcttcaaaagaatttctagagaggtttttaattagcttatcccactgcttctttaaagaattcgtttgccatagtcaaatctttatatgcttcctggagctgctttcgcgctgaataatccaaaatactgttggacgactaatttttttgtttctgtttgaacattacctctttgttattctagcatgaagctgctctgaaagccttcacagatgctcagaaacagctctctgatatatcaacgagaaaaaaagaaaaagctgcagcaactacctcttggaaagctgatataaagaagaagaaacaggaagcaatcgaagctcggaaagtggaagaggtacttttattaagatatgactgtaatctgtgcagcttagatggtgaaactgagagtatgcatcttaacttctgcaggaatcacttaaagaacaagaaacactcgttccacaagaacaggcagccagagaaaaagttgctgagctcaaatcagcaatgaattctgagaagagtcagaatgaggttttgaaggcagttttaagagcgaaggagaacaatcaaattgaaggaatatatggaaggatgggggacttaggtgccattgatggtgagtatattggtctattgtctactataacattgctctgaccttgaatattgcagactgttattttctccttgtagtatgaggtgtgaaattttgattgacaatattttcaatgataaatgaattttagaagtaaatccccagttgcttgtctaaatgattttaaaagaaatacagcgaaactaacaatcactgacatggctgtcctatgcagcaaaatacgatgtcgccatatcaactgcgtgcgccggccttgattacattgttgttgaaacaacttcttcagcacaagcatgtgttgagctgctgcggaagggaaatcttggctttgcaacatttatgatattggtattgcataccactttctgtttatatgctttgaattacctgcctggccattttattaaaaatgccaacttaaacagaagaatcgttatacagggatcctcaaaattgtgattcctgagttggtcttagtaaactattatatctaattaggaagttaggagcgtgttatggtggattttgattcagcaaatgaaatgcaataggcagcggtcttagtaaatcttcaaggggactgaatctgaagcttcacattcattcgccaagtaggttctagtaattgctcgtgcaaataaagagtgaataacccttcaacaatattcttttttgcaggaaaaacaaacagatcatatacataaactgaaggagaaagtgaaaacaccagaggatgtaccacgcctctttgatcttgtcagagttaaggatgaaaggatgaaacttgcattctatgcagccttgggaaacactgttgtggcaaaggatcttgatcaggtatattatgtttgctcatcaagactgactcggctacataatttatttactgccattagtaaattatgaattgagctaagctcggctaatctagtgaaacccaagtgggtaatacctcctaaaatacaaagtttctttggactcagtgctgagcctaatagatacaattttcttgcttattaggcaacacgtattgcatatggtgggaacagagaatttcgaagagtcgtggctcttgatggcgctctctttgaaaaatctggtaccatgagtggagggggaggcaaggcacgtggtggaagaatgggaacctctattcgagccactggtgtgtctggtgaagctgttgctaatgcagaaaatgagctctccaaaattgttgacatgttaaacaacatccgtgaaaaggttggaaatgctgtgagacagtatcgagctgcagaaaacgaagtctctggcctagagatggaactggcgaaaagccaaagagaggtactgtcttccgtgaatttatgagtataaccctcccgtttgagatatgtaatcaagttgccctaaatgtaatcaattgtttctttctttcatatttagattgaaagtctcaattcagagcataattatctggaaaaacaactagcttccctggaagccgcatctcaaccaaagacagatgagattgacaggcttaaagagctcaagaaaataatctctaaagaagaaaaagagattgaaaaccttgagaagggttctaaacagctgaaggataaagtgcgtaacatcagtaattcttttttttttttaatgtggcacatcccttttcttccaatatgtttttggtctaaccagccatgcttatgaaatttttgacttatctttccctgggagcttagatcagtaaacgcaaaatctatggagttgttccttgtttaataccctgtaatatagaacttgtgcattttaaactgacgaggttttttgttataggctttggagctgcaaaccaacatagagaacgctggtggtgaaaaattaaaaggacaaaaggcaaaggttgagaagattcagactgtaagtttgcttttgttcttagcatgctgttagtgaactcacagttaagtgtgtcctaatttatgttgcacatgtttaggatatcgacaaaaacaatacagagatcaatcggtgtaatgttcaaatagaaacaaaccagaaactgataaagaagttgacaaaggggattgaagaggctactcgagaaaaagagaggctagagggtgagaaggaaaatttgcatgtgactttcaaagatataacgcagaaagcattcgagatccaagagacgtataagaaaacacagcaggttttgacagttcttatacctgttatctatatactatctggatagcagtcacagatcagtcctttctttttgtttagttgattgatgagcacaaagacgtgttgactggagcaaagtccgattatgagaacctgaaaaagtctgtggatgagttgaaggcatctagggtaacaaacaactaaatctttttctttcggtctatatttcattgcgttgttttcatcatctaaactttagtcgaatacaggtagatgcagaattcaaagtccaagatatgaaaaagaaatacaatgaattagaaatgagagagaagggttacaagaagaaactcaatgacttgcagattgcattcacaaagcatatggaacagtaagtgcggtaaacccttcattatatgattacctcgtttacatctaaaattcgtcattctccattgcagaattcagaaagatcttgttgatccggataagcttcaagcaacattgatggataataatttgaatgaagcttgtgatctgaaaagggctcttgaaatggttgccttactggaggctcagctgaaagagttgaatccaaatcttgactcaatcgccgagtaagaattttgttgttgtttctttcttgcttcgattgactcatgtttctctagctttcttaattgtctgttgtaattacttaaaggtaccggagcaaagtggaactttacaacggacgggtagacgaacttaactctgtgacccaagaacgtgatgacacaaggaagcagtatgatgaattgagaaaaagaaggtattccacacctctagttttctttgtatatatatttgtttcccttctgctcttgtttcatgaagccaatctacacttcgatgactacgaattcatttcaggttggatgagtttatggcagggtttaacactatatccttaaagctcaaagaaatgtatcaggttagtttaccttttgaacattgtttacaactccaaaagcttttggctaataacaatagggtgtataatgaagatatccagaactgagaagaaaacttaagaatgctgagtttttcaaatcttacaactagaagatacttctttgcttggcctatcttatagattttatctttgtctctgatgaattatacaaacatgattctgcagatgatcactctgggaggtgatgcagagctggagctggtagactcgctggaccctttctcagaaggtgtggtattcagtgtaagacctcccaagaagagctggaagaacattgcaaacttgtcgggtggtgaaaaggtcatttcaacaaacatctcttaacacacttttatatcgccagtttctcataaaaacgtgtctatctcttttacttgcagacactcagctcactcgcactagtctttgcactccatcactacaagcctactccactttacgtcatggacgaaatcgacgctgctctcggtaactcttccatccccttcatattgtcaattttcatctcccaaaacgtttgatccctgactctttcttacatcagacttcaaaaacgtatcaatcgttggacattacgtgaaagaccggactaaagatgctcagttcattatcatcaggtcagttcaatcttctagttcaaccagttcttgattcttgaggtctaattaataatatatataaataatgtggtgacatggtgtgcagtttgaggaacaacatgtttgagctagcagatagattggtgggaatctacaaaacagataactgtacgaagagcattacgatcaatcctggaagttttgcagtttgtcagaaaactcctgcttagtctaccaaatggcatctctacattaaccacttactattgtgttgtatttgtaattttgggttttgcttttttttatgctgggattaacactaactatgccgagagaattaatctacttttgtctcttgtaagtattggttatgctagtctactttttgactactggtcaaagtcaactatttgcatctttttttcttcttttcaaagcaatttgactttataacttgattggaatttggacatgacttgatatacatcggattgtttgttggtcagaaatttaaaaaattggaagccaaaaaattatgtaaactaaataagtatgaaatccaataactagtatgtattttcgtaagccgtctcatatctttctttaatacattctttagctttggttttcaaatctccatgacatttgtgttcgggtgtacttcccttcggttagtttccggtgactcgctttataattcttcatggtgtttttcatgatttgaatataattcttctaaacagaagcagagtttgcaagactgacgtaaagcatatatttttatagcaataacgtatataatatagtttgcttatagaatttcacatgttcatcagtcgaatctcaatagaaaaccaacgtatagtttctggcccatgttatgtcgttaaattcatgttgtgatcatgattcatgcactctacaattcaaaccaagaaaagaaactgttcttcgaaattacctttgttaataattgactgatgaattcagcgtgatagatcgtcgagacgttgtttacccatctatgataagatccagcattctcgatctttttttgtattctaaacaaaacttaattaaataatttcctcactttcacctgaaataatcaattcactagtgaatatagtaattatgttttagttaatactttaaaagaaaaactttaaattaaaagtttatagtttcttaagaaaatacgtttgataaaacattaactactatgtaacttaagtaaaggacttataaatgtatgactatcatgcttttaaaacatcacaaccaaaactcaaaacgattagcaaacaaattacttattttatttttgttaaaatcttgaaatttctatagaaaatgaagacgattttcttctttataacttttatagttcttgtttcatcatgtaagtttactctcgttatatacaatagtttttagtctataatagtataataatttaatagttttattttcttttgaattatttataggtacatcaaatattatgacaaaatctatttcacaagtaaaatctcagtttttcagccctgcattgagccctaatgttgatccagcggacgaacatattggacactctcccgatgatatgaaaattatcttttgccaacaatgtgcatttcattgtattgagaaaaagaagaatataggtaattgtgaaaattctatttgtcgttgtacattggaagacattttgtaaaacattccctttttaaaataaattatttataaaattaaattcttgtaatatacaaaatttatttgctgattctatgttttcattttgcaacttattttaatccaattgttatgtatacgtacatttgcatgaaatgtttatgttaggttatagaatctaaataaataaattcgctaaactaaaacttataatgatatacaatatctaaaaatagacataatagagaaagtgagagagtataaaggcaaaaccagttagggttattttcgaaatctaaagttcttccttggtttccatgtaataaaaccaagatgctaaaatatgctattgaaaaatggatttataataggaatcgttgtaaagtttttggtccaaatcactagaacttccggttttaaggatgtctctgacggtaatttttcttaaaaaatctctttaattatttgatgaaaatttgaattttcatggaacatcaaaaggtgatattttttgttcggagaaaaaacgaaaaaaagaagaaaaataagcgacccaaaggtttgtaattttaagtatttggtacagattcggactattcgtatacgatctctaaatatttggatagagaacatgtttattttatatgtcaacgaaaaacaagagattattagtttctaaaatatgatttagttcagtttttagggaggaggctagggcgggtttgtgcactatgaattggaagtgaaaatgatatctctgttgttaagcgaattctacacacagataaatttgtaacaaaagcaaaagacgaatcaaacagagtcattatcgggccaagcctaatttaagaaaatagtcccaaaaagcccatttactctaagagaatgtcgagaaataagtatacgaatgacacgtgtccttcttctttctcgtcgtctataaataccaatttaccattctctcgccaaagtttctcttttcttcgctggggtttagagagagaaactaaatagagagagagagtttcttcttcccacatcaagagccaacccatcaaaacttaacccgtaaaatttcatttttttcgaaaataaaaccttcacagaagaacatttacatatatatacacaaagagaaaggtatatatatccacatacatatgccaacacatatagattagaagagagatgggcgagagagagagaaagagattggtatttctcactgtgagatctttgaaatcgcaagtttttgatttcacgttaaaccaaagctgattttatatcaacatcgtttgatttcattactaaaagttttgatttttgagtgaattttgttccaaagttttgaaattggatccgcccagatactataaagcttgattcttttgggttctctgatactttctgtttggtttacttcaaacccacatggagagaatttgtgcatagcttccactttacgttccttttgagaagttagatgatttcacttaacattttgttttcaatttggttttctagggttttgattggatcgtctttggaatcgaccctaattgtggttttgtatactagtaaaagctcaaacgtttggagtgtgaggattgattgatgcgcgagtcagtatttatccccaatttcccaattgggtttctgccactgagttgattgattaagctaataaggtgcttttgagatgctcataactttgaaccttgttaatgtgagttgtggaaagtggttctgatctcgatttctggtgatttggtttggcaggcttatataaatctccaatcttggggtatcactctttattcaaccaaagttgacccttatcagagggttcagaattgtggacttggaatttgatttcttggaggtgattattgcgggtcggaaagtatattattgcgggtcggaaagtaaattttgagctggaatggtaaactggatcatagatactgatctggtcaagtgttgggataaaggagccaaaaagtagggagtgtgtgtggttaaagtataccactttacagttcccacggacaagtgccatgtctcgctgcttcccatttcctccaccaggatatgagaagaagattagaactgacgaagcagaccctcttgtaaaggttcatatgtcaactgactcaactcttacaattttctctactatgaatcatggtcattctgctgtttttagaacttgaacgaatttaggtgaaaatacttgataaacccttttgattaatgggttcacggaattctttgtattctggaatatttttcgctgttttctaggacatatagacatacttgataaacccttttgattagtggaatttgagactgaagacttagtttcttgctattatggaaacgtcattgctaggtggtcaaaccttgagtattctcacctattatcgatagtaacgagctgactatctctaacaagagcattactgatgctgatggattggtactgatgtgtagagaaatcatcagagatgtatcttttatcatctatagaattgtatctttcttttcttgattctgcaagaatgttcctttgtctcctaatatatatagcacacatatagggctgatggatactttatcgactttaaatgatgaggtgcaagctttcaagtaaagggccgttcatgtagtttgtttcagaatcttagatattagaattatctcattcattattttcactaggatttacttatttggcctgaagaccatagtaagtagtgtctctttagagtcacaacccatttaggattagactatttgaggaccgggagatagtgagggtgatattctttgcattgatgtaggtgatttcatagccatattaagacactgcagtaaaagatattcagagagagtagcaaggagcttaggaattagttatggaacttgaacttactggtagtagcttatggcaggccggttagactagttacctactagaggataacacttccttgaattggagaaaacccgcaaacaatgcatatccatttttttcactgtttttgcccagcaaccttatataagctcatattggttttcaaagtcctatctaccaagcatggtcaatcttgtctgttaataattgagggatttagagactttcgttcttgcttcaagtgtaattgacttgtggacaatgaaatttttgtgctgaactgcttttgtatgctatcttgatgcttctgccatgtatagattagtctgttttaggttgaactatatgcagttgccttttatatgtatatgattttcttcatgggatttgaatttcaggacaagtacaaggaaaagaagcataagaaggataaagaaaagagagagggtaaagagaaaaagagtaaagatagaagcaaagacaaacagaaggaaagaaaggagaaaaaagacaaacataaagatcagaaagacaaggagaaaggtaaagaaaaaggcaaacctttggaggagaagaaagctgagctgctgacaaatgccgggcacagagagaatcgtgtaacagatacggtgcagaataatagtaatggagagtcaaagtatgtacaggacctggcaagaaggatcagatatgacgaagaagcaacaggaagtcagagtgcacaaaggattgatcatcctaaccaaaaaaatgtaggaataacagaaaaagcatttgagaacagcccaattgaagaaacaagccatagggtagatgacaataagagaatcaataaccagaagaactttacagcggcaaaaagttctgaaaatgcagtttctcgagtatcatttggtgcagatcataaaagagctgaggtgatgggtaaaccaatggagaacagagaccaggtgaggcaaacagaatcagctgagaagagtcaccgcaaggaaaatgtgaccaagagtgagaaaccaagggatcaagaaggggtaaagaagactgaagcaaaggataaagacagaaataaagagaagaaagaggaaaaaacagagtcgataaataaaactcgtcaggagaaaccaaaattgatacgagggcccaagttagaggaaagagaaaaggactctccggatttaagaaattgcaagctgcctgacgtttcacggacaagcatcaagaaccttcacaccgagggaaatcttggcaaacggaaggatcatatgacaaatggattcctgtatggtgagttattctctgatccaattctctgtctggtgaatgaggagtgtagttgccatattaaccatcgtatgatatatggtttggtacttagaagcatctaatagttttatccaatcatggtatgttttcttaccttaaaagattttttaaatttacgggtatcttactggtttggtagtttcttggtttggagtaatgatgcaagatccgtatttcttggttttggtctgaaatgttaacaatgtagtttattacctgtttgttgtaacattagtctttaattctttcgcagaaaatggaaccacgccacacaagttacagaagctgagtgcttctgtaccatctgtggaaaatggaagaacattaggtgcaccccgaactcctccaatgcctgcttctgaggtgcaaggaacaacttgcaagccacaagtcaaagaagtcagaattaatggttttgctgtctctggagaaaaacgtaaagtctgtccaccaagccctttggctgcaacaatgaaagtgaaagtcaaggaaaatggtgaagcatccgcaaagccgcctcatcctgacctaaagtatctcaatcagatactccatgtacctacaagggagctgttgccagagattgatgatgaccaagaatggctacttggtcagtcgggtatcaaattaaaaagggcgagaacagatcctccagattctggcgaatccttgcaggtctggaaccaagctttcagaatagagtctgcggatatcacagctcttccttatgtagttccattttagctatgactatattcctacgctacaatccctgaggagaagaactatccctcgcacaacgccactttgcagcagcatctattaaagaagaccgacaacagcagtccatggctccccaaagtttatgagcagggatcaaatatgttatacacgcccataatatgaacacccacaaagctctgcatgggtgggggaaaagaatgaatgaggaagatgtaagtagagtaagtttatagagaagttgattgttgtttgacaccatgttgtgttataaggacaaggatatgtgtggcattttgttctgcacgcaattttgattccctgcttgcatcatcaacattagtggataaagtttgtatattacagagaatggaaaaagaaagagtagggctctatgtgtgttactgggcgtggagacggaagaaagtttaatctttccgttataactatagagtatatagtctcgagtttctcaggaatactattgtaccaaatcctgaataaaccaatgatcactagccaatcctagctccatgcctaataatgttgtgtataattttagtaaattcaatcatttctatcctaaaggttaaatctttcataaatttgacttaaaggatcggtctcttacttcaaatatcaaaccatggacttcaatcgtttcgggaaatcttgtaacttcatttttttacggatgtattataccaacttcagttaagttcaatgatcttagtcaaatgatcgaattcctcaatcagaagcaaattggtgaagagagattggttttcacactaattgggagagagcaatttcggttttggttactgtagtgatcaatgcagcgaaggtgttcgatgaaatgcgtaggagagactttcgggaaattacttcactaagagcttttttactgatgcgaattccttttaatgatagaacaagatatcaagcaaagaagccttgtggtcttgatactgaattctagaatacacagtgacgtggtggtcttgtcttttgataagcttgttgtagctgtctcctctctcaatggctatctcctgcgactgaaacggtaaacctttattctctttagattcgtgtgtattcatcagtatctggtcaggttacaataatatattgcttattaactgatcaatctgttactgtcctgccctgcttactatagtagacagtttctgtggttttgtaatacttaggcatgtgttaactattattagaggacttacagtgagttaaggtgtcttcgtgtgtgtttctctcaaaatgatatatttgttactctgtatatatatatatatgctcgtggaatcctgatgagaatttggttacagctttatcaatcctctaaatagttttcaacagtgcaaggttttgtgttcctctcttgaaaatatagtctctgaagtgttaacgagctctatatatgactagtttgcagagttcaggcagcaatgtgaatgagctagagaatccaataagcaatgataggactgggtcaatagttcaagaacgtgaaggttccgacaactaagcaaactgcttcttcaatttggttccgacaacttttatcattaaaaaatatataaaatatcttttattattaaaaaatatagggatatatcttttatttgattaatcattatattattgtagagaaccctcagccaagagattggtagctagatagataaggttgacttggagtcaacttctagcttagagttttgataaattttatagctttcttcatttatagtaaacgttttaactcatttttttccagagaatctgtacccttggcgttcttgtactggttcatcgtaggtgatactcgacgtctagttgttatggctgaaggatttgtgtcgtttgggcttgagaagctttgggatctcctgagtcgagaatcagagcgattgcagggaattgatgagcaacttgatggactaaagcgtcagctgagaagtttacagtcgctgttgaaagatgcagatgccaagaaacatggaagtgatagggtgaggaacttcttggaagatgtcaaagaccttgtttttgatgctgaggatataattgaatcctatgttctgaacaaacttagaggagaaggaaaaggggtcaagaagcatgtgagacgacttgctcgcttcttaacggatcgccacaaagttgcttcagatatcgagggtataactaagaggatctctgatgtgattggggagatgcagagttttgggatacaacaaatcattgatggtgttcgttcgctgtctcttcaggaaagacaaagggtgcagagggagatccgacaaacgtatcctgacagttctgaaagcgatcttgtcggggtggagcagagtgttgaagaattggttggtcatttggtggagaatgatatttatcaagtggtttctatagctgggatgggcggtattggtaaaaccactctggctagacaagtctttcatcatgatttagtccggcgtcactttgatggattcgcatgggtctgtgtttcgcaacaatttacactgaaacatgtttggcagaggatcttgcaagaacttcagccacatgatgggaatattttacagatggacgaatctgcacttcagcctaaactctttcaattgttagagaccggtagatatttacttgtcctcgatgatgtatggaaaaaagaagactgggatcgaataaaagcagtgtttccacggaaaagaggtgagctcttatggtacatacatgcagcactttttctttttaattcataaaattgattattaaaagaaatatatagaataaatgcctttcttattccctaagatgagaaacacaaatatttttgcaggttggaagatgctgcttacttctcgaaatgaaggtgttgggatacatgctgatccaacatgtttaacttttagagcaagcatccttaaccctgaagaaagttggaagctctgtgagagaatagtattccctaggagagatgaaactggtacatatcttattatataatgtttagtttctctaacttttaagaaaaatacatttacatatactaatttacatgtatatatttaaattattttataaacttttattttccttaaccaaaaagtaatatttgtatacatattgttaatttttccttactattagaacaactaactaaaaacgtatggtaatccatatgctaatttaggcatgtataaaaaaatatcaatggtaatcttgattttgacaaaaataaaaataattaatttaattaacatgaacaatgagtgttgttgaggttcaaaaggacaatataattattaaacattaatttaatcggataacaattaaaaaaattaactactaatcctagtacagtaagtcagtaattacgaaccttgaaaattggttttgcttttttcttcctattttttataggtttattcaaattagaatatcgaattatctacttttatggttaattcatgattggtttgataaaaatttaacgtaataaaatcaactaaatttgaaagaaacatgtattgattaacccgtgattacacgattccttgtaataaagttcaaatagaatactaagaccaagaatctagtgtattattttaatttggcagctcacatcctgaaatgtattagcttgtgatattgtgcagaagtaaggcttgatgaagaaatggaagccatgggaaaggaaatggtcacacattgtggaggactaccattagctgttaaagcgttgggaggcttgttagctaataaacatacagttcctgagtggaaaagagtttctgacaatattggatctcaaatagtaggaggatcgtgcttagatgacaacagtctcaattcggttaaccgaatattgtctctgagttatgaagatttgccaacgcatttaaagcatcgcttcctttacctagcccatttccctgaagattccaagatatacacgcaggatttgttcaattactgggctgcagaagggatttacgatggatcaaccatccaagatagtggagaatactacctagaagagctagtgaggagaaatttggttattgcagacaacaggtatttgagtttggaatttaatttttgtcaaatgcacgacatgatgagagaagtatgtttatctaaagccaaagaagagaacttcttacaaattatcaaagaccctacttccacctctaccatcaatgctcaatctcctagtagatctcgcagattcagcatacatagtggtaaagcctttcatatattgggacacagaaacaatccaaaggtgagatctcttatagtttcgagattcgaggaagacttttggatacgatcagcttcagtcttccacaacttaacattgctcagggtgttggatctttctagggtaaagtttgaaggagggaagttaccttctagcattggagggctcatccacttgagatacttgagcttatacggagctgtggtatctcatctaccttctactatgcggaacttaaagcttctgctctttttgaacttacgtgttgataacaaggaaccgattcacgtgccaaatgttttgaaagagatgctagagttgaggtacctttccctacctcaggaaatggatgataaaaccaagttggaattgggtgatctagtgaacctggagtacttgtggtatttctcaacgcaacacagtagtgtgacagacctcctccgtatgactaagctccggaatctcggtgtatctttgagcgaaaggtgcaattttgaaactctatcgtcatctctccgtgaattgcgaaacctcgaaatgcttaatgtccttttttcgcccgaaatcgttatggttgatcatatgggagagtttgttctggatcattttattcatctaaaacagttgggattggcagtacgtatgtcaaagattcctgatcaacatcaattccctccccaccttgcccacatacatctagtgcattgcgtcatgaaagaggatccaatgccaattctagaaaagttgcttcatttgaagtcggttgcattaagttatggtgctttcatcgggcggagagtggtgtgctcaaaaggcggatttcctcaattatgtgccctaggaatatctggagaatcagaattggaagagtggatagtagaagaagggtcgatgccatgtcttcgtactttgactatacatgattgcgaaaagttgaaggaacttcctgatggactcaagtacataacatccttaaaggagctaaagattagagaaatgaagagggagtggaaggagaaactggtaccaggtggagaagattactacaaagtccaacacattcccgatgttcaatttatcaactgtgacctgtagcaggtaaaaaataaattgtatggtgttcactttgtttttttctatgttgttgttggattcgtgtgaaagtcatgtggacagtctcaacgactatacattgttccagcatcgatcatctttgaaatagatgcaggaaagaccaagaagcgagccaaattctcttatattgggagagatagaggctgcttcacaaaagtcatcagctgatcaacaggtttttccgaagaatagcttatgaagaatacagatcctcaagtattaatgattacgtttccagtcttggagctctcgctttcagtgaatcgttatgttgtgtagctcagaactatattatagaaacaatgcttatattgttgtttgtttttgatgtggatgcatggaacttgcttgagaactcttttacaaaatggagaaacgaaacttgtaaaatttggatattttctgtttattgtaaaatttggatatattttaagaattgcgttttgctttctcgtttgtgatttaacccagttcgttttgtaagctctatttacaccatcaaatcttgtcagttttttttgacgttttgttagttttgcacctcttttactgtgtatacgcagaggcaagacatggttgaaccaagacgagcaaaactgatgtacaataaacagaataatctcatttccaaaacttctggcaaaacattatattttctcaagggaacaaaacacacagacaagtcgaaactttatgggtttgtagcaagtttgttgaaggcggcgtgaactctctcttccgtgaacagtctatggttttcatagaaatctaatatctccattgcaatattcttcacctgccaatatgttcacaacattccgatgaacaactaaacaagaccatgccttctagtaacaacagagataacagtgcatggacttacaatgttcatgtcgacagaaagctcttcaaaccatgtctttatgtctttctctttgtgtacagaagcaatgtaaatgcaagcgagtgttatgagaaacggcggatgtataaggatgaggtccattctatatgtgtcgttgacaagacccctaaagtttccacaacaaaacttaaagcatcaagagagcatttacttttttgcttgcaaatcaaaacctgtttaggctctcttccaagaagcttaatgaaggacaaaagttttggacacttaccaagttagatgggtcatactagtgtcattgattccagaatcctgcaagaacctgcaagtaatgcaagaaggaataatcaaaacgaaatgcagagtataatggcaaaaagatttcgatgacgacacatatgatcctaagcaaacgacttactcaggcagagatcgatatgggtggaatacaacaagatagaagttcaatgcttccaagaccttcatctccatttccagaatatctttaatctcatatcgaaacttttcatccgcatctacagagagtgaaagcatccaatctcatcagaaactcagacaaaaaaaactcaagaaaattttggaagcagaaaacaaaaaagaatttacaaagttttttcatgtagaagacaagaagtttggcatgcaccacactctcttctgctttgcaagccaaatacaagcatgtaggagcaacaagccgaggctcatattccgtcaaactctttctgtcaaaacacacacaacagtacccataaatcaaatgaccaagcctcgtgctacacaacgattaccaaagaagccataccttgtgtaaacacgacgcatataggttactgcagttgcaacaactctgaatcataaaagtgctaaaaatcagtcagcattgttcaaagggtcatagcacattccatatctctttaagactaacaacgaaagacttcacctttgcctaatcttaatgtgttgtgccagtttcgatatatctgaaatcaaataacaacaaggaaaacacgaaaaacatgattcatgacattagagatgttaaatccaatctggaaattaattaacaaggtaatcaaatccaatgaaaacatacaattagacatatgaagcttaatgagtctgaaatcttcaacagagattcctctctgagcatcaagaggatgaacaacattaacctcttctgggtccttaagctctttgctgtgaaaataaaacccacaaaacgaatcaatcaggaacatggaaattgaattaaaaaaagacgatctttaatcattgattgaaacttactagtgcgtcgaagtccagaaattggaagccatagcttctttgatccttcaacttcaaaaatacaagctttttatttttatggtgtggataatgagagcataaagaccaccaaggaaaaatacaaaacaaaaaaagtaataattcagtatttatcttttttgatagaaaaaaaattatttaccaaaaaaagtttttaaaattcttatatgaaatctttttttttttttcatatttctcatcttcatcaatttgacctttgttttatttcacatttttgcttctacgagaggtttaggttttggagaaaataaaagggaaaacaaacccattatgatgaacaattaacaataatgtttactttaagattaataggtttggtaataacagtgttacatgtttgccacaaagctagatggatgggcaattgtggaagtctctaatcatttttttctgtgcgataagtcttggagatggaggtgattctctacagcttcaaagccaatttgctgaaggcagaattcactttttcctctgtgattgttctgtagttctcatagaagtccagtatctccatggcaatattctttacctgcaacccattgccccatgtagagctttcaaagtcactaaagaataccgaaaatcacgcaaaagatcatagctattcgctttaactaatgattgaataacttttagaagaatgactgaccaagttcatgtcctcatgaagatcttcaaaccatgcagtgatatctttctctctgtggacacttgctatgtatatgcatgctagcgctatgcggtagggagggtgtacaagaatgaggtccatcttataagtatcattaacaattcccctgaaacacggaaaataggttttcaaaatgctttttatacaggtcagagatctcttagattttaaggttggagctaggaattgagttctatgcaatatatctcatatagaaggacttaccatgtaatctggttcatatttacatcgtttaatgcagcatcttgcaaaaacctagaaatcaaaagaatgaagtattagaatgagtgttgattttctgaccatcaaggcacacaaaactctcaccaaggaaatattaaggtggtccaaaattttgatataatgagaaacatcaagaacattgtatgggaagactgcaagtttttacatgtatcatcatttacacttctccgtttgtaaccacagacaataaggcaaacatgttcaaagcttccgaaaagcggataagagagatgagtggacatactccgataatgaccggtaagggtgaaacacaaccagataataatctagtgcttctaacaccttcatctccattcctaatatatcctttagttcatatttgttgtactcatcaggatctgcaaagatataagaaccgttgtcgtcgatatgtcaaaaaaaagcatattgaaggggaggtactctcatgatttgaaaaataaaaaaacagaagaagaagatattacacaatcttttgatgtaaaaaacaagattcctggcctgcactatgctttcttcagctttagatgccaggtacaagcacgtaagagcaacaagtcgaggctcaaactctaccatactctttctgagatagtatagtaacaaaaggaagatattagacaccaaaactgaaaactttcgtaacacagttaacgtttttgatagcagagatgcaacatagagagacactggcatgacaagaatttaactcatttcattcctcacatacacaaagatgcacattgatgtatacgatcatatcaaaaatacattgcatacctgatataaacccgtctcatatacgtaattgcagtagctacaaccctacataagtagaaaaaccaaggcgacgattcatatacaagtccaggttacaccagatattagagctagttaaatctacagaagcaaaacaaagtaatggaagtactgcaacagtagaatctctttgatatagcaaaaattggacccccaaattgtaaagaaccaacctttgcctcactttaatgtgctgagccaatttcataatatctgaaaacaacaataaatgaagaaacaaagagacataaactcaaaaaacttctctgatcaatctctaatcaaaccagtgcaacagagacaacaaatttgcttaagtaagcaggagaattcgaagaattaagaagaaaaaggatttcgtacgattagacatatggaacttgatgagcttaaaatcatcaattgagattccacgttctttatcgagatcatgaactacgtcgacttcttctggatccaaaagctgtttactgtttcgtacaaacgcaaaaacaaaacaaaaaaattcgagaaattgaaattagaagttgcttagaaggagaagaagaagtgaattttgatgggtaaagttttaaagaacatttactagtgagatgaattccagaaattggcagccattttttccggtagaccgtcgagtctttggtaaggaggagaagcttttttagctcataagttcaacatttttctgttatctgtcaaatctctttggttggtggtctcatgatctatcatatcgttgcttttttctgaaattaaatttaaggctcggcccattatcggcccaataggcaaacaaatgaaagtattaactctgatataacatgttcgttgttttttgaataacagaacatatagatgataaaaattgaaatcttataaatagctaagaagtgaccgaatatatcatttcgacgaggtataatcagtttcaaaaggattaaatttgagtttggtttttttcgtcatgattaaggctataaaaattctagctttatatcatcagccacaccgaatatttttctctcacaagtttttgtatcatgtattgttcaaacgcttgatcagtgattttcttctaaccataagtttgggtgttcataaaagaattttcagaagaacaccacacatttttcgtttgcctaatatacatgttcatttgttttattgagcccatactcctttatcaaaactaactttttttctttaaacatactaaattcaaactaaacttagactaatacatactcaaattaacaccctacatgtttctcacgttcaatatttggtacaagccaaataggtaaactacaatctaaaaacgcacgagaaaaaccgcatgacaaaggaataagccaaataagttgactacaatctaaaaaacgcacgagaagagtatcgattatcccgtgtctaaatttaattccggtttttcgctatcaaaacaattcaagaggagttattattctctaattcaccttatagaattctttgggattatgtgctaacccaagttaaaatctaatgtactcattaataaaaggtaagtaatattaaagttagtggagaataaaatctgttgaagaaaggtgaggaagtgcaacggaccatgtttgacacgtgagagtcaaaaaggcaataaaaaagtcgtcaacacacacactctctccccgtctatataaacatcttcttcacagtccccacaaagtcctcttccgttgccttttcgctttctccgtacacttggccttccttctagcgatcaaaccctaggtcccgccattgttggtcccagacttcaatcgaagctccaatttcactaatttcaggtgaatcttcttctactatttctcttccgtcagtttaatgtcacgatttcgccggaaaaatgtgatctacactgtttcggagtgaaatgtgaagtagatttcgttggtttcttagctagtttgtgcttttctcgaagttgtttctgtgtttatttcatgaaacgattttgggttgcttttgtgaagttgattttgttgttgcctcttagttcgttttcttgcttgttaagtgtttatcgagtcactatgtgtagttcatgaattacgttttctacggaaacgattttggaaagttgtgtgtgagatttagagattttctgttttttacatgattcttgggttgttctgtgatttacattgattctgagttttgacagtcttctatgaattacaggtgttgtttattctctggaagttggcgatacaatggattctactgctgcaaccaaacgtgttgttgacccacttactgtatgttttttcaattatggggtttcttctcctttttactagttgtaattgtgattctttgtgtggtttgttctgtttttgttgttgttaaagtgtatttttgggtttggttaatataggttgggagtgcgtttgtcaatcagtactactacattttctgtaacatgcctgagcatctgccccggttttatcaagagatcagtagagttggccgtgttggacaggacggagtcatgcgtgatttctccacttttcaagtaagtagttcttagtagtttagttgggtttggttgaatgaggatgagactatatcatttttatgatgttaaggattagtaactaacatggggttgggctggagtgtcatttggtatggtggaaattggatggcagtttaagtaacttgctaaaagtgtctctcattgatgcttattctttgtgcagggtataagtgaggagcttaagagactgacttatggagattgcaactcggctgagataaccagttatgatactcaagagtctcacaatgggggtttccttctcttcgttactggatacttcactctaaacgagagatcgagaaggaaattcacccaaacttttttccttgccccgcaagaaaagggtttctttgttctgaatgacatcctcagatttgttaatgatgatgctaaggataatgttccagagaccatagatggggaagttgtttctgggataaactctacaacacccactattatcaatggtaagttaaacttatatttcttctaacgcaaattctattccaatccttttcttacactttagctcctacaggcatgaagggttcggagcaagctgcatgtgtttcagtgaatcctgtttgtaaggaagtgtccaaacccttggataatgagaatgctaaggataatgttctggtacctgagattgctaatgaagttgcaaggactgagataacttgcaaagaagttgcagatgattcacagaaaaattatgaccctgatgatggacttgcagatgctcccaagaaatcctatgcctctgtggtaagtagtcaccctagaggattcatactcgatcttgttacatcttattttaggctttactatatcacttcttgagttttctattgataatcaatgactatcataacagttgaaggttacgaaagataaatttggagttccagctgtctctttaccttctccaaagaagatacctaaagaccaagaacatcaagcgccttcagatccttctacaggccagatactcaaagaccaaggtcaacaagcatcttcagatccttctcaagtgatagaatctgatacagtttctgagtctgttgatgcttctgaaaatgggcacaatcaggaaggtagtagttcacagtatagctgatcctcaagttttcaattataatatttggtggtctatattctcatatctattcatgacatggttttatacttcttttgtcttttttattagcggtagctgagggtacatctatttatgtgagacatcttccttttaatgccaacattgacatgcttgaggctgaatttaagcaatttggagctattaccaatggtgggattcaagtcataaatcaaagggtaagattgaccaatcaactaacacttaagtattggaagcttgaatcctacatatatgactggcagatcttacatatattattgttctgaacaatgataatttactgtatgactggcagggccttggttatccttatggttttgttgagtttgaggaggcagatgctgcccacagagcaatagaggtttatattctaaccttgaatataattttcactttcttgtttagcattatagaaaaccgatatgaaatcatctgaatgatgcaggcttcacctgtgaagattggtggactgagagcttttgtggaggagaagctatcgacatcaagaggtgagcaaagtagcaaaacgttgatatggtaatgtggagaaagaggatgatgattgtttgtttgcttgagtaacaggtaaaagaggaaatggaaacgtgggatacggaaataggaatgtgggagtgggaatgagaggaagaggaagttatggatatggctatgattacaggaggggaggtcgaggtcctggaggaggaggaaggtcttttaaccgtagaggcaatgaatacgtcgccagcatcaactcgtactagagcggatttgggttctcttgtggcggataattgatttttggaatggtggaaagaagatggtagcaagacagacagaattggtagatatctctctctcgggtattcaaatattagtaaaaggtaaaaaaaaaaaaaaggatttgtggtgatattatggcttatgatatgtaagacgtttctaattcgacaatctaaatttaatgaaatgaatgtgcttatgcttttgttttttgtttttttatttgattctgaacgtgtggtatactggtattactgttccttctttgacctaggaattttgacccggatgcagcagcatgagctacttttttacccagtattgagaaaaagtgcattgacgagatgacatgagctggaaaaactgagatatttcgactaaactatatagctcaactagccaaataagtttaccgacacttagtcgagtttagttgactgagatagtctttggcttgatggtggtttaggtttcttgggaaagttaagtgaccgcttaacggttactcaggactgttggatcagatggaaaagatataactaagacaagtaatttgagtcgttaccaaaacctagtcgttaaggccaacaatctcagaggctacacataggaatagcaaggtgcgatttctatcttcttgatatttaagatgtcgcgactcaccagttggtagagaaaacaaactaagctaatgttcaacaatacattgctataccaatcacactccatgactacaagattcaaggctcaagaggttggtgttcttggtctgtttgttatcaatggagttcagggaattgcatctaccactagaaagatcttaatcacacaacagttaataaaactgtggactaacattccaaaaggatcaaaaactataatctatacaccattcaatatccctcacaaagaaggcatctaaaaaaccaccatatcaccagcttggcctatagtatccagttcttacttctcagtataaccacccagcaaaacgagaaatcaaagtagactaccatatacaaatcacaatggagaagaataacacgaaagccaagctccttctggcacttctactatcaggcgctgaagggaggtatgcacctgaggagcaaagtgaggttatcaccaataaccagcaactctggggttggtttcctcttccacattatggctggccctttcataaaagacggtttggttattttcctcccaaagctggcctcaacaaacagaaccccgtgcccggatctcagactacaggtgatgccaatgttgctgcatccaccaagtttccatgactaggtgacgatgcatgctagcaaaatgtgaccttaaggagtgaataaccacaaggcagagcaatagagcatcgattcaaaaccgattctattagcttctgcaatctatcttctgctaccattgtactctagacccagtgcatggagttctaataaatttcccttattttttttttatttttttttttcacaataaatttcccttataattcctactatttgctcatactgacatacataaatactttacgcatttatcagcaatgtgagatgagaactggcatacacgacatgatcaagatgtagaattttagtaaagattcaatattaatttttttttccatatatcttatcatctatcaagagagaagagtatcgactgagaggtttgcagagacctaaattacatagaacaacaactaaaaacaaagagttattaccaatgatatccatcgaatgatagggccttctggcttcttgatcactgaatatttctcttccaacaaagcaaaatattcaaaaataccaagtcaacgaagtcccttcaatgttccaaagtgaataggaggatagtctgataaaccattagacctgtgagaatggaaaccaaattccagtttagttaattaagtatacaattcaaatctagtaaatctctacaaacgtggatgataatataatcattgtttgacctacagggtggctggtgatgttgccggaccactcatctagtggttggaaggaaaactcgaatcagctcttttgcagtaacctttttcctacaagtagggcatttgccctggcgagatattgccatctttatacatcccttgcagaagatgtgaccgcacttggttgacatctcctccgtaaagggacacatgcagattggacatgtaaactttggctcttctggtggaggagctggagcctttgatctagacactctctacacaagataaaagaaattgtgagcttagactaaatcgcataactgcacagtacatgattccagaaattcacatctctcttaccgaagacatgttgacttcatcatttacagaggcatgctcacagtcgatgacagattcactagaaggaatccttctgcgtttgttgcttatgttggcagggaatctagtcgtacctcctgcaaacacaaagtaaaatccatccatcaaactctctgtctctccctactacttgagacatgacattgaaccagaagagtaaaatttcttttcacaatagataaaaactgacctgactctacatcaaccatcaaaggtctccgacgtgcatttcttgatttgcttttagcctggtatcaaaataaaacaaaatcagtgaacctactacacaaacaaatcctatccatcactgcaaaaatgagaaactaaaagataacagaaatcaaacatacttcagcaaaagcactagcggatgattcaataacatcatcctcaatagcatcgacatcaatcatcgtaggagcaggctgagacggtgtaataggcaccgtaagagttctaacagaagcagaggtcccttcttgatcaacaggtaccgcattcagatcaatcacagctttcctccgtcgatttcctcgaggtactctcacctctgacgtgttcatctttcagctcaaagtaactaacctttgtacctgtaagtttcaaccaaacaataaaacaatctaatttactcctcaaagtcttatatacaaactcaaatcattgcaagcaagataatataatttccgtgaataatctcaaaatgtatagtttcacatatacttacagaaaaaaaaaatccaaactttagacagaatttttcaaaagaacacaatttcacagcaaaaagggaaaagaatcaatctcccagaaattcatcgactttacgaaattaaactcaattgacagtaacgagacgatcaaattaacaaatccgatcctaaaatcgagaatgatcgtttttaatcaaacaacaagagaaatgaattagattaggttttgatagagaagaacctcttcaatcaatttgattcgatgatcgctataatcaccttgagccgaatttcactcgaggaaaatcgccggagagaaatttgacagccaatcgattttgtgaaatctagggtttttgaatctttttttctgtaatagagagagaaacacgaaggtggtgagaaacggtgagagttttttgagttcgtaataaaaagcgacgcggtcggtgcgattgtgacacgtgtcgaaatcgtaatgtagcttcctcgtggtttacagtgttgtttcctaggaaaaagcaaaatttctaaaatggacccgtttgagatgtttaaatagcccattgggttttacgttagcaatgacgataacaatttataaaactttgttcagcccatttgtttggattttcaaacactcgtacaggtaaataaaaaacatataaatattgctaagaaattcttcaactttttaattttgtaaatctatccaccgcattttaaaaaaatgtcgaaaaaacgcaaattttcaaatttgaaataaaatacatgaatgttcgaaatgtcattttaatcgtaacgtttgattttctgataaatatttggattcacaattcacatgtagaggtgaatctttttatttacctcatcttttctaaccaatcagaattttttatctgataaaataataataattataaaatataacatgtcaccaaacgaaattatatgtcggtttggctttttacgtttataaaagagggttagagtttagattttataattaaacgaagttaaatttcggtttagggttataaacggattctgattttacacttaaacgaggttaaaactcggtttggatttaaaattaacggttaggatttatattttataattaaacgatgttaagtgtcggtttaggtttacaaaaagagattagagtttagattttttgtaactaaacgaaattaaatatcgtcttgggtttataaaagaatagttaaggtttgtatattataattaagtaaatttaatttttgtttattataataggaggtgaataaaaggattcacccctataaatgaatctgagtattgttcaaaaaaacgcaaatagagtaacagaagttgcataatgttttagcaaaaactactccttacatctccataagaataacaaagatattattaaaaaaaatcaagcagaagcaaataaaaaaaaagaggattatgtaaaaaagggaaatgatcatcttcattagcttccctttcggctccatggaggaaaacagcaaccctacacataacaacgtcaattgtaaaaaaagaggatttatgaaagaaagggaaatgatattttggttatctaccttgggactagaaggtaatggttgatgatgttggtcgatgatgggtcgagtcggggtgctatgatcggttccattgtaagatctcgcttggttcctatcttctttcactttgtcaaagataagtgtgtaactctgattttccatgttagaacccgttccaggaaatggaggaatagtcgccacctaattgagaaaaatacacttacttagcgatatatatttatgagttgtgacacatattttgtactataaaatggtaaagttatgcataccctttcactactttgccctctaagattgcgtattggccgcgccgggacatgatcacgtgattgccgtctatttatttctgttggatttcccattgatctgccacctccaccatatgtttgatggttgtatgtttctggtgtgggaggaactgatctaactctgttgtttctttcattgtgtgcaggagacggtctgaattcggtttcgtctctgctattgaatctttcatgtcttggtctaacattatggtttggtggttgttggtcaggcctagacatatttcgattttgtgcagcgtttggattcatatctggatattcattcgggttggccacgttcatatttttcttgctcttgcttgctttttcgaacacgaccgtgaatggagcatcttcggtccagtctccgaatttgggcacgtgtggacgattctataaccacaagaaccaaaaaaaaaagattttgagaaacataggcttgcatttaaattgaaagtaggagacataaatattagaaaatcgaaatctcatatatacggtattttggagttgatgccagagatttacagttgaaactttgtttttggctaaatgtttagagctgaatcttaaggtgcaagaaacataaaccttatctctttttttttggttttgattgaacagaaacctcatctgtagaatctaagtataatttcattacatatgaattatattgatgttcagaagatgaccaaaaagaattaggtgatcttcctacgcataaatgtcaaacaaaagaaaatctcatgataccgccgattctaaaacaaaacactatatgtcctaaacaggatgatataggatccatatttagaactacaaatatttgacaattactctccattctcacggaataaaactcagagattgtgggtataataaatactacacttgtaggataataagctttagaaaatcaaaataaaaagaagactaaaaccacacccaaaagaaaaaaaaaaacttactgccatatttctgaatgtcaagcagccagaatgaagaattgcttcaaggagtctgaaacaaagagagattattgaaagatagagagagaggtaagagacgtgtaaacacgaaggcgttgacaattcattgtcattgacttgtctttcttgtgattgcgtaaaccaacgacgactcattctacggtgctagttggtcttctttgcaccttaatgattaacgaatagttccaacgaacgacgcgcttcatgcttgttttattaatcaaaataaaataattgcatactaggtattatccgatcacataaaaattatagttaattggtccaataacctaattgagtttgttgaccacaaaaaaaactactatttgagaaggttaatttcgaaattagacaaataaaaaaagaagttaagttgaccaatatttgtgacataccatgtataacttttgttaactagtatcaaataattgagtaattgacatatagctatttgagatagataataaagttagagatggtatgcctaaaattcttttatgaaaaaatgaaagaatttatgaagaatttattaagctacaagttaaacttattctcaactatgtgagtagagaaactttatagaacaaggcggagtaatgtttttggtttcgtaaaggtatgggaaagaaagtgaatgacagaaattacctaaggccatcccaattgtaacagaacttgagggtgacttccctttgttaccatgacagcttgcactcctcccacgatggatcaagtctctaactcggctccttaaattctttccaatgttttttggtctcttttcttgtaaataaccttttgtatattgaataaatttgatatactaaccaaaaaaatccacaattcaatggaaaaaaaaaaacagatgcaactttaccattgcttcgtcatctctcttaaaagtaaagcaaaaggacaaatttattgttgcttttacaaaggcatgagtagttttagactttagagtagagtatagagttcactcttaaattttaagtttacataattaattagtacaccactaatcacaaccattgatctccctctctctcgctagattagtactaaacaacatttatacctttatgctttctactgaacttttctcagatccttcttcactcttcagtgtttcctctctcctactaaaaccttcttcagtttcttgaattcaattcttctcttagtcttctccattttatgatttcttggtggtatcaagaactcagtgaccgatttcttgaaaaagctaatgagttttagataaactcgttgcttgctttctcttcattctccgatctgggttttggttttaaatccatacccaagtagcaaaactagaagacaagagctatagaaattagggtttagagtttaccttattggtgaattgtggtaaaggaacaaactttagggggagaactcattcagacatgattcagttactgtttctagttctatttgtggaaggtgcgattgcattcttactgttgataaagattggtcctttgagagagcttgtgattaaaagtcttgaccagatgaagatgggtaaaggtcctgccactgtgaaaacaatcgctggaactatgtctgttattctcttttctaatcttatgagcattgtcaagatccagaataaaggtgcaaagcttgggacaatgtctcctatggatcaggttctttggagaacacacttgcttgaagcttctttattgggtcagtttctctctttttttctcttgatgtgataaaaattgaaccatagggctttgttatttgattgttgtcttgatttgtctttagctgttggcttctgaacaacagttgaaccataggactttgttgtttgattagtttttagttatggtttctgaacaagagttgaaatcttggctagactttgtgttgatcatggctctcaagtagggctaatacagcttttactgaattcttgtaggctttgttgttcatagaggaatgatctgaataatgcaaattcgcaagcttaagttgagtgagcacttctgtaagaagttaataatgttttgattaagagtttgtataccaattgagtggatggtggtgtcgatgtatagaaccacagtaccggtgttttcgtatcgcacatatgaatatatctatagttgtctccaaggctctgttctgctagtattcaccagatttgagaagctgcttcggtagttgataagtttggaacctgaatccttattaacagtaacaaaatacttcctttattgatcttgatttgttgattacagtgcattcacatatgatctagctcttagctatatgtaacacataaaaatgttgagctatataaagtgtgtaacataatgaaattacatttgaagctaaaaaatcttaatgatcattgcaggagtcgtactttttctcggctttataattgacagaatgcatcactacctcagaaagctaatcaatttgagaagcaacgtcggatcatcgaaagaagaacttgaacagctccagaaagaaagaaccgaactgaaggagaaagaggagaaagcatccaaggaaatcaagcagttgcaagtaaaattgtcatctattacagagagactaaagaaagcagagactgagtcaaaagagaaagagaagaaactcgaaactgctgaaacacatgttacggcgttacagaaacagtctgcagagctgcttctagagtatgatagattgctagaagataaccaacatctccaaagccaaatcttggggaaaaccaagagctgatgttaagattgtctggtgttatttaacaatgagagagtttatagagtattgtagttgcaggaattcttgcaacatttttgtttttagtgtatggatattgaatggttcttgtttcttctcaagtctttggaatgtttttgtgacgacaattatatcaaaatcagcgttgagtatgacaaagaaagagagctaagatagttaatttgtaactaaaacccgtttggtaagagcttttccaagcttggttgacatatttgtggggaaaaacacatatcacatggaaaaataaacaacaaaaataaaagtatcacacatctacgactttaaaaggcataattattgcaaaactataatagtaaagataacacagtcacaaactcacaactttgagaacataaactgtaatgcaatttattacacacaaaaaaacttaaagctgatcataatttcacttatcaattcatccaaattattgtaatataacatttaacaaaaacctaatggaaccatgttttattggtaatacttgaactagtaacagggatgatgctgcttgagttggcggcatcaagagcgttggaagattcgtcatggatctgatgttggtgctcctgtggctggtgatggatgtggttgtggtggttatcatccatgaattgatatcccatttgctctgtctgatacctcatttgctcaggatggttcatcatttccataaaccattcttgattttgattatagttctgatttaaattcagatttagattttgaggttgctcattaagtccaacatgttgagccgccggatgacgaaattgttgaagatcaataggattaacaaaattcgcgacagccgcaaatgaggaagaagaacccacctcataaattgtagtggtgggagctgttgtagcgaccaaattcggcattggtatattcccttcagaagcagctaccgcaacagaagaagattcaccaatctccgtaccagaatttcgtaaaatctcaatcctgcgattaacatctttaagatattgctcaatcatataacccaaatcattaagatccacaatattcaaatgaaacatctccatgtttccaatcaaacattggaacatgacttcagtcatctctagctccctactatcctttctttgtctcctcaaagtttctgtcgctttcgcgattctttgtttgagaaaaccctcttgatctaccatctttttgtgttgatccatctctgggagtgtcctaaattctgaaaccaccctttgcacaccggaatttgatggccacacttcagggttggtatcatacgggctgtagatgatcgcacatgcagtgatgccacaaagagtcgagagttcgtgtaccttcttcatcaaacccttctttctttttttgaaagtcgcttttcttgaagaatcgttggaaatgtaagcaagtttcactttctttcttgtcattgaaaaaatatttctctttgttttttcttttttatttgtgtattttgttttgagattgtgaatatgtactgttatatatatatagtaatgaaagggtacaaaattttgtttcttttagtaagtgacatttaattttagattacaggtagtcaaaaaatataaaatatttactgctaataaaattgtgttatatagggtatcttttcttttattacaagaaaaaaatctaaacgtccaaatcaagcttaatgcatgaacattatattaaaaaatctgaatggattttagatacagatgaaaaccgtttttcattttacatgtattaggactactggtttgacatatgaaaatactattgtccaaaagtcatagataaatattgtattaatctaatatgagaatgataatatgaaaacaataaaatagaataaacaattttactttttaacaacaataatcaagaaatatcaatctagtaatgttatttaatcaaaatgcatttagtacaattatttaaaaatataatttcaaatattgtgataactagtaggatttggtattataagatagtcaaagattctgtttcaatatatttttgtgatttttttctttactggaaacaatgaatataggttattgaatgatctaagcatcatagagttaatctaaaaaaatcgtttcataaatctcatgcttttgcatagataggaattttacaatacacactagattttaacccgtggtataccgcgggacgatttattttttaaaagtaatatatattaaaatttgcaaattttatttttataaaatatttatattttatagtttataattgttattaagtaacgctataccacgaatccatgagacaattgttaaaaaactgaagttgtaacccctattaaaacaacatattaataatattttaaaattttataaaaattgattcaaatacatccaccatataacccaattccaaaataaaacctgttctataatttatttacccgtcctgtgatttttcttttaaagtaataatttttaaaatttaagaattcttttttatatatataagttttgcaaattgtatcattctctaatacatttatagtttataatttaattttatatatagtaacattatacataccacataacatttttggttttatataattttttctaaattaggatgatttgatatgtttaatattagtggtcttaagaaataataaattaaagatttaacccgtattgaaacggtggattaattatattttacttttttattaatgttgattcaaaaacccgtcactccaaatccgtcttgccaaaaagccatttattttattaatattaattttactaatgatatgactctgaattataatttaaatattttagctgataacataggagtagaccatatttatttaataggggaatgtaccatatgacccgaatgcatttttacccaaatccaccaaaaaagttttgcaaaaatactataaagataagaaacgatagtcggttttgataggtataagattagcaaatatattagttagtttaaattagttaaagaatacaaacttaaaaggaatattacactttattcgaatatagtatcaaaacttatataacacagagatttgataattttttaattgttgaatactttttttgtgctaatttttatgtgattaagatttaattgattttgtatataaaatattaaattgttttacgaacttatttgtttataatttggtaacagataaatatttgagtattcagtatattttgcttcagtttaggaaatctttgatgatccgtctttagatccaataagccctataatctagatactaacttgtagtataccgcatgtaggcttatattttagttaaactaaaaatttttatcgtaaagatgatttaaaaatatatgatattattttatttgattttaaatgtatagtaaactgtgagttgtatatgttttgttgatattatctatattgtttagtgtttaagattatacacttgtagtttgattgttaatttaagagtttcacctgtagtataccatcttgtattaatatcgatctaaacccgtcaattttaggatttttcagcttgtattaaaaactgaatcacatcatacacataaaaaaatctaatatgttattaattattgtagtatataagattataaattttcaatataatatgtatgaaattaaatataaatatttcaaattatgacccgttactcagtagaaatataagttttcttaaatatatttttcacccgttataatattttttcatgtattgaacagtttatatttgtttttaaaaattataattatggcatatgcgaaaaaactctaattatttttttataatgatgatattattttttcgcaaaaatagaatcatataaagatgagaagtgaattataataattaataaaaaattaatatgataatttagatatcaaatctaatttgttgattttaattggttacttttttggaaattaataatgtatttcatttttctaattaaatcaaattaattaaaatttagatatcaaatctaatatgttaattttgattggttattatttttgaaaattaataatgtattttgtttttaaattaaattttattaattaaattagtatttgactttttaatctttaaagagataaattagtttactctttaaaattttatttctaatggcatacctatgtaattacttacaaaaattaaagttatatttaaaatgtacttcccaaataatatagttggatcatatgaagtataaatatttcagaaataaaggcatgtacaattataccacatttcttaacatttcttaaatgaaaaataaaataaataattgagggtggtaacttaaataataaaattttagaagggacatgatgggaaattgttttgtagccaacttgtgatgttatcagaatattacaagtcacattagtaatgaatcagactatcagagtgtatattgaaaatcaaaagtctaaccaactgtacatacattcttagaataaaataattggtataagtatatttatatggaatttataaaaaaatgtataatatagaaaaactctacatagtagttgtagagaaattggcaaaaataaccataaacatttatattttgtcaaataatcatataacataaatggtcttcctggaaagtactattagagttttttttttttaaaaacagtgtaaaagacaattaagaataaaaagtatctagagcagaattttttatttttggtattgttttttttatttaaactctaaaaaaaatttagcttgtttagatagatttactatattttatgatttatatgtaaacatgtgttagtgtatatgttctatattgaatgaaacgttttactaagtcacatatacatttagttttttgaaaattaaaatcgtagcctgagcgaagttttaaaaggggtttcaagattcatttagtttttacaaaaattgattgcaaataaatataaagatatgaaaaaagaaattattcaaaaagaaaaatagaaagagaaaatgaaaagaaaacaagagtaaagaaaatgcgcatgtaagggcaatacggttctattattaatttacacatgaaatatcataacatcaaggttatgaatggtgacataaaccgcattcaaaaccgcaccgcaacagtgatataaaagtatcaaaatttctacatatacatatgtatctatgtattttcattattattgcaccgcaccgcatttccctgcaccacaaaacgcagccactattcggaccgcaaatctagagcaattaaggtgaaagagaaataagagtaactgagctcaaagaaaaaaatcaaatcaagagtaaaagttagattttttttaaaattaagagtaaaagttaaatttgagtaaaagttaaatcaaatcaagaggaaaaacgaaaatcaaatcaattaaaattatttttcatttttttttcttaaatttagaaacgcaaagactataaccaaaaaaacaaaattctaagagctataataaactaaaagtttattaatttggagagctataacaaaacaaaagtttttcacttttttttttcatcagcatttggttagagtctttgggtttttaaattttacaaaaaaaaataaaatctaaacttttatttatgttaaaacaaattttgtaagtataacaaaagtagcattcactaccgttgataacttgatatagaacacagacttccacatgctttaaatagaaatcataaaatatagtaatatttcaaacaataaataaaaaaaaagctctaaacgccgtctgtggggatcgaacccacggccacgtggttaaaagccacgcgctctaccactgagctaagacggcttcatgttatctattcttattttaataaatgtttcaagttatattcataagaccaataactcttgcctccttactacataatctggtcttaaacacctcttcaatcttcattatcatgtcttttctttgcaaattgaggattgtaatttagagtctttcgaattccgtttttcattcgcaaaacttggtgaatgatcaactcttgtttcttacattccagtcacaagtttgttttcttgttcgcattgctttgatacaaagttcactaaaggaagcaagatcttaaacacattccaacattgctcctcttgtctctctatgttaaaaggttacaactgtttaatctcaaaactctaactacttgttgtctcttgagatacatatgagaaagataaaaagacaatgaaaagtcaaaatgcagcatctttctgacaatatccgagatgtgtatcatcatgcacctaagctcgaagctggactatccacggttatctcccaaagcaagaagtatcttcttcctaggtccctgaaaaagaacacatcttgtcaacatttcaaacaaagaaactcgaatctaaacattgtcttcttaatagcaaccatattaaatatggagcaaaactgaggccatgactattagtaaggtatgctgatatcaagcattgcaacaacaaatcttgtggaagcttatcaaggactttaccattggtatgagca

SEQ ID NO: 858 - DNA, 78973 bp, Arabidopsis thaliana
aagctttgaggtcatcatctgtcatatgcctaagagcatccatatcaacctgcaaaaagatgaaaaccaataagaatccttgtacatctatagatgtcatcaagaagagaacacagaaactaacagtaaatacatgtacatacttcttccacttgaaatgcagtcgaatatttctcgagacccaatgattccaggaagctatcaaccgatgcatcattctgaaccaaaagataacaaactgagaactagtactgatgaaacatctatatggcataaaacactggtgaagaattatatagttggagagaatgaattatattgcctgctgtggatccttcttggtagctctattcggagccgctctagtctcgggtttggttcccactgaaaccttctttatggctggtctaacagcctcccttttactgttctttgtttgtggattcactgtcctggataacttatctcgtagatccgccacgcttacactaaatactcgtccaccaatttgcgagccatgacgtttcttttggagcttcaagcgaagatctttagggtcaactctacgttcttagcaaagtcaatacaacagagtcaacaaccaaacagaatatacatacacaagcattcaatgattgtaagtaaaacaagcaaaggaatagtgatagctaacaacatacttgaaagccgaggctcgtcatcgtcttcgaaaagatcatgctcccacttatcatcatcttgccttcctctgaatacaattaggtaataatactcatcacgcttttgtttaaacatcacaaaatcaatcataatacagagctaaaatctatggaactgtttgaaattgtagtaaagcaacagagtttatgagaaaaatcacaactagttatcttcaatacaaaaccaaagaggagattcgaaataagaatccatagaagtaagaattcataaaagcaaagtttaaatcgaacctcttccttgtgacttgttgttgtttgccgcgagaagagaagtcaccggaaccaccattgagacggttcttgaacgttttgctgattttagtttcagccaccactagatcagaatacatatcgaattggggaaaacaaaataaatgaaaccctaaaccctgaattaaagtgaattaagagggagatgaacgaaaccgaacttgagctctccaaagttacaaaaccctaaatctaaatccggaaatctcagaaacttgagctcgacaggtttcacaatattattatcaaacaaacccgggtcgaatcgggtctacccgaagtattatacaatcgggtcgaatcaaataagtcgggtcagataggtttatttctttttttttttttttttcttaccataatttatataaaaatatatatatcattaaaactgaaatatcgggttaaatgttagtgggttttaaaattagtccaaaaaaaactttgtttttatattatacttttttagattttttagtacttatcaaactgattttttatattgtgcagtatgggagattcgagagcttcgtttagtctcgcgacaagatttgtttggtttttgcaatgtattatcaaaaactctctttttcatcttgttatatgttatgacttatgagttgaacattgtatctctttatttttcatgtgtattgtatgtggtaacttttttcaatccaatataatttttgtgaaaaaaaaagagaaaaaaaaaactgattttctcaatagtttcaaacaatgaacttataattgtttatatacaactctcacataagctcaattgcaagtaactaacttctccttcacgttgcttcattctacatatatatatgtatgttatacacttatttaaactatgaaacttcacactcttcatctcctcttattgctaagacaatcaccattatcttaacttgtataaatcaataggatctttctacaatcctctttaaccaccggagaagaaaatttctcttattttctcaaatacaaatatgactttcttgatctaaatctatcttttgcttcatctcaacggtggtcaactactattgttaaatccgtgagttttccggcaattttaatcttttcctatgaatttccccatccacattgaagttctaacttttgtttgaatatcgtaccataaccatcaattttatatatgtattgatatggttacatttgttgttgtagccatagtaacactttttgagtttcgacttgcaaaataggcacttttacactttttgtcttatatagaacataacaattcaggaagcgaaagtttgttgttcacggtctttcagcttccgtggatagaagaccaaagaagggattggcactcgcagagttcaacagaaacgcagcgtctcgaagccggttgatgtctgagtcacgtttcgatagagataagaactcagatccttcaactcttttgaatccacaaagctccatgaactcaataccttctttatatcttccaactctctcatggaacaagcggttcttgagacggattctcctgtatctttcttcgtctggcttcttcgctacgttcctcacaattgtcagaagcgtttcaaataccctcctcgtgattcttggatcttcatcctacaaaaacaaacaagatttcattatctctcttctttcgttttttgaatcatcctataacgttttcttactttgtggtttcgtcttaatgaccttaaacattctctcatctcctctgctttcgagactacgcttggcgacgacatcactattctctgtacatgtaatgttaagggcaatattatcacattcttcacagtaaaatgttacaaaatgtgtaccttagggtcaagtggcgaaactggatttgatgtcgaagcggattctgtttcggttggtaatccgagcctccgttttctctccagctacaggatacatttaatcaaaaatactgttaacagagaatcatcagttttcaattttgagtgtacaacaagatatcaagatctatcaccttgtctgcattaactttcagcataattttctctcttgcctttttctcctcatctttctcagccttcctcaaagctatgttcctgttttttatagcatccaacattgttttacttagttcaaagggctaatatgagattcaaaactctctttctcataccgttttctttcgttttcttccgcaattcgctttgtttccatcagctctttccctgctcgtatcctttcctgcaagagtgttaaagcttttagtcttcttcgtgacgatagtatatgatgcaagtaattgctttgtaccttttctctttctctttcgcgtttagtttcttgttcttctcttagtttacgagcttgttccctgagaattaacaatgaagtcatttgtcctaaaaaagagtcaagtttaaaaaatatgcatatatgtttaaatggagacttacttacgatagttcttttgctcttgcatgagaagtttctgcagtatcatcagatggatttggagactcaatctcaatgttaaactccacctgcaagaccacctttgatcaaaagttttctatgaaatatatgaaaaagaaatgaagatgaataatacataccaaaggcatattctcaaactgcgattcgttctcatgatctatgatccaattcacagctgcttcaaggcttgagttacctgaagatgaagagagagacaaaatatgggtgatactgatccatgaaatgattcttggaatatgctgaagtggttaaaacataccagagtgatgcagagcccatgctgctcgagccatagagaatcccatatcttcaagctccttaagcaatccatgattaacctcaattgcagcattttctgtttcaccaaaaaaccatcaacaacagctttagataacagaaatgagccctcaaaacaccagaactatgatatggtttgatattgaaacagagaagaattattattgttaccggttccgtctgacatatttctaaaaaatctcagagatttcttgaactctgtattgatgtttgaagccgatgaaagaatggtatcaattgtatttgtataggatgtttcatcattgaatgtacattagatttaagtaatataagaaaaaaaaattccttctgttgattccctttcctcaaagtttgcaactttttgattctattcaaaacttgtaacagaagcaacatatctttgtgttcctttcttgcatgtaacaatgaaccattttagaaatctaaatctgcgtattattacatcttaaaagtggataaaacagagtattcaatcaaagcttttcttattagattaaagagaaactcattgctcctttatatagaggagacttgtttacaggaatcaaatcgaaaacaataactcgtacaaatcagcacaagcataatactcggccctgtaacttattcagctaaacgtgatacgaaaatactcagaaaacgacttcaactttgaccaattccaacattacattcacaccagaaacactcaaactctaaatactgtagaaggaccaaaaccactttcttgaggcaacaatgcatcgatttgatctccatctttcagctccatctgagaaaacacagtgaaaaaagatcatttatgaatgatttatctttatatattataagaatctttaagcttgaatgataatacatacgtcatcagctgtatgatactctcgaattcttgagccatcatcagatagaaagcgaaatgtgttccactctatgcctctcattttggcgtaatattccatcaatttaagaagcctagccttccttctcacccggaagactttaaccccttcctcatcctacataaatccacacatgttatattaagtcatgcatgctaatatagaaattgtatagtttcaacaatcaaatcttacttgacccttcacattcagagtaacatgagttgattccgactcaacgtctttacgcttttccccttccatcttcacttcattccttccatgaatactactgctcttcgttgacattatctccactggttggatcagataattcagttctcaagacatgattacgtaggaatgattttttttgttgttgctaaaaggtaggagttaatcgttgtatatttatacaagaaactgacgaagattgaaagacaagcgagacaatactccatcggtcaaaaatttatggtcgaccaattattactactcccaatgttaattctctatgacattcttttagccaaaacttcattgattaaggctttgaatgggagggaagcagaaaaaatacatgttgacctttgcatgtagtgctgctcctattatcaagacattattcctgtatttttctttttgttttaatatttatagttaagatttctatttttttaaaacagttgatctatccatgtagtccttctcttatcaagacatcattcatgtatttttatttttgttttaatatatatatacaagatttttgttatttaaaatcagttgacatgcatgtgtatgtagtgctcctgttaccaatacatcatttatgtatttttatttttatttaatatttattaatttaaatcagttgatctttccatgtattcctcctgttacaaagatcttattcatgtagtatgttaattttaattttaatatttattttaagattttgttattgaaaatcagttgacatgtccaaatagtgctcctattaccaagacaccattcatgtattttatttttattttaatatttataattaagatttatgttatttaaacaacaattgactcgtcatgtaatcctcctattaccaaaacattattaatgtatttttatttttcatttaatgtctatatttaagttaccaagacattattcatcattcatgtagtactgttaccaagacactattcatgtatttaaatttgtgtttaaatatatttaagattttgctatttaaaatcagttgacatgtacatgtaattctcttgttaccaagacatcattcatgtattattatttttattttgattaataaagaaaaattgtatatagtgctctatatttttatatttgttttagtgtttagatttaagatttttgtaataaaaattattttggcgtatcagtgaaggactgaagaagacatgaaattgtcctcaccttaacaatttatagattgatttatgggtttaggactaacgggagattagaacctgattcaacaacaaactcgggctagatcaattatggtaaactggtcaaagattaaatcaaattagtacccaaagttaatatccattatataatccaccaacccaaccaaatcggttaattgattgtaatgatatatcaattaaattagggattgatccgctgacaatttgttttcttttttgaaaatttgtgatttttaaaattttatgattatatattatatataaaaacttgaaaattgtatcattttaaagataatgatattttatattttacaagtatcattaagtaactaatagtaccacatgacaattttatattataaaatcttatctaaatcaggttgattcgatatatctaatattggtggtgttaaaaataataaaatgagaatataacccgaattggaacagcgggttaatgatatttacaatttttattaatgttgattcaaatttgctttgccataacgttttctcgtaaaataacatgtttcttgttatttatatttttttctatgttcaaatgttcataatattataaaaacttttattgattttaaatatatcaattataaaatttaaaagttttaaatttactatagccggtagaattaaatgatttcactaaaaatctgaattgaaccgtctacaaacttttaaatttgtatgcttcgtaagttaaatttcctgctcattctgatttatatgatcattttgatcttttttatattctggctcaaaatcatagtctaaacattttagccgatttggaatgttaacacactaaatacttcattaattgagtaatatatgtacatttttaaaatttttaagcacaatatatactggaaacaaatttgtgaattttcttaatttatgtattattaatgattcaaaacaattggaaaaggtcaaacaaagatgataggagaatcataattatcttaaccaaaatttttaagtattatattattgaagtgaagaagtgaagaagagtttgaaagttgagtctcgtgctgctccatcgttattttgtatctcacagctaattgaatggacctttctcttctacggagaagaagaagaagtgtaatggattccaaaatgaagaatcttaagtcatcaccatgatgatcagcctgatgaagagtaattaaatctcccaagtcccgagtaccatggtagtgtgtcaaaagctgtaggaaaacaagaagatgatgaagaatgatcaatgacatgatgaagtaaactgaaacaaagaaattgggaataaaatataccatgtaagatgatcttgttgatgatacaaatcatatcttctgaattagtcttctcgattagagaggcgaaatatggaaatttgtgaggccctattacaaaatcagtataataaaatatggaaggacataaaccattcctaaacttttgagagagatcgaattgttactaaaactgcaataattaagatgatataggattgtttgtgtaaaagcaagtggtgagaattttgttagcttgctttccaacaaattgcaagaagatcaacaaagagatatgcgaccaagccttgtatcagttggtaagagcatctctaatggagagagatcttcatcgactctctccattttttgaagtataaatttaaaaaaaaatagaagagagttttagtttttttaaaagaaaagattcatactccaatcgtaatttctcttaatggggttctcaagaaaaaaatatatattttatttcctaaaacttataaaacttaataatttttgtaattcataaaatagtaaacatacagtattttaaattattttattttattagacataataattattgtaattcataaaattattaaacatacattattttaaactatttttaaaatagatgtgcaaaagaaaaacaaaatatattatcggactgttgatcgagtaattgattacgatcaaagctttgctctatgacatcggcaaatggaatacgagatgaagaagtcatatcgtttgatagcttctagtataaattaaaagataacaaaaaaattaacgaatgtaaaaaagtctttttttgttaaaaatatgtgttcaatcacaagacgacacgtgccatgttctctcaaattctcaaaactctctaaaaagagccgcttctctcagttaaaacgattttagaactatttttttgaaataaatgagagaaaacccataagaaattgaagagaactcccattggagttgctgtataagaaccctcaatcatcaaaacttttttgttattgaaataatacagaacgtggtttaaattcttaaattttcatgactatatttgttagtcttatgaatgggaagcaatatttttcgggtccatgaacgatggtcctgcatagaagactgacaatatatgaatctgtttttgttagtccgtactagcagacatgatagactaattcacatgtgaacaaaatcgattttgctaacagtttatacattttggtcagtattgcaaacggaagaaaagtgacatgcatggttcaaaagagagtacagaacatgagcagctaaaccaccctgcaacatccagaagaaaaatttaaatacaaaagagagagaaataatagtggtcaatatgcagtaggcacatttacgtagcttccccaaagaatagaaatctatttgactataagtctataaaaccagtcaagagcgatgacaaaaaaaagaaaaaaaaaagaaagaaagaataaacacttgttacattagatatttgggatgaaccatcgagcatcaaagaacttgctagtggaagacataaatggctcgaccttgcgcgtagagagattgaagataaatatgtgtttggtgccaaatcacaaccattaaaatagatagagtctggcttgatcctctgttttatcgatacttaatgcatattctcttgaatatctttggcagacacaatggttccaaagataattgtagagataaatactgaactaagaattgtaacaatataaataaagatgtgagatacttcaggatgattatgacaacctcgtcttcctctacaatggtcatcgtctacgtcctgaactcacacctgatgataaggtaatttgatctcaatgtttcttgtctcattcttgattcttggcctagaatttgtgatctaatcttttggtatttactggtgcaggttgatatggaaaacggagcaggaatcgaagcaataattgttggggcaatatagaggattggattcgtaacaacatagttaccatgatctgtgatgtctttacttctattactagttctaggtggatttttgtatgttgaacttagacttattgaggcgcttttttttcatgagaagagaatgaaaacaaagacaagtctagatatggtattattgatttagtgatttgtagagttggagaagtgacactaaacgtgcattgttttcttttcaagatagatttttagaagaaagttagcctcaaagatcgtccaaataccttggcttttcataaatctttccttcttcgcctacatgcctatggaggataaaacaattctttgaaacaagggctttgtgcatcagaattacgtaagacatgctaaatttaagggttgttagaggcacaagcaacattaatacagataaactcttccttttgttgcttccctttcctcaaagttatgcaatttttttattctattcaaaacttgtaacaaagctttttgttcctttcttgcatgtaacaatgaaccattttcttgcatataatatatgggttttagaaatctaaatatgtgtacatgtaattgcatataacataaacactcaaactctaaattttatagaagatgggccaaaaccactttgttgacataacattgcatcaatctcatctccatccttacgctccagctaaacaaaacacagtgaacaaaagataattttatgaatgacggatctacaagttcgaatgataaatacatacctcatcaggtgtatgatactctcgaatcctcgagccatcaaatagaaagcgaaatgtgttccactcgatgcctctcatcttggtgtaaagttccatcattttaagcagcttagcattccttctcacccaaaacactctaaaatcttcttcgtcctatataaatccacacaagttatgttattagtcagatatgttatatgtatgtactgaattaagaaaatgtaaggtttaaacaatcaatacctgacccttaactttcagagtaacatgagttgggtccgacacaactttacgcttttgcccttccatcttcacttcattgcttccaactctgctcgttgttgacattatctcaaccggtctgaacagatatttcagttctcaataaatgaatacacagaaataaacaagaacagtacagtacagatcatgaccgatcactcggcttggcggctcaaacggcgaagtggacggctctacagtaaagatctgcggtggttcaagcccatggttgttaggtataatggttcaacaatcaaaggcaaaacagagattagatctaggatttggatgacttgcagcacaagcaacatatcctataaccaaaacagaaaattcctgcgcaagttacagaataagtctagggttttcttacccttaaccgcctcgaagattggctacgactgctccggtgacagtacgaaggggacaacaataaacaatggtggctcaactgtctctctcccactcacgtggtggctgcttttgggttttgatatgctcagtgtttcttttgcaaacccctcgtcgtttttaacccaaggatgaagttgggccttaatgggctgatatttatgatttaaaaaacaaatagcccatatattgagacatggatgttacaatcatactaacgcactcatgattttactacctgcaacaaaaacagaacaaactgaatttgctgtattcaaataagctacgaaaatggaagaaacttgaacactttcgtgtgttttatcgagtagttttgataacaaaggcgagttgctggattcttcttggaaattctaatctctggaaagctgacaagagcggatggtaaatcaaattcttgattagcatccagaggatattattattaatacaagataactacgatcagatatttactctttcatggtatatacatttcatttccatgatctcgaaaaccctttaattgaacataaactttattcgactttgcaagaacatcttttcatgataacatttctccctaaatgagaaccaatagattagctttgctaagtgcattggttaagttcttctgacaagtataaacttgaaacatatatgaccatcaaacgtagctcaaagctcgaccccaaaaggtcttgcgttcatacttgctaacgggtcaaatccgcccgccccattgttccgtgactccaacctccaacgacaccgagtaataagatagttccaactaattgacctgaatcttggaacatgttcatgaattctcgacaccaaaaatgttacaaaaagtatccattaaaaagaggaaacgtgttacttctattgaaacaaagaaccaacaaaacaaaaaaaaaactttatgcctactttttgaatctttataagtcaagctaaaataaaaggttgtgaggcacaagcaaagctgagatttgttgtattcgtataggaaacaccaatggaccaaattttataccttgagttttgataacaaaggtaagttgctggcttcttcttggaaatctaatcttgtatgacgattcgggaagctaatcagagcggactgatagaattctatatgactaaataacatagatataagcatatagaataatttccaaaaagcactacaaacttttgatttctaggaaagagtttgtccacatgaaccttgtttgagcttgctcatcttcttctccacctacctttgatgacaagattggcctagtatctgatggtttttggttgatatctaatctttgagctatatactgatgcagcttgatatgaaagatagagatgaaattaatgtattgttgggtcactgtagaggattgtattcgtaatagtattgttaccatgatctatgatgcttttacttctttcaacaactagtttgatgtgcatcttttgttaattaacttagaaaattgtggccatatatcgctagagttggcctgaagaccaaatgtgacgctaatctaaaatacatatattgctaagaaattcgctcaagttcttgggatgatatttgaccaaaacaaactgtgatagatttgggccacaattacaatttttagcctacactaattattggaccaatcataagattggtttggcatttgttaaacataatgtacaaatctaatcaaaatatcctaaaatatcacttaaatcactccaaatctaaatagtaaattccatcaaatctttcaaaatatcaactcccacagtttataaaagaactattaaaattttcatatattgtaattttagctacataactttatataatgagaaatacaatccaaagatatagaactgaaccaaaaaaaacataataaattttagctaaataactttttatttagtaaaagattttttttttttttgggttcagttctatacaataaattaaaataaagaaagaagagttatgttctaccaactatataataaatggtgaatgaagaatcattaaatagaataggtttggtgtccacataacataaaaaaaatccaatacaggatagtatattcttattttatggtttaaaaaataatatttcaaactctctaatatataaaaagaagttttacattgaaaaatccgcaaataagcttaaaacgtgagcctattgacttttacttttttaaaataggcgttatattttgttgtttttatttaaaacatcatgaaactttaacgttttcaattatcgttcaacgaaacgtatattttatttattgtgcgttaagtttttttttgtcaacatatgaatcatatacacaagtaaactaattttgtcactacttaataaagaaaaaaaagttacaaaactaatttgaataaaataagttcattcctttatcagttacaataaaatcaacaaaatttgaataaaattagtcttcacaaaataatactaaatttgatggatttaactatattagccaaaattcaaaaaactctcatagaattttaactactcatatgattaggttggaaatgaagtataatttataacaaatactcatttctaaatgtcttggaaagataagtcaaaatcattatgacattatcagtgactactgactatgaaaatttgatttatcttgctttatgaattcaacgatacagtagacagagtcaatttacacgaattaagtgatagttactgaaatgaaatctaaaagcgaataatgttatatccaaaaataaacagattacattaaaaagaaagtgatgattgattagtaatattaattgcaacaattaagtaaagaaaatcgcgagaaaagaggaacccacgacacattgaaacttgcaaaaaaaaaaaaaactagaaagcgtgcttcgcaatggtcttttctttttcttcttcttctcaatatacactaataaaataaaaataaaaagcttctcttgcaattctctcttccctcataaatagagatgcagtaagactataaatattgaccagtgtcctagagagagaaactcgccgcttttaacactttttttttttctggtttttttttttggttaagcagtaagcactaagcacatatctcgagcacacacacaaggtcagtcaaaaactgcttctttttctgattcatatatatatattgctttgtgggtctttggagcgtgcatgttttttgttcttattgttgatttgtgtgtgttttcattttctgggcaacggctagttattcccacaagttgtagacgacagaagaagatcgatggattacggagacgacgatcggtagatttctcctttatcgctgcttatttcatctcgatttggtttatttttgattttgatgtgtttcttggtttttgttttctcgtttggatttgtgtgtttgattgattagtacattcttcgatttttgtgtgtttttgtgctttcttagtctgattcgtgtgttctcttgtatgggtttcactgtaatcgttgtggtttcgcttagatttggtggtggttactgggttttaggttttgattgatttctgtgtttttaatgcgaagatgaaatgttggatttgatgttaattgtgagttaagaaatgtttggtcatttaatgtttcatcaatcatttaggatttggattttagcttgtcaatgctctatcatttctactaaatcccgagtttcgtaagccctctcttgtcaaaatggtgctctatggtcagaatccaggttgggatgttgtgattgagcttgaaactatgcaatgtgcttactctatttgcttagttttgagtcgttgagactcttcagtcttcaaaaagctttaaagtagtaaacagtagtctctaatcatgtaaaatgtactatgggtttgatcatgtttggtgttaattttttgcagtagctcctcatggaattggcaagtggataactataatcaccaacctcagtctcatttctgtaagtcttacatctctgtgacgagcatgattgaatcagttaactcttacaacactgtaataaccatgattgaattggtatcttaactccagcggatgtgcctgactgcacgatgactgaagtcacattgaaccaagaagatcactcgtacatgtttgatgatgaaaatactcctgtgaaggcatgtagcgagttgggttaccatgtcacaacaggtgggttttttttttcaagtgatcgatcatttccattcctgatgtatggttgacgatggtttctaatctaaagaatctttggctttagaggacacgaacaggaaaatggaagtgcacagtgagacacgctctgctttaaaaaggcgtcggatgttgcagtttgaagaccaacctgaaacatcccttttcagcagtgagagtttctctgcaatcttaaaatcaagtgtgagtatacaatacccatatcttgtctctagctaggcaccaaatgaccacatatgcattgcagataaccaaactgattgctcacttattgattatcacactgcatatggactgcaatgtgaatgcatgttcctttcaaacgtttgcaaatgggattctgttttgtttcatagactttttacttctactcctagaacaaattcaagcctcttactttcttagtatctggctacctaattcagttgtgatcttattatcgaagtaacattggatagcttaggaggttgtatgaggttctgatgctatctttaatgctttgattgatgattctttatgcatgttcaggctagagatgacacatttgatgagcttttacccgaagggtctcagcttatagaagggttttcaggttgggctcttataattcttccgagtcagtcgtgccaatgtgttttccatttaaacaaaacactgtctctttttcagaagacgcttctgcctctagcttcgagggccttgatctgtacgctgaagagtggtatgctgattgcttaaatgatgctgagactccaatgctacctgatgacttgtatgtttcaacctttctttttgcttatgttatgtttagtagcatcattttgcttcattaactggttactattgttgtttttctcagaaactttggttcacctgatgttcaagtagatatttcaggttagatatctttgttttcatctcttccttagcctgtcctagctctggcttctcttgctaacatccttgtgtttgatgcagagtatttgaatgtgccaccagaaacagagactagggaagttcagcggcctgtgactcgatcttctccaaatgttatctttaaaggtaaaataataaaatggtttagtctcaaatgagtctcatacacacctatttcacgacgaaaatgagaaaacaaaacattattgtaatgttaattggtaatagcaggtaggaaatcgttttcaaggccagtttcaaagctaccatcttcaatcatctatccatttgcattcatcaaaccatgtggggttcacggtggaatgactctcaaggacataaaccagaaaatccgaaatccaccagcaaaaccaaaggcacacatagaagagcctgcagtgatccaaacttcagcattctcagggaaacccgttgttggaaagactaaaatccgcaccgaaggaggaaaaggaagcatcacgataatgaggactagaggctaaagctaagttaagtaagtagtaataagctgatagaaggttttaaaaattcactgcagaaaacttttaaactttttgccttattctcagaggcccttaaatcctttttatcggatatagttccagtcaagggcctttttatcggtacagcggctaaaaactcttcaagatcttattatgaatcatgttcttgtctcgtttttgtatctgtagtatgaaagaaaactttaaagatctgttagccatgtggtagatatttttgtttgtataaagtccctggttctcaatgttacctgaaacttgtctctctctctggttggactgctatacaaagtataagcaagttttgttatccattacattgcagtgaaacgttgcgtttcatggtcaagaagagagattaaaaacaaacttaaaagtaaatataagtttataatgtatgctttgaaaatatcaaaatagttgaggttttagtatgttcagggattttaaaatatgttctcctaaattgacgcttaagcaaatcccctagagtctagagatcttcgctatcaatcacgtttatcatcagtcaatccaaaggatattactgagatcaatcaagcatgacgcatatcatcagtcaatatcaatcacgttcgattatggtcaaatcaatatatactttaaacaattatcaattatatgatgaatttatatgatcctttcttttgactctggttatgacttattgactatcccattgttggaggatttgagggttaaaacttttactacagacaaatgaagggtaaagtattttttttttctttctactctttggttctcattggatttatacacgctagagcaaaaaagtgagcagaaaattaaaattttactcagttcagcttgtttcagtttttattcatctaatcagcaaaacataggaaagagaaaattatagctaaaacataataaagcagagtaaaattttacttcataaaaatttaagtaaacttttacgccagagtaaaaaaaaattctgctcacatttgctctatcttttcttctctaacttcagctatttattggcatcagatccattttcggctaaaaagaagttatagtcacacattaaaatgacaaatagaacacatttttttcttaaacagattattacttctaggtggaagatatatgttttatttgcacaatacttcttacatgcaaaaaatgttaaaaaagttgacgagatagtttagataatattatttcgagaataatacaaaacttattataataaatacataagtatttttcagtaatcacgattaatttttgtctttggtcaaatttctaaataattcaaagaattttgggcccaaaactcattatttcgaattaaaaataaaataaaatttgtgtttttttttgttttggtcacatttcattagttatttgggcctggcccaataaaattcaataaaactttccatttttcttttttcttcagtaatgtctgatccttaaattttctcaggattggttcaaatggtttcactctccacctccactagccacgcgccaccacttccgactaaccgccggacggcggagagaacttttaccgtccgctgtatctccatctccccacgcgagcctaattacgcaattacttccgataaaagcaacaatacctccttgtcgcttagagagacgagacaaagcaaatggctaatcaatgcagaggacgtgaatgaaagagattcgaaggagattaaagaggataagaacacgaagatcgcttcgaggaaggcgatatcgataatactccgaagagaagctacaaaatcgatcattgagaagaagaaaggctcgaagaagcttcttccaaggactgtgcttgagtctcttcacgaaagaatcactgctctccgatgggaatctgctattcaggtagatttcttcttctccgcaattatctcaaattggtaagtttagttttggcaataatagtgaatttgatacactaatttgattatgttaggttatagattttgatatagatgaatgttgaagaagagaaactcagattatgcttatagtagcttagcttcagattgtattttgattagctgcaatattgaacaagataacgttggtggatctgtaggtgtttgaactattgcgcgaacagctatggtacaaaccaaacgttggcatctatgtgaagctgattgtgatgcttggaaaatgcaaacagccggaaaaggctcatgaactctttcaggaaatgattaatgaaggttgtgtggtgaatcatgaagtgtatactgcacttgtatctgcttatagtaggagtggacgctttgatgctgcgtttactcttctggaacgtatgaaaagtagtcataactgtcagccggatgtgcacacttattccatccttattaagtcgtttcttcaggtttttgcgtttgataaagttcaggatctgctttctgatatgagaagacagggtattaggcctaatacaatcacgtataataccctcatcgatgcatatgggaaagcaaaaatgtacttagcaacctgtctttttgaattcttatgatgttgtagcaatttgcactcactccatcccgtgtgatgttaaccgagaactttacacatgcattttgacgccttttatctttcattccattttaaccgagaactttacacttgctaggatggagtaaatacctgaatttgacatttttagttgttatgctttacttcaaagcatccatgaactgagatatttcttttgtttttgaaggttcgtggagatggaatcaacacttatccaaatgcttggagaggatgattgcaagcctgattcgtggaccatgaactcaactcttagagcctttgggggaaatggacaaatagaaatgatggagaattgttatgagaagtttcagagctctgggattgaacccaacatcagaaccttcaatatcctccttgattcctatgggaaatcaggaaactacaagaagatgagtgctgtgatggaatacatgcagaagtatcattattcatggaccatagtcacctataatgtggtcattgacgcgtttgggagggcaggagacttaaaacaaatggaatacttatttagactgatgcaatcagagagaattttcccgagttgtgttacactatgttctcttgttcgtgcttatggaagagctagtaaagctgataaaattggaggagtattgcgtttcatcgagaactcagacataaggttagacctcgtgttctttaactgtctggtagatgcgtacgggaggatggaaaagtttgcagagatgaaaggtgttcttgaactaatggaaaagaagggattcaaacctgataagattacatacaggacaatggttaaggcttatagaattagtggcatgactacccatgtaaaggaacttcatggtgtggttgagtctgttggtgaagcccaagttgtggtgaagaagccagatttttagtggaggaatagagctcaattttgctagtatatatctttctagtatccatctccttgttctaatgataaaatgtagttagtataagagtaaatacattttcagttggattacaaatatatgtaacacaaacggaaaaacaaaaaaaaataatacaagttatgtatttactcttgtttgtgatgtgttatcagtctgtatgtgctgaagcagctagatatgagagttgaagactgtacgcttctttcagtttagtcaaaacttcggcgatagacggtcttccagatgcatctcttcccacacatcttatagcaatcgaagcagcttttttcatgctcgctggatcaaatgtctccttcaagatatcatccacaatctcaaaagctcctgcttgtaagtttggcctagcctgcatttaagtattctgatcttttaagacactgtgtactcagatacttgagagatgagaaactaagataatattctatgttactctcacccataagaccaagttaaacgaatctggtgatcctgagtgacttaagggttctcttccacagataagctccaacagaaccacaccaaagctatagacatcacttttctctgtcagctgcagggtagagtaatatctggaatgaaaaagtgtgagtaatgattagctaatgaagctgttaatccatcacgaattcggagagatattgtagaagagtttactcggggtcaaggtagcctgcggtgcctttaacaacagtagtaatatgagatgcatctgcttttgtaaattgttttgacaggccaaaatcagaaactttcgcgttcatatccttgtctaaaagtatgttactgctctttacatcccgatgtataattctcggctcacttccattatgcaggtagtccaatccttcatgaataagccaaaacttttactatctaccaggatcaaacgagttttattataatgataccaatggcagatccgcagatgttgaagatgtaccttttgcagcatcaacagcaacttttagtcttgaaacccagttcaatgaatgccttttgctacgtggacctgcagaagcaagatatcaccgacagctatagctttgcgaggaagatgattttgcaaaaagatgatgagaattgctagatacttgaggattttcataccgtaaaggtgatcagctaaggatccaccagacagatactcatacaccagtatttgacgttttggttcatagcagaagccctcaaatgaaactagattttggtggcggatctgagacaaaaggtgcacctagaacgcagacagtacaaagggatcactaaagatgaatgtatacttgaccgtggatttggaatgcatgacattcaaatatggacagtaattttgggagaactatgtggacgcttaaacctcattgatgaaagaatcagctccaagttgagttctatcaaatcgcactttgaccgcaacttgttttccatctggtagttttccacggtatacagctccaaaacttccacgaccaatcacttccttgaaatttctagtagctgacttgatctctttgtgagaaaagattcttgaagcgttccagttctgcattttcagttgtgctcctgatacagattttgatatactataagaattataaagggacaactttgtgggggcaaagagaaagcattgttcccatactggttatatctctctctttgtttctctgtctcctcgtgaagatcgacatgaaaacaaagacaagaaaggtggcaaacaaggctccaccagaaactccaagcaagatcgctatacggttctgttttctttgtttcttattgatagggatagtgacttgtggtgtgtcaattgttgaagacacattgttgcatgatattgaagagaacgaaaggcatggatttcccgttatcctgaaaaaaagaagcaattcagtaacatgcacaagaacagaatagtgtagcaaatgccgagacagaaatcgtgtatacctgacttccagacccgttatgttaagagactgtggcaagggacctactaagttattgttttccagattcctgagaagaagtaacataaagattctcttctgtgtgaatatggtatgtacaagctacttcttgatgttaatgtttacttacaggagacgaagtttcttcagctttcctaatgtttcaggaactgatccttgtaagctgttgttttgcaggtcccttcaagaaatggagaaatactttaaaattttccacaaagaacgaacgtatatccagaaactctcagtataagattgacttacagaacttcaaggttaaccagatcttccagctcggagccaaaagattctaactgattgaagctcaaattcctgtatataccgtcagaagctttttagtactacaggaaacataaaaattatgttaatgttctatggatgagtattacagtttctggagatccttaaggctgcctacattctgtattgctcctgtaagtgatgtattatgcaagtcgctgcacggagaagtagagaacactcaaggtaaccacatacgtatacatgagacactacaactgttgaagagtgattgccttacagtgttttgagatcgagcaagtctccgaatgttggactaatggacctcaggttgatttttgaaaggaacctggacagccagaagaaggaaaaatatgagctgagatgaagaaatgttgaaagcaatcgatatgataaggattgtttttacaatgatgtaacacggtttccttcacattcgatgtggttccaaggaagcggtgtgcatgggtcgtcttgccatccaaggtcttgcccggtaaattgctctatgactttaagtgccgaaactgcaaaaatataaacttgaaaggtgaacttcggctcttgtgtagtttgctttatccagacaacctcaaaagagagtacctgtggtagaagaagcttcaggagggatttggaggatttcatatacctcaagagcactcacttgaggattgaacttgatttttctgagggtgatgtttaacttactgattcctttttgcgtaaagtacaaggtaccagcttctgagctagttacggtgtaatcagattgtttgacttcatcattgatcgtcacactaaaagaaggggagagtgagagtatcccagcaaagtagaggataatgtagtagtcccctggtgtatgtagagaaagagtatatgaaagactttctttgcgagcaagaattcttgctgtcttaagaacagaagctggtggattctcagtaatattgaaggaattcaattttgtgagtccattgaagctccaagaggcgtgaaacggtgaataactttgatccggatcccatattcgatcaaatggatctgaaggatacctaccattcaacataattcaccaagaaaattcaacaaaacacaccaaagaaagagacagcgatcaaagtttagagcctgagaattcttaccggatagtcccatttgtgtatccgctattgattcggtaacttctcctgagaattatatctggtgaaccctccaggctgtatttgtaagaacctaaaggaagtggccgtacttctagagaagagataaccggaatacctcttcctttaaccgcaagcaagcaaagcaaaagagaatcattgttgactggccaaactaactcttcaatccaaggatcattggttctaagatcaacagtactagtgattctccttccaagagagacatgaaatgctggaggactattctggctatcatagtttctataaacgaatgtagcacgaatcagaactgaagacaagtctttcctcacaggtaacttgtaacattggcgaccttgaggatccgggaataatctgatgggaacactggaagtagaattcccctcggcgtaagtaaccgtggtagtgttacctgtttcgatataatcgttgtctgaaacccatgagatgttataagcagcggtgtaacttgagccgccacatgataagctcaagaaacctgttccatcacaaagattcaatcaaacagttgaaggcaaaatgagtacaaataatgtgagacaaagtctagaatctgcataccatctggactggagaaacaaaacacacagaaactactgagcaaaacccaaaagagcatgttctaatttcctgattgaaatctgaagaacatatataactaattgttctatattgtttcctaatttgtgagtgaattcattctttatataatatgagtgtctgtgtgaagatgtcaatgatgatgactcgtaggtactttacttagtggtcatcagaatgcactaacagtcagtgtcaagttaatattataaattacaatttaactaaaatgaatgtttatttaacaatagaagtgagatctttttagtgtcaaatatggtatttgtgagttaaaatgtaaaaagagagcaaaatttggttgctcaatttttaagaatgataatgagaatgatgcttgagtgagaattcttcaaatgcaatgatatttatgttttgcttggcttcaacactaatcctcaatgcatcctccttaagcttccttataaagggaaaatcttttttggacaaatcgtttacatacccaaagtctcccataacttgaaaaggagaaagaaaaactaattaatgcctcaaaaacataaatctgtatttagtacttaattcaaaatcgttaatctctaattgatttttttttttggacgttacacacgaactaggcttcttttttttttttttttgacagccacacgaactaggcttagctaatagcaaactagcaatataactactaagtcaaccttaagaaattagacatcatagacatcaatgcaaaccgtctgatcaacttctagatccttagaggattagtatgtagaaccaagtggggtccagtcctttgtaggtcctcatgtaccttgcagccatgacaccaatgggtatgaaaatcccccaacacactgcattcactagtccatgaatgcttttgactagtaacatgttatcattagctgctttagtggtcatgacttgtccggacaacaaatccaaattagccatggatttgagatgatttccactcatggcgtgcatcccaagcctatcaccttccttcaacggaccgtcttgccataaatgattgacaacggttgtgttagacggccacaccatagtggcaaatatagtcatctctctattgagatattcagcggatagttgcgttacacgaaagctcagagggccttcttgaagcataggtgtgtagccatttattgaggaagtatatgcacgcataaaaccggacgtggagttacggtaagccaaaagtgtttgagcacctatcatgcctttgctcgtcgggtttatgccccaagcaatccaactagaagactcgatgttggtatgacgatatgcaacttcaagcactccggtttctcgaacgtaactgtagtgtagaaacgaatctaacacaggaaggtcaacacatgaacggaagtgtttgccattgttgaagttgtgagagtcgcagctaacttgaacttcattggttgttgctctagtaaagcatggagccaaaacgaacagaaaacacaaacccacaaaaatagttctcgaagacagaaacatgatgatggattttccgagagaacacttaggtttaatctttcgaagtcagagtatcttgcttttgaagaaattcgattaatgaattttttcgttgttagctagtggtctatatttataaagaatacacgattccaattccaagtgtagttgtgaatcgttatttttcctttttttttcgtgaatcgttctttttccttgccgacaaatctatttaaattttttgtccccccaaatttcaatttatctaatttctaccacatttcaatttcgtaaaagcgatttattttcgttgtttaaactttttaaaccaaaggagttagccacacaatctaataaataaaactcaagcataaaatgttaggagtacaaatttcgatacaagacctaagtaaaagataaaaagtaaaaaagtattgggttggctcaaaacatgccaagacaaactactactgacaagctccttaccaaaaaaaaaaaaaactactactgacaagctcagtacttaactggcgcaagaatatcgagctgtgctccgagcttctcttcagcgaccttctcggccttaactctaagtttgttaagttgcttctttcgctcgtaaaccacgtgggctctctccttcctctttgtctccagctcctgcttattgcacatcaaacaccataaagtacccacacaacctcatagctaaagatctttctttctatgtaatatttctttgtgcacaaactatatttctttttgtcatcacatcaactagtacaagcgatcaaagtggatcaggatcaatggagacaagaaggccaaaaatatttccttcttctatcaatcataactttatgaacaaagctagacacattctctttctttctatcattacaaaagctcacatccactagtacaagcgttcaaagtggttcaggagcaatgaagacgaaaaggctaaatatctatcacttctttctgaacaaaaactagaaaactagatattcaagtagctaaatattatcctttctaccatcacaaggccattcatcaactagcaatacaagcaatcaaagtagttacagagcaacgtaggcaagtagaacacaacacataccttgatggtgtcgtaatggttccacccaacttcagaagaaagacggcccaatagacagtatttgtgaccagcttgaagcctcaacaccctgaagaagagccacaatgataatcatcaatgcccgaagtagaacagttacggatccaaaagagaagaacaaaaatggtaaaaggaacaaacttgagagcatcagggatgaccatcctcttgatcttgtcatatggagtaggaacaccttcatataccttcagacgtgctaatgcagcagctccacgcttcgtcttgtgtggaatcatacttcacaaatcaaaacacataacaactatgaatcactctgctatctaaatcatcatttcaaaagcattgaattgaaatcaaccacaaatgattcactcataagtatcaaacacaaacttaatccatacagagcaagaaccatcaatttctcgaaacctcatctaattggagagataagagagattgatatacgaacccgcgaacagtacgccagaagattttggaaggagcacggaagtgaataggtccatgagaaggtttagtgttcatacgtttgcgaagaaacctcatgtacttcattttctgacgaacgagtccgccggagaggcaaatctcttcgcaccggacaatgacaactttctggccattgagaagctctttagcggtgatcgacgcaagacggccaagcatgtggtggcgcgcgtcgacgacaacgcgcttcgagcatatccctgatcctgacaccattttcgcttctcaaactgtggtgagagcttgagcggctgatgatatttctcgtgttcttttgaattagggttttgggggtatttacgtcactttaataagttgttttttttatgatgggccgaatcaattaggccttatccgtaatcgcatgggttcagagaaactaaattcaatatacacaagaccaacagaacggaatcgccgaatcggtgatgacgggagagcagtgaatcccagtgatgttgagtttaaaaaagaaaaataattttggaaactttttcggtgagcttgagaggatggatgcacaaaacagatttgctatgattttccctggatttatagacgacgaaattccccgctcaccgaccaacatcgattccagacgcatttgcagagatttcaagttaagagaaagcgatcgcatgcctgcagatggtaaaccaaaaatccacagttattctcataaaaattggaagagaaacagcctgatcatgggcgatcgatgaggaaaatatacatggggagatgaagcatcggtcatttgtttttattttgaaagaaatctatgatttggtcgtcgttcttatccttcaaattgtcaacatatctgttttcctttttttggataggtttccgcagtttatgtcgtagtttcgatcatcctcttcagttttgagtactactcgaactccgtatgatattattctgcccggtgtagactgaaactcctctgaaattacaagttttggctcaaggctaaactcgttgaagtctacgttacttggaacgtggaagatgaacatgtgatgtgctgagaatgcctctttgtcattgctgctacgagtactctccggtgggagaacgaaatcgggcttgaggtcaattcggtaggactggttatcttcctgtttacagctataagaagatgacgagagctttatgtgataaggactctgacaagcaattatgatacaggcatcaaaacccacaaactcagaggcatgccatattgggggtatgctgatttctctggaatattcccttgcttgatagtcgaagtagatgggcactctacttccagataagcaagcaaaacgctgaggcacctattaagatcaaatataaaagaaaagatatggaactggaatcgatgtatgaattgagcaagggagaaacacaagggaagaaagttcacctcttcctttcgtccacatctcagaaatcgatccatcagattcgcaacttcattcaatttggggcagtagctaagatcaacgtgttttatggaatgatccaagggaaggtgaataatttccagggaagtgcagccacgtgcatagagagatgtaaggtttggtggaagctgtaccattgacttgagtttcttgcagtcattgaggcagagagtattcaacagcctaaggaatctgatagttacaggcatcgtcaccatatcatttccgctgaggtctaagtatgttaaattggtgcaatgactaaacgtatatgacaattcaaaaacatcattgcagttgtcaagccaaagctcagctaagcggtatccacgctcatcttttctggcagctgaatgtcctagtggactttggagaagtatacagttagaaagtttgagtgtctccagttgaggtagttttggtagtgtttgaagtttgaggcagttgcaaagcctgagagatttcatactagaaagattttccatatctgtgggtaggcatgtgaaatcatttccgctgaggtccagtttttgtaggacctgcaaaaggccaatgtcatctgggatgctttctatgtttaggtttatgagatttaactcggttaaccagaggaaatctgaaaagctataacactggaaagaggcactgtctttacggtagatgaactgcatgatgtcgagtgatttaaatccgtaaaactcagacatgagcttaggcgtcttttgtacttgcttcagaaatttgttaggggtccattgctcggaactaaagcagaggtggtctgcctttcctcggagatgtgacaaccaaaaatttaatttgccatggatggctagactcgtaagagagttcagtgtaactacagcatctgggaaactcaatgaagcttgccgaaaaagccctgggctacgtttttgaagggcaggcaattctcctataatcatctgaagattgatgaggcgatcacagtgggatacatcaagtttcttcagtgaaggtaagctaccaattgtttccgggatttgctccaacctcgtgcaacctttagcaatcagctcctcaagctttgttgcccttgaaagatctggaagtttggtcagattcttagatccagtgacatctagcatccttaactccaagagcgactgaatatcatacaacagaaaggacagtttggatggcgttggtgacattctaaatttgtaaacgctgagagttgaaaactgaaaagcaaactacaagtttcgtttatagcttaccatttttccatcccacaggttctccagattgctgtaacgcagatgaagttcaacaagacgactcagaggaaatgtgggaagcaaggttgttaatggatatgcgtcccaatgcaatagcctaaggctgcgtggaagtaccatacgattctttgaattgatattcagcttggactctctatcatttaagtgtttgaagaatttgagaaatatgagattttccatctgctcaaaagcactcccatctatggatgctgctcggggcaattcacacatatgtagtgtcatgccttggattctctctgtcccctgatgattgaatgtcagatttacttagcatacacaaataaaagcacaagaagaaaccatataagacaagtcctatggaagaataaaaaacatgtcgttcctagaatacttactgttttgctttccagtacgccataactgttatgaggatcccacaaaattctttgttgtcgaggtatgtacaatgattcttcaacaacaatttctctagccatttgttttatcaaggaatgtatgtcaatatatccatcttttgatatatggatgagagacttttcagctaaaccttttatccttcttttagtttcagagagaagggtagaaacacgggagactggttctccattgaaaagacatgcgaccctaatgaaaatggtcttgtctcgtaggtccagattggtatagctacttcttaaaatatccatgatattctggtgaggagctgtttcaagcgtgtctattgcatcttcccactcgtctatagaggtcgctccacggagaaatgaaccgaaagctaccagggctaaaggaagaccttgagcgagctgagatgctcgaatcgcaaaacgttcatatccatcaagtgtaggaactccgcctgcaaaagcaatatttttaacaatctttaacgagtcctcattttgcaagcatttaacctcgtacttgttggtcactctgcaggaatctagcaatcttctgtcacgtgtggttataatgattcggctccctggaccaaaccagctagcctcctttgccaaggcatgtaactgctccactttatcaacaccatcaagcacaaagagaaccttgagggttccaagccttgaccgaataaggtttgcaccgttttggatgctcatcaaggccactcgttttgtacttagaatatcgcagagaagttgttgttgtatacattttagatcaactttcttacagatttggccgacatcttcaatgaaagaatgagctggaaattggcttgcaagctgttcatatagatacttagcaatggtagtttttccgatgccccccattccccatattccaaccatacaaacctcggcatcaaagtctttcttcaagagaggtcttatgttttccatgtgagcttccataccaactaaatcttcaaaagaagttgcttgcatagaagctaaccggcttgagatgacttcaacaatttcttcaagcatcatagcctcgtccgcactgcaatgacatggtagtaataaatgaatatatagactaccttttcttctccaggagaaaatataagaaacacttaccaatatctggaaaccatgcctgagagattggctaccatgcacagagctactctccacctttgcacaatatccgcgaattctggaccctggtacctttctaaaccaaaacttcctcgctggtgtctcacgtcagagggatcaacttcatagaacaagggaaggactttgagtttaccaaggttgtacaattccattattaattgcagttccatcaagcaccaccttgacgttgtgtatctttcagagagaaccacaacagcgaactttgaaccttctatggctctgcggaggtggctagaaatatgatcacctacctcaagatcttgatcgtctttgaaagtaatgattccctttgcaccaagtgctgcgtacaaatggctgacaatggttctacgtgtatcttccccacggaagcttaggaagacatcatagttacagggaggaggtgaagacaaagacgaagaagccatttttggtttggatccacaatcaattgtcaaacaacttcaattagactatgaaattccggacaaagtcaactacccgtacaggctggagcatatcgtttgcgtgcttccatgaggcatgaaggtgtgtgtatttatattttgtatttactgtattataatttttggaaaccaataaacttgcttatctttgacaatttcaatgttgactagctagtttctcatattgccaaaggagtagcaaccctgaatctggctttgttggaaacttatgtcttcctcttcttcctcttccagtcagaaattctacgtttttctgagcttccaaggcctggacacccgtagaacctttgtcagccatctccgccgttcattggacagaaaaggcattaagacttttgaagatgaaaatgagtctctgagaggtgaattagattcttctgcggtctatcagacaattggagagtcaaaagtggccgttgtcttgatatcggtgaactatgcctcttcacctttgtgcctggatagtctccttaagattttgaagtttcaccagtcaggttcactcgttttgataccaatcttctatgaagttgatcctatggatgtaagaaaacaaattgggaaactgtacgaagcattctcattgcatgagagagaaaaccctgaaaaggttcaaacatggaggcaagcactgtcccaactggtcagcattccgggcggccagtactcagagatttggtaatcctataatcaggttctatctaacaatttttttatgtgttactttaaatggtttcctgattttagtattctctgtgatagggatggtgatgcagagctgatccatcaaattaccgttgacatatggaatatatttgtcgcttccaagtcaagtgatttgtgtggtcttgtggggatggatcgccacatgaaagccatgtatagattgttagatttaggattgaaagatgaagttcgtcatatcaaaatttggggtagccgagacatcggcaagactgagtttgcaaaatatctgtatgaagagattttgcacaactttgatacccatgtcatgttaaaagctccacaaagaatttcgcgttttgaggaggttcgtttggcagaatatgtgtgtcttcgacttgagaaagcaagaactttgtcaaaaacatcgaaggacactgcatcaaggtttctcctcgtactggataatgtgaatgaatcatttgacccaataagaaaacttgcaagggtgattagttcttttggtccagggagcaggatcattacaaccacccgaaacttgcagttcagttcgacttcccctttaccgtttcaatatgaagttttagggctggagttctctgaagctcttcagctcttctgtctccatgctttcgagcagactcatccttttcttggttttgaagacctttcatgtcgtgcagtgaaactcgcaggtggttttcctttatccttaaaaagattaggctccagattttctggtagaaagaaggatgaatgggaagtgatcttgtttggatacgaaagatcaactgttaacggtgttataaatcccgaaaaaaatagcctggatgggctatacgaatacagctctatcatggaaactttttcaagtcaaccgatttcaagcacaacaagaagttttgaagaccttgtggggatgaatcatcgtatgcaagctttgtcggcattgttagagctagaatccgacaaagaagttcgtgtagttggaatttggggtacaggaggcattggtaaaacaactctatcaagatatgcttacgagagaatctcgcagcaattccacacccatgcttttctagaaaatgctcaagagagcagttcatcctgtctagaagaacggtttctatccaaagctatccaaagagaagcgcttgcagtaaggaactctaaagactgtccagaaataatgaaatcattgattcaacaccgaaaagttctgcttatagttgatgatgtggataacgtcaagacgttagaggaagtcttcaagatcaccagttggttggtccctggaagtagagttattgtgactgcacgagatgagagttttcttctggccagtggagtgaaatatatttttgaagttaagggcctgagatttgaccaagctcttcaacttttctatcaattcgctttcaagcagaaatcacctccggttcggttcagacagctatcagttcgggcaatcaagcttgttggatttctccccttagcccttaaagtgaccggctcaatgttatatcgtaaaaaagaatcctactgggaaactatattgcagtgttttgaagaaaagcagaataaaggtacaatttgagtaccagtcgaatagccatggcaagtagatgaacaacattagtttccgtcatatattgctggcctcttttctggtatgtatcgccgtatcggaccacataacaatctggttaccctgaatctctgatacatagctaaggatgctaaatcgggactggaagttgaaaaataaattgacgccgctgtatttgtgataaaacattggaatactttttttctttaatttttctgataggaattactttaagataccgaattaaagtttttaagaagttgctcaaattttagcttgacaagcatgaattgtatataaagtatggatcactataactcatatcagcacaaaacaattaattttgacatgtacttacaagtggatgcatgaaaaagtttcaatacaaaaatctcaagcggacgcaagaatgtcgagggcaacttccttaagagaaggcatggattcttgctgatgaacacaaatgtatttgttccttgttctcctcagtacttgccatggacctggataacatctaatccattcgaaacacaacaccgttcagctaaagataaagaaacaagggaagattaatttgcaggtttatagcagaaacctgaaaagtacacctcctttctgtcctttgaaattgtggatgtagtacactgtctccatctttggaagaagtgtcttggtaagtgcagccagtttcggataaaagaactttggatagtctattgttttgtcttcttttaaggaaaacaagagtctctctctcttgattcagctttctcatttggctctcaagttgtgatgcaaatggaaaaaagaatctactttgtttcatttatgagaagaaaaaggatacaacccgatcgtatgcggtcaagttctccattgaagatgattagttttcggtcagtgttcacaacagcttccttgtagagctcttccactacaagcatctctgagtggaaaaagaagaacaacaaaggaatgagtcagaacgtggattttgtttaacagtatagatgataagaggttttcagggaactaccgttgacattaaaatacgggtatgcgacaagaaacagttcgtcttctggcttcactcgatctgccatttttactctctcaaagaaaccaaaatcctcaaaaagagatggttttgttagatagtccaacttgaagtaagttcctccaaagactgtcttttgagcaaatttgacttcatttgcttccgggaagaactgaaaaaaacatgtaacacaatcttgtttaagaaagattctgaatctaatcatgacttggataacaacaataagtagaacacattacaattcttgtacttcgagccttttcaggagctaatagtcggtcacaaaactcgcgtatcatatttatactttctgtcatttctgtagctccttcaccatcacctaacacaagtaaaaaagaactaaaaaacaatgttgctaagatgaaaaagcaagaagagaaaagccttcaatgaaaaattgtataagaagaaaaaagattataacctggcacagatgctagaccagatgttgggaactcaatttcctgtaaaagggttcctttggatcacgaaaaataacgtgttttcgtacatccattttaaaacagaccattgcaacaaaactcaccattaactgtttctcatccttcaaagccatttccactgcttctttggcctgtaagttttcaaccacagaaagatcatcccttaatactttagcattacaagtaagtttgcataggaaacctgaaatctacaatctttagctacttcatttaaccacaacactaaagtttctatacagtgaaattgaacatcagtccatgtaaaaatatagtgatacataataagtcattattgctagcttgtttaagacagaaactagatagcttacctgattaatgagctcgacgtaatcacgaggaaaaggtacattgtccacagatgtattgttgttataccctccagaaacagaacaagctctaaacttcagattcctatttgtcttggtaatatcattgttctttgaatgtaaactacacaaaacattctacaaaaaaaacaaatgtaaactgaatttaaagaacacataacagttaattgatcaattttcaaaatctagaaacgttaaagctgatatgtgtgtgatttgagtctttctaatttcagaattattacagcaaaaaaaaaacagatacaacactaatcaaagacgtaatctcacacgttcttcactaatcaatggaaaagtctcagcgataagctacctttgagttcgaggccagagtcccggctagagaagccggtgagacggtggtggcgatggagaaggacggtgacatatcacatatgggaccagagatatgacaatgtgtttttttttttttttttaataattctggttcagaattttgtggagtgggaaaatcctaatatcctatatattcctaatttatttacggaaaataatcagttttgaattttggataatgtgatttcaaaaaggtcttaagataataaacgtttgcaaaataatatttttcaatttattatataccctacagaaatttagtaattataaaaataatataataaataataaattacatacacacaattaagcaatgatttgttttctaatacattaaacgtttgcaaaattagctttttgatttgaatagttttcatttcattttaatagttttaacactttcattttaattcgaacttatcgactttaggtgtggactagactagaccatgatataaaatatgggtcggagaaactgaatatgggttgggcttaaactttgatattgggagactaataagaccggtccacatgagatttttaggaaactccaacatctatttttgtgttgtttgcattggatgcttgtttgggtatgtccacacacaaaaaggaaaaggagaccaaaacaataataatgacaatcaaagcgttaaatgcacgaagcaatcaaagagcgtgcaagcagacaaattatgcgttcttaaaggatctcctttcgtttcatgtgaattgtctctttttgtttttctctctatttattattcatgtttggcatgttaagaagataccttgaaattccgcatgttttgaatccgtaaaatagttatccgaattcactatactcgtagaatttcagttatggatatatagtaaaaaatttatataaagttttaaatttattttcataaatacctgaaagatatatatcagaatcaatgtaattcttagaattatattagaagataattgtaagcatatgagaaaacacagaccatcccatccccaaacataatcgaaaccaaagaatatcatacctaccattgacccactcatgtttcttattgtcttatgaattgtgataatcattttctttcgaatggccatcaattaccgggaggaaaacaagaattcccataatttccgtcattgataattttaagagatatgttatgttaagtttttaacttatatgaatacgttgaaacgtgactttcaactttataatatttaacgaaaacaaatcatgaaaatcgtaactaaatttaaaaacatggactaatgccaatttgccatgcatttaagtttttttttttgtttataatccaacaaatagttaatgattacaaaaataagttcttttagaacaaggcttcgattgtttgttacttgtatgtatacatttacacttacattatgaaaaaaaaaaaaagatatatagatctagttttggaagtggttcatctccaacttgatatttagtgagtttggtagggattcagcgaacgaagaagggttcctggataggggttggagagttccaagtggcgagtgtggttaatcgactactccaatcatagaatgatggtaagggacggattgaagatacgttgccaccgacgtaattaaggtcaagcgtttatttagcatgaggcgtgtgtgtacgactcaatcttttgaaattttaatatttatcctcttttccaaatattttccaattctttaattataaactaatgagagagtgtttctaacaacatacatgatctatatcttaaattttttttttttgtgtaaggtaaatctagtcatatgactttagaataccggatgcaatgtgctttcagcatgtgcgatgtaacgggttcgtgttggtgtagtcttttacttgttgtagatattgtatccatcgagggaacgttctatgcgtgtttgacgtaaatgactcttcgtacaaatgcatttagtcggctttgtgtgatgcggacaatggtttgtttgccataattacttaggatagcgagccgcgttttgcatagctagggaattaagccattggtgcctaggttttagcatttatccgcagaaccaaatatttttcaaaattttggttacaaattctaccgcaacatgtccacatgtagacaatcggataatcatctcccaacaacatatactccaattaaatagttgattccaatttcttatatttaaaatcaaatgatataaaaaatgatcattgaatattggtggctagtgccgggttgccgaaataaaatataaacgagtggactgaagaaagttttgacttggaagactacaaaatagacaatattttccgttaaagatagataataaaaagacaatgcttttgtttgtacctaaaagcactaatcaaaatcgaaaggtaataatggaggtgaagaagacatcattctcacataatcatctccgcatcctcagcttttgctattaatattatatttaatataatttgttacgtaaatcatataaattgttcaaaattatttactaatgtgcaattaaaaataaagaaaatagtggaacaaagaacgtgttcattggcaatcttaacaatcgacgagtatgaaaggatgaaagatccacctagtcctagaaaaacaaaagtgttcttaaaatgttatagatgtatctagtccttgattaataatttttttaaaaaaatactttcataatttttagaagatatatattttatcatgcttagtttaacttgtggaatcacacgaatttgttttgttaaatggcagtgagtagttggaactttagttagcataagagaaaaatatttaaataatttgcaatcctcgggagcggtgaggttaacgttaaggttaatgaaatacttagttatatatgaatgtgttaatatgcggtgcagcatagacgtgctccatattttagttttaatgcttattctattttaattaagattaattttgtggacattgggtttccataatttctttgatattttaattaagatttgataaatttgttttgagattttataaacgaggtttacagaactttttaagagtatactctagttctttgttcttagtagtatatagcctatcaatatattctcaaccagtttaaatagatttatttgactttttcaagaatttcaaaactaaaccaataattttgctatttatacttatttctttaatgggatcagttgcctatctttataagtattctatacgtcaatgcatgtatttgcaacgatttattaaggcatgtgaatgtgaatgaagtatgaagaacgtgtgattagggccctacttgattcaagcaataacactaatcgacatcacacaccaagacgtacaaccccaacccaacaaagaacaaactctaaaaattaaaaaataaaaactctgaaattgtctgatttagaataaatatatcgttactatagagggacgattggctttgatagtaatactttttttttgttttcaaaatattaaatttatgaatcaataatttacgatcattaatgagagattgatgactttaaaattatgtttaaaagatttaaataatggatgaatcattatggaaatctttagtcttgaagagtactaagtataggttttttttttttttcttttcggttttgtattccaatgttctttttcaacataagaggcaaatcaactagtttgtcttagaactgcgtttaattgaatttgacaataattgtatttttgattttttttatcatgatattcatattcaaatcaactagttatgcacccttgaaattcactaacatcatatgaggttggatatctcttggtaagttcagaaccgaaccaccacatgtccatatctcctcccgtaaaatcagctatgctatcaatcatattgttttcttcttgtttgagagatagggaggaatatttgggccggaggacagtttattcctcccggaagtcatttcgaatgttaatttgtttttgaaaaacgatgccatggcataatccgagggaaagagtctctcaccttgactaacaacaaacaatctaacttggtccgcgggcaagtggtcgaatcacctaacatatgctcaacagcaatacaacacaaccgatgttccccataacaattgtgaccctatgatggaaaccaaaaattagtcccaacatatataccataaaaatatgtaaattgataaagcagaacctagtgtttggaaaggggctctattctttctaccccaaagacaaaataataaagataataaaaaatgatgacaagagagacaaaagtaaacaaaaaaaaggattttagaaatgtaatagatttccaatatcaacgctcctttttgttcccgctttaacttttcccactcgcaaatcattttacctttggattcaagcctcatgatactttttctttttctcacactttttacactattctctgttttgttgttactcatctcttatcaaacattttaaacttgtcgactttcactcttcactagctaccattgttaacttttggttcttaattcatattttctgctccaactttgtagagaatcttttgttatcccaaagaaaaaggtgcctaaattcacgtttgacaatgttgcttgaaaaaggtttgatcttgaaatttcaaaagagggaaaaaagtaaaggagaaaaatttggagagacaagaagtgagtcaagggacccaacaacaaagacaaagacaaaaactttggattttgccaaatactatgattaatgctcattcaacactactattaccatttccatcatcatcatctctctctctctctctggttttggaaaactgcctgagaaaaaacctagccataaccatcttcttcttctttctcttgttcttgaacataattctgcttcatggacaagcatcatcatcaacatcttttattacagcatcatcaacatcttcaccatcatcagaagctctctcttgccaaatcatccagacaaagctgtagtgaatggtatgttctctttcatgagtaatgttaccagttgaaacactttaagtttctctgatcaagaaactggtgtctgcacatggctctgtctcaatcttgctaatgatgttctttcttgcaactttttaggatctttcgagatgttccaagtgatataaccatagaagtaaacggtggaaactttgctctgcataaggtatatgcatacttagaacacaaccatcactgctttctcaagtaaaccattactgaacatgctttgcttctccatttctcagttccctttagtctctagaagtggaagaatccgaagaatagttgcagaacatagagattcagatatctccaaagtggagcttcttaatctcccaggaggagcagagacattcgaactagcagcaaaattctgctatgggattaacttcgagatcacttcttcgaacgttgcacagctcttttgtgtctctgattacctcgagatgacggaagagtactccaaagataacttggcttcaagaacagaggagtatcttgagagcatcgtatgcaagaatcttgagatgtgtgttcaagtcttgaaacaatccgagattcttctccctcttgcagatgaactgaatatcataggtagatgtatcgatgccattgcctcgaaggcttgcgctgagcagatcgcttcaagcttttcgaggttggagtatagtagctcagggaggcttcatatgagcagacaagtgaaaagcagtggtgatggaggagattggtggatcgaagatctttcggttctgaggattgatttgtatcagagagttatgaatgcaatgaagtgtcgtggtgtacgtccagaaagtataggagcttctttggttagttacgctgagagagagctaacaaagagatctgaacatgaacaaaccattgttgagacaattgttacgcttttgccagtcgaaaacctcgtggttccgatcagtttcctattcgggttactgagaagagcagtgattcttgatacttcagtttcctgcaggcttgatcttgagaggaggttaggttctcagctcgatatggcgactcttgacgatctcttgatcccgtcttttcgtcatgcaggagacactttgttcgacattgacacggttcacagaatcttagtgaatttctcacagcaaggaggagatgatagtgaggatgaagagtctgtgtttgaatgcgatagtccacattcgccttcacaaaccgccatgtttaaagttgcaaagcttgtagacagttatcttgctgagatagctcccgatgctaaccttgacctttctaagttcttgcttatcgcagaagccttaccgcctcatgctcgcacccttcacgatggtttataccgcgccattgatctctatcttaaggtatgttgctacaagaaaattttacttactcttgttgtgacttgatacttattaggttttatgctcttaggcacatcaagggttatcagattcagacaagaagaaactatcaaaacttattgacttccagaaactctcacaagaagctggagcacacgctgcacaaaacgagcggcttcctctgcaatccatagttcaagttctctactttgagcaactcaagcttcgaagctccttgtgctcttcttactcagacgaagagccaaagccaaagcagcaacaacagcagtcatggagaatcaatagcggagctctcagtgcaacaatgtcccccaaagacaactatgcgtctctgaggagagaaaaccgagaactgaagctcgagttagctaggttgagaatgagactcaacgacctagagaaagaacatatatgtatgaagagagatatgcagaggtctcattcgcgcaaattcatgagcagtttctcaaagaaaatggggaaacttagcttctttgggcatagctcttcaagaggatcaagctctccatcaaagcagtctttcagaacagattcaaaggtactgatggagagaacttgcgcaagcacagattagctcagtgtttatcattttctcttacctgttgctgctttttaagtgagacttgagactggtgtgtgagtgatattgtaaatggatttgattgatataagacaacaaaggtagatggcttaaaaatcaaaggtctatcagttgattggaatagagaatataatgatgtcttacaagacaaacagaggtagagacagagtttaaccacgtcgtacacaagcaattcacttaggccacaattcaatctttcaagaagaaggagccttggtcttagtgtagtaccgaatgccgaaagccaagcctaagattagaagtggaacaaggaactgaaggagcttaataacaaaatccgagctcttatcctgagtagccacggctttcgtcgacgtaggaggcacaaacttagctttaaccggcacagtagctgtgtcaatatcacccacatagtactcatctagcatggctttcgcagtcgaactatgtcccacatcctcgaaatcatcggtcgcatctttccctgaataccaacaacacattcttgttaacataaacatgaactaacaaacagagaaagtgatctctatatgttacctgtagaagtcaagataacctcatcaccaccaggatgatcatccaagaactttgtcacatcataaacctatatataaccatcaaaatgaaacacacaaaaaatgtaaactttgtcatataagtccctaattccacacaatcagagacctagattaagtgggttatcaaaagttcatacatcagaacatacatgaactacatgaaccttactagctttaactacagatacaagatcacacagagacatcttaagcagcaccaactatcacattcaattataaagacgtaagtttttagcaatttctctgtgatttagacttagaaaagtaacattaatctagcaaatcagatcagatctatccccaaacttgttactacataactctagatttataaatccaagtcaacacaactcaagaatttcggatctcacgaagataagatgcaaaatctaagggaaaacggaaaatcgaatgagaaactgggatcggagatgtaggaccttgccgtcgatgacgatccaacaatccttggcgctactgtgctgagaaacctcggacaaggtgaaaacttttccgtctccgcccatctccgatgatctgctggtgactggtgagagttgagaagaggaagagtattactattatttgggaatctgtgagtttgggatcttacaccaaccgcttttttggtctacttaagttgtgtatgtctgatctcatctattgatggggtcggaaattaatcagtggccaataatcagcagttaatcaaagattccgttttcttatattatttaaatgaatttattttatatatttaattaatgtagaaactaaaacaatttataatgttacaaagaaaaaatgttataaaaaatcttagtattgtatgtttttccttaaaataaaataaatgtttttagtaattcatgttagctgataatgtttctactaaaatcatgttagcttattgatttccatgatgcttataatgtttatactaaaatcatgttagctttatgtacatcaatttagataaaatccaaacgtttggtggtttcgccctcttagacgtatgatcaatcgtgtagacggctagatgttagggtagaccattctaattgggcccaaccattcactcggtccacaagatccggatcttttcttcagttgtcgatagtatttagttttttcatgaactatagcaatatggacacgatgattcatgggaggaaagatatggggttgtcttctttaaaacttgatggcgcttaagataaaaacagtcaaagagacttgtcggaaggccagtgtaacgaaagcagtgtggttttagttataggctaaattgaatatgaataattgatcataggcccagtttgttggtttatgattttagaaagaattgataagagaaggagaatgttttgaggttggaactctccgacagataaatatgatgggaagaattattcacggtcgtatattttgacaagggaccaacggaaaggagagcagttgcatgcatcactcgtctttacactatttagaaagaaaatgaatcttgtttagtgattcattttaaaaagtttttctatgtgaacctcattcgctagaagtagtttaaatgtatttgccttaatccgatcttagaactggatatttgatatttctgtaatcagttcgaatgtatctaactatagggctaaaacaccgactgtatagttctttcgacatatatagagtgtgtactttgcttaatggaaccataggcatgttaaacgagagcatttaatgttgaaattcacttcttttttcaatgcatgttttgactcacattgcaaggcctatggttggtgttcaacgagagaaagaaactatacatgacaagttaaagacatttattttgaaggactaacccaaaaggagaacgaaagagagctagagaagaagaaacaaaaagacaaaaaggctttcgtaatcagtgctcttcctttttggctttttactaccaaatagtttaaaagagtcaaacaaaacatcgaacaagctgaattcagataccccattggtcacacagttgatgtaagcgaatctatatgtcccaaaaaacatgatttttatagtcagtgagcccgtgatcaaacaagcacccgtgtacatacgtacaccatgtccatatgtataaatgtataatataatgaatgtatctgaacgtttcatgcattcactttttcacttttagagattaaagaaaaacatagaacaatgattgggttcgagataagatttcacagtttcatcacactggttttgccaatttccaagaaatgtaaaaaaaaagataaaacaacagagatcttctcaatgaacactgtctcatctttttgtcagtttcttgttaataataatttgatattcaagattcaaaacactcttatctctttactaattagtacaaaattcacctttgtgtttgtacttttaactctgaacttacattacagtatttcaatgtaaacgtcaaagtatttacacacacattcacgtgcgtcataattatggtaagagaagaaaagggaccaatcttgtatagttgaaagaaaaaggatatgattcagatttttacacctaccaaaattcacacgtgaacctctcaattgggtctctttcttctgcatctgaatcatttttttcactatatgccaagcttaaacatgttcacacacatccctctcaatcatcatcattacatatagctttgaataaacatgagagatagatagaaaaacaaacacttgaaagaaacagatgagaaaatttcactaagcatctgaagaagattagtagtacaaatggtgtgaggttttaaggtccctaagctactctcaaacttgttctctaaccacattattacttaagattacacgatttctgatgtttggttagtctgttaactccatcacattctctaacttcacaccatgtcttttggagctgtttccttttgaacttcatggtttgacttgcacccattcgtaacgtccgctgagggggatatcattcacaatgtcgaagttgtacctgaagattattgaaaacacatgagtgttgttcaccctcttcgtaatgacacaaaaataaaataaagaataagcttacttctccatgaatagcctctgttgctgctgctctgcatatgcaaagaactcctccatttcactagtggtcgggatcacgttatcttgttcccttgtgtactctttggttgctctgcacatcgacctcgtgctagaccctggtgtaaccatgatctccatatcctcaacaaagttacaaggcgtgctctcccttgtgctgcagaaaaaaacacagataaaataacttcaataacattatcaccacaaagacacttaaccaaatcaagaatcaaaccaaaaccaaacatccagaataaaaaagaggcttggtttaagtaaacaacaaaagctagagactttctaagtaatatggtcccataagataataaataacaaagagaaggcaatcaccacattgtcaactagcagcaggacggttaccccaaaaaacagaggatcctacaaaagtattccccaagtatgcaaaaaccactaggtcccatgaacatgacaccacagtacttgcattacacttatgaggaaagtcccaattctcatataatcttacatattaaaagtttctgacctttatacaacaacccacttttgtaaaaacgaaaaccatgtgtttaagtaaacccccaataaccaaatcccaatattgtatacccaatgtacaaatacttcttatgccattagcctaataacaaggagaatcaacatgttcttaaacaaattaaaatacacaaaaacagatcagagtttcaccaaatttgtaacaaataatgaaatacatatataaaacgaaaatagctttgacacattcattgataatctctgcaatgaagtacacatgggacatacagcaataaatcagatataatgtaaatctaacaccaaaagagacttatacggagaagtagtaataacaaaattcagtacatcacaagagagtcaattcataaacaaaaaccaaaccaataagggaaacataaaaaacctatttttctcttgtactaaactattttcatcccccaaaaaaaaaaaaattgatttgaagcaaacaacaaaagtttcagagaaacctaactaagattcaaaactatgtaagactcaaaactaagattattggataagacagaacacaaaagtcgaattggtaataagaaaacattagggcacaaaaaaaaaaaaaaaaaaacaacgaacctgtgtcttgattcaaaaccgagactgttttcaccacaagaaacttggacactcacgaaattgtcaaaacattcatcttcattagagctctgagctacaggaaccgagttaaccgagtcaacgcgagacctggaaccagactctttaattcccgatctgtgaactctcggcggctgtttcggttcaatcagcgaagagggtttctcgagacggcggctacggagctgaagatagcaagaagagtcgttaggtagagctgaatcagcggcggaggaattaagccgcttcaaggctagggttttagcggctctggttcgaacacctggacttggagctgttgctttagagacttccatgacgctgatatcgccagttatctttgatttcttcatgtatttccccattttttgagagagggaaaagaagcttgaaagcggaaagagaaaaatgagagggaaaagctttgagggaggagaagaagagggaaagtgagaaaatgggaaaaaggttttcgagttttgtggggttaaaataaaacaaaggagaagaaaaaaaaagtttaccttttttatctaattgtcaaaaacaatattattattattattatttttaaataaaaccccaaactcatcattattatttgtattttccgttgtgttttcacttttcatagaataatcgtcagttttacatttttgatttattgataatttttgttgtcgaataaatttaaattcatcatttgactaaatctttaacttcttaaaaattaaactgctaattaaattcatcatttgactacgaattttctattaaatataacgtgtattgcatacggcttttctattttaaaataaattctcattaatatgatcggtttgttgttaaaaaaacaattttcatttatttaaattttatcaaataatttcatcataaaaagtattgaattttttttattgaaaccatataaacttaatagtacatacttttaacatgtaacaacaaacaactagttacatacattcacatagaataaaaaatgtttatacgaaaaataaattattattatgcacacgaataaatattcaacttaagtatttaaacataatattttttctttgaaattgacagactttttccaaaaaatcgagtcaacggaaattgcaccaaaaaattgctaagtttacaattttggtatataatgatttttatttctcaatttaacaaaaataaatctaggactattttccatagttaaattaccctttgaaccaacgcgtattacacacggctttttttgttggatatacatgtttcttttaaaataatgatttattatttatcatttttatcaaatatattaatcataaaaattattgaaatcatataaagttaatagcccatactttttcattgtatatcaataaatcagtagttaaatactttcacatataagagaaaatatttatgtaaattagtaattattcttacattatgcacactaatgaatattaaacttacatattaaacatgatatttttaaaaatacattgataagaattgtttcaaatttctagtcaactgacatttcacaaaaaatcaccaatttttgtatatcattatctatatttctcgattaaatagaaaaaatccgggattttttctttataaaattaccatgtggacccataatttatatattttctatcttttaaaatcaattagtcaatcaatcattattacatacaaaagtttcacaattttaagttttaacacgcattgtacacgataacatggcttctacatcacataaatatatgatccgacaatagtttacaaagaagaaaataaacaatttcttatttaccttaaaacataaaataataaaaaatcaatatgatttaataaaacatgttgatcgaaaattccatggagattgttgtaaaaaccctaaagagacgtctacatatacacatcagctactagtgatgattgcttcttgtgatgaattttgattcattggcattttatgtggtatatgcaaagaaaggtatgatttcagtaataaatttttgatctagggacaattttcaatattaatcctcatttgtttgctaacaacatttattatgcggatataatcaaaatgtatgtgacaattgggccgcgcgaaatataaaataccaatcaaaacctttaggaaggaatcatctgcaacatgttactacggagaaatgcaagctggaacgaggcaacaaagatgaaggtatgtatcccaccattataaattaaaatcaaattataattcggattatacgtatccgtaaattcattctctggatctggattcacctatcttggatatccggttttctggatcggatcggaaagaattccggattggatctatgattccgaataatagtgccatgcctctcaaaaatccatatactgtatctaaaatcttttaatggcaaactaaatattaaaattccactttttttttgtaattaaatttagtttggatatacatatatattaaaccacaaatttggatatctgaagtgtagatatttggaaaccacgaatttggacctaaatatttcaaaatttcctatgttaaaaaacaaaaacaaataaattactacttccatttaagataattagaaaatccatatagtgtttgctgactaagattcctggtccatactattaaccacataatccccaattattaagctcaagcattaaggttcattttattaagctcaagcattaaggttcattttattaagctcaagcattaaggttttgcgtggcacaatttcttttttttttctattcagaaataaatttacaaccaattttacttctttttttctctttcatgaaaagatcttctttttgggttttatttcaaatacaaaataaataaaaatttagatttatttttgtttactatttttacaaagttcaatatatttcataaactatctaatgaggatttcttgtatttcactttcaattataaactatgtctaaactgcatcatatatatgtccaagagcatatgtatcttatatgaactttaattctttcaatatatcccacttacaacacattaggagaccattattagaaagcgtatcatatcattgatgttaattttgtttcttggttttatttcgaaaactggtaggtttagtgaaaatataatctttctctctagcttttgatactcttcgtgctgcctttgtatcacttttggatattgtactagaaaaactgagcttaggaattacatttttccaaattgactccaacgtgaaaattaaccaatctttaaactatgtgctcccaaactcattctttccagtgcattttcgtagaagatgtgtcatctatgtaccatcttttccaaaaaaagttatcatcctagattaattcatgtcagtttctctcatgaatggcaatggtgaagaccctgaaaaagatttgacggtaattttgttgggaacagatggtacaaagtggatataattttttctacgaaaaacacatgagaattcgagtggaaaagggttgggaagaattttctaaaggaacggcttagagattagtaactccttcacaatggatcagtcaacttggaaatatccaacctgatgcttagtgtttcgagtacatagtccgaaagtgacacacggcaacaaggagggtatttgtaaaatctagagtatttgtttccacggaacttagcaatagaaacaaaaccagaaactaaaaactatatgtcagatgagtaattcatctttaatcatctaaaaccaatttaaaacattagcacaacaacaattgtcatgttctactaagaaatcatgatcaagtgtagctttgacaagtgactctaaattacaatgtcgatacctaccccgaccataactagagtagtagatgtagagaagatttggtgtgtcgagtgaaaaacatagcgaaaaacaatctacatcatgagcacgtttataaatgatggagaatctcctacttgtattgctcaaataacgtttggcaatcctgcccatgatatctttttcaggattgccaaaagttatctccaacaaaacaattaggagacttgtcatcttttataagcgtgttaatgatgttgattgcattcgttctgtttcacttgacataccaaattttgtctacatttactctagttatgctcggtgtacgtatcaacattgtaatttggattcacttgagagctaatggcatatacaagattggagaaataactctgttaagatatcaaattgcagttgtatgatacagctagataaacttttgtgggctaatggcatgagagttattacttttaaaaattactagatgagtaccctcactatgcattgaattatgtggtaatttattgagttacttgatatatatattgatatttttttatatttcacttggattgtgttaataacttaatatacttataggtttaccacaaacaatgttttcaaactttatctttacttcgtccaattgttgtgttgatcttgtacgtttgggagaacatgagagaagaaagaaagaagcaggcttctagagtttgttcgagtcaacgttttcttttttcttagcccgtaacttttgctaaaatcgttttcattttttttttgttatctttccaaaataaaataaatcatagaaaacaaaaggtagaattagagatcttacgtgttagttttgaatatttcaatctttacactttcttacatttcacgtttcaattgttcaacgtctttcgtcatgtccttgagccgggttttttttctgtgttgctacgctcttgtggatttgacattaatcaatcgtttttctagtagtcgagccttaaacgggctagaagaagaagatgaaaagtaacattaaaattgaagcgataaatgtgaaaccctaacatcgtaggagaaagagattcattgatgttaggatttagtctagagaacttaaatgccacatatcatcttctcatgtgctgacgtgatcgaatgatggaaagagttcacctcctcttatatatatgatttccgaagagaacacaaactccattatttaaattctatcccaactttagacactaaaaacaaaatgtttaattaagaccatataaaatgccacaagtcttcctctaaaaccaaactttttcgtttgatgaagtagataagagaaacatcaaatgttggatccaaaatttaggatccaacccatatttataattttaaaactacaaaaaccaatagtttagacactttcagagttttaataatattacattgtccaatggtggatccaaaaatttaaattttgaaaaatatgtattaattgtttggattacaagttactatattattttttgacataaactctcaacaacaacttgcttaggtaatcaatgtctttattaatttttgttaacatcactaataaaaacattgcaaaatttacatcaataaaaattgatgctaataaaaaataatactaataatataaacataattgtgtgaattatcttcaactattttttttttttaatctaatgttaagttatatttatagaaaaagtaatgtttgtacaactagtgaatgtgttttcaactattgtgattatgtttcattctctcttcttatatctttctgaagatccaattccataaatcatatgtcttatcatttaattgctaatattaatgcttttttcttttatttgataaatatattttatacaaaacctaaattcgtttaatcctacacatttattctgtttagtaaacgaatggaataactaatgattgtaacgaactgaataattgataaataaatagaaagtaattattaatttttattagttgtcttcttatataaattgaaacttataaataattgatagaaatataagtatataactataagtgatagaaataattgacatcaattattaaaaccatcacaaatacgaagatcaactctaaaaattgatacaaaaggtagtatcattttggtaattgacacatacctaggtagctcgtaaatttcctaacttgcataagacatgaaggtactcttttccagaggaaaaaaaaaaaaaaaaccggaagcacaagaacattggtaatattgttgaatcaatgccaaaactacaagttaaaaatcatatttcaccaatttatcacataccaaacaagaataatgaaaagaacaccaaaaatgaggtcgacgcaaaaaaattaccatcacggttatatgagatttcacttccagcggagagactgtctaatgccggtgaagatgagtccgactgatctaccgatcaaggtgacgagaaagaaggatatgacgctactcactttatccaacaccactctgataattggcatcccgatgtctgataactccagaaatagactgaagtagtacctcctgtacacatcaacactttcatatgtggaattctcatggaatttttggttttgtgatcaaggtaaaagaagagaggtttaccatcccgatagagctttaagctccttggttcgtttaacgggcaatgaaaagtcgctgattatggagtatcgcaagggtgatgatggggcagctttagtttttcccagtgtgaactttctccaccaactaaggctttctgtatcgtcactaccatcaaggttgttgataacctgggtttgaagaatgtagaggtcaaagcgatcttcatacatcgatacaactgcttccagattctgatgcaaccactgatatagagctacctatcaacaggaagaaatgaaattttagtccatgagagatgaaacgtaaggtggaactaaacaaaagtgaagtggttttttacctcgttacgtagtttttggagtgctcgactagaaaggctacagatacttaatcctccactattcatttcatttgaaaatttgctgtctacagaaataagctctagatagatgctagcgaccccatccgccaatgttatcatgaagtcttccaaaatggcaactccgtgagtgcgaaagaagctcaagtcatagcagaaagctttcccgggagatccaaatttatggaaatataaaaattctgcaaacagatcctccttgcctgattttcttattttgtcaaatatagcatccttttcatttagcattctgatcagcaaaggagttatcgcctgcaaatcacgggctagattctggagttcatatctaaatctgctaatcaaataatgacgaacacgttatgtgatatcgacttacattgtcagaatcagtgttttccacatacagttcctcttttagccaagccgtgcatgctgcttgatatgcttctcgaacaatttgagtaaaactacccatccactcatctgaattgattgtgccagagatcttatttgtctgcaaagcaaattcaatagcttatcagcaggtatgaagaatcaaagaaaactaatgtcttgaatgctactaaggctagagaataaacagatcttactaccagagaggaagaaaacaatcgaatgaatcagtaagttcttgccacaggtaatgtgaatcaaattttcttaccataaagatttttaaatggcaggtttctactacactagaacggacattaatgcaattccttaactcaaagtgcacattctgctttttattgatatatgcccctgaactagaattagaaatcattggaatttgaaagcagataagcgcaaagtgaactataggagaaagaaggtaaaagctgacctcttcttcaagtttctgaaaacatgaccagagcaagtacaactgaggcccttcagatatcgcatacaaactcaatgggggcttcccttggggaggtttgggtttgagaactttgcttccaagtgtattctcacgcttgatggcgtctaaagaatctaaaagctttactttcaccacatcccatacagacttcaaatcaccctcaaaatctgtctccctaaagtcaatgcatagaagaaaggaggtgtgtaaatacacagcagtttattttattgatatcttaaagctaaaatggaacagagatatcattcacatatggaatttttcagatgattactcttacctaccagaagattttgaagttccaacttctggtatctcctccacgatcgtactctttcccgaagagtaggtagaggttttttgaacaggaatcactccagccatatacgtaagaaatatactagccgtcaagagaacttggtcaccaataggaacccaaccagaaccagcaacaccatcaaaatccgccagagaagcaaaacaagtacacttacaagtagaatctccctgagaacaagacgatccaagattcaaggaagtagaaacattaaatttgtaagctttccttgatacgatcttgcaactcctacaaaatagaaaccatgacttaacacaatagtgatacattgttactactaaaccatttcatatgttaaagaagagatattgagatcaaacctctgggaaaattttacacgaggatttgtggagaagcagcttgtttgactagagtgaacattgtgcatccggagctgaacgctcgatgaaggagacacaacaacatgtccaaccattggtaaataaccttagaactcacactactaaagcatttcgtaatctcggaaacagatcctcaagcccaatctctacatcaacaagaagaaaacaaatcaaattccagaacctaattgcatacagacttggctattgaatttgagatttgaatcccagttctagcaccaagatacagattccaaactagtagattccagtgtcaatggcagagacaatccgaagaaacaccaattacaagcaaaatagaacaaggaaaccaatctacattgataatcgatagtcaaaggacgagaatcacgctagagtgaaaagtagcaaacaaacctcaaattagcatggaagagaagagcaacaaggacgaattgagacagagcagagcagagcagaagaagcggattggggttgtgcgtacgtgaaaaatctctctttcctcgacagagactagacgagaacgatagtgttgatttgaaatgcttgatagagtattttctaaagggagtaaacaattggggtggtggcgcagttggctagcgcgtaggtctcatagctatctgagtaatcctgaggtcgagagttcgagcctctctcaccccacaatatttttttatttaatcgttaaaatggtgaggagcagccaaagccatttgagaagagcattatcagcctctcttagtgcaaaagcggacatttgcttaaccattgccagaagtgtgtgcatgtccattgtgtcacgcataactaacagatagctttgtacaatgagcttgtcaaagtgattcaatatcatatcactctggagtaatctgatgctcgtgatcgatccccttcagacgggtctttccatataagtaacatattatatgtataaagatgaatctctatcatggccagcttgtgatgtttaattcattccgacttgcgtatacagaataccaaaactgtgtgtaaaattcaaaactcaaaacactcaggtttgcaatgaaagaggttataacagagacaacgagaatgtgcaaatatcattcctgcttcaatcctatcacgtacacacaaacatggtgaagctgatagtttacgatgatactcatcaatcttttggatttgcgaatgcatttttttgtcacatattccagtcaaaaataactagcttcgaagcttccaagttttttcatgaagtttgatgcatacagtgagatctagagagagacattgatctcaatgttgtctatgagcctgaccgttccaaaccaagcagcaacacaaatcactaccccactctttatctcttctactccttcaagagtttcttggtcaactatctgcatatgcacacaatcgcatggctcacatcaaaacacatgtgtgtacagattgatccaaacaacaactgaaattcaactccacttccaataaaatgaaatgcttacctcgacataatctactcgtcctgcagatccaacaacttgttgaatgatcatatccttaagctctgcacaattggttttcccttctgcaacagaagctttagccatggccagtgacctacttatagacaaagcctaccatatcataacaaaacaacagaaacaaagtaagccatccttgatccttgttcacataccagaacataaaggagttgttactttaccctttgcctttcttcatctgaaagacgcacatttctcgaactcatcgcaagtccatctttttctctagctatatctgatcctacaatctcaataccaaaattaagatctcgaacctacataacaaacacagcaacatcaggcttaccattctctacaatctctataccagcaagaaattgtgcaaaatgttaccaattctcaccattctctgtataatcctccattgttgataatctttcttaccaaacagagcaacatcaggctcaacaatattaaaaagcttagtaacaatagtagcaacacctctaaagaacacaggcctactcttcccacaaaaacctttctccaatctctcaaccctaatccaagtctcatgccctaacccaccttcctccacacaactcactaccctcccaccattaccaccaccgtcgtttatcttcttcgtctcaccgccgtaatcatagaggttttttgggttaaagacgacgactttaccaccggaaagagccgcgagcttagtgagatcgccggagaaatcagatgggtatgtggagaggtcttcagtgggagagaattggcctggattgacgtagattgagacgacggtgacgtcagtgagggctagtgattgacgaacgagagataagtgaccttcgtggaggtaacccattgttggtactaaaccaatggtcttgccttgtgatctcatggctcgagaccattttctcatagagtctttgtctctgattacttctggttccattgtcggaaaattgagattgtcttccgacgaatgtttctcgtggagagagataactggaattatctaaaccaaaaataaaccggtcatagaacaaaatctatgggattttatgattggttaaatattaaccgaatttgaattttttgtatattccggtttgttttcgatagatttcaagaaccacgcttgtaaccggtctaagaacgtggttacaaaagaaaattcgcgaaccagacttaacctatccagaaaacgagtgagccataaagtttatactgtccccctcgtacgtcgtaagtatcaactgaaccggcaacttctagagatttcatggttttcattctatttcgctaaaaatactcactttatcggagtttgagagattttgcaaaaacttggagcttaaatgaagttgttcccattatttgttgtatgtacaaagttactaaagagaaacatatatttacaactcatcaaaactataaagcagcaaagctatgatgatgatacacaagaaaacacagaatgaattaactagcaaactaatgtatttctaaaagacgagatctgttcgaagattgggagtctcttagatttaaaactagtggatgtcatctcttcaagcccaagaacaaagtcatcgtctaagatatttcccaagacatcctccatctcagcatctcgcatccgtggcagcgaagactctaattcactcagaagctcttcggcccgttgccttgttctacaatcatccgcacccaaaaccctatactcgagaacatcgtcaagaaccaatcttccctcctcaaacctgccttgtttgataaggcacatcgcaaggttgcacgatttgttagcatctggctcaaccatctgggcttttctgtataccgcttcggccgataagtacttggcttgttgcatatatgcccaccccaagttaccctgtatatgagttccaatgaaataagtcagtccattaccaaaaagaaacactgagtgaaattagacacaaatcgagttggagcatttgttacataccagtaatcttgagatttcttgttgaacagtcacttgaaacttttttccgtgggagcgagcggttttggtaggtttaccattgaaagcttctccttgatagatctgccttaatttcctcttcaacaactcaacttgctcctccattctcccacatttctattcatagtaagaaattgcgctatgtcagtgtcataataaaggactattatcatttttatatactgaattccacaaatagagtatgttagcgtgtatggttatagtaagaccttgtataagtcgatgaggacattgtcaagggaatcttgggaattcttggaacaacgaggacggaaagatttgatagcttcaatagcttcttcagaacggtcaagttgtttcattacaacagccatgtccttgagggcactgtctactctgtctccagtgttgatggctttccaaaaccacactattgccatctccgggttcttctctatcaactgcaaccaacattaagacatactaattattaataaccaattactttactcttctcatatagaaatatattcatgtatttgaccaattaggatatgattcgatgggccggccaataaaaaatgtgaagaattatattctttcaaacgtaaaagactttttgcactattattcggaaaaagtaaacgagatcccacaccgttcggtgcaacgactgactctcatacgcacacggcaacatctagaccataaattggaacaacttttttttgttcaacaaattggaacaatatacttcttctttttttttggcttaatcaaataaacataacttaagatatagaataaagtgtgacacgttattggagataaaatttaagaaaattactttcgttttccaatcggtcaattttttgcaagtgttaccttttttaaccggaaaatagttaaaatacacatttttatttctttcaaaaaattatatacaaaactatttggttatataattttcttggttaatttgctaggtaactaagttttgaaaggatatttttaaaattaacgaagtggaaaattagtaaataagtggatattaattccgcgcatgtttttttcttttaaatcatgtaaattaaaagtggcatgacatttattttagatcccgtattaatcatgatatatgtttaaaacatatgcaaataaacctgagtgcatatatatacccttttttaccagatcacctaaaattattatagcttgtttttttaggtaaactatctaaccttttcaggcaagaaatgcaataacattctatccaaattacaccaatattcacccacaacaaagatatttctatcttgaacaataatatcttctaccatcagtaatttcattagtatcatatgaaagaatgagtaacctttcaaaattttgttgactcataaacaacaacaaagaaagaaaaactcatatcaagaatggataaagaatctggacctgagcatgtttggctctgacataaggagtgtctccacagggaactttgtgaatcacatgaaacaattcatcatctttcataagattgctctttatggagttgttataattgttcttcgtcttcttcaagcttctctccatctttttttcctctgtttttctcttttctcaataattaattataaagatgtctgttgacaggctgggaaagacaacctctgcactagatcttaaatatgcgtacgtttgttactgtaagaaatgaatttggacaatatttcgtctctgttcatagaagctgccacgtcacttggagacttcttaccacgtataggtgaacgagcaaaacgtgttgttttaccattgccttttgtcttttctacatttttggtgtcttttacggagtattaattaggtctttaactgtctaaagattctatattttttatgttgcaggtatagattgactattacggttctttcgatgttcttgtacccatcaattctgacttgactactcggttacatattttagtgaaattcggttttagctaaaacttatactgctacgtcacttggagacttcttaccacaaaggtgaacgagcaaaacatgtatatattgactattacggtgtaaaaaaaaagaactttcgatcttcttgtacccattaatgccgacttgactactccgtcaaattttagcgaaattcggtttcagctaagaattatactgccatgtcatttggagacttcttaccacgtaggtgaacgagcaaaacgtgttgttttaccattgcctttgtctttttctacatttttggtgtcttttgtacggagttttaattaggtttttaaccattaaaagatgtatatatattgactgttacggtgtataaaaaaagaactgttcttgtacccatttattccgagttgactactcggttaaatttaagcaaattcggtttcagcttaaaattatactgccacatcacttggtgacttcttaccacgtaggtgaacgagcaaaacgtgttgttttacaattaccattgctttttgtctttttctacatattttgtgtctttttatggagtattaatttgggtttaaccgtcaaataatttatgttgcatgtaagtattcactattacggtgtgtaaaagaagatctttcgatggtcttgtgcccatttccgacttgactactcggtcaaatattttagcgtaattcggtttcagctaaaggtttttagacttatcgatttaatggtgtgaaaaacggtcaattatattcatttacaagtttaaggattttgttgttatgtgtatatgaattttcgagtttgcaaattcgtacacaaatttggacaagaatcaactatagcttatgtatttttgaataatttgtggtttttaccatttttaaataataaaattatgatttaacatgcattttaccttttatatttggatttagtcagttctatttatttttaaaatttagtatttaatatacaatatgtattttgcgaaaaaaatatcgtacatacgtatatttttaaatattaaaaataataaatacgtaaaattttagtaaaaatgacatttttaaaacaaaatatcaaaaaatggtaaactagacaataataccattttatgattgcgaattgcttccaatgacatcatggggaggtggatcacatggtgccacaaccagctttagaaactcaaggtggctcaagattcaacagcccatgatggctcaagatctgagtatctgacgaacaaattaaatgacaatattatttttaagtcaatacttttcagtttttctaatatttgttttaacttctatttattgtagtttaattataattaatacattacatttaattttaaattttatagtaaaaatctgcatgaaaaaatatataatcttttttacgatatgttttgtgatagttagtatgtaatacttgttttgttttccatgcctaattcggccaaacaaagattaactaagtcaaacaagctgctaatatggtaaaacggtccattagaacatcggcccattaagacaacggctcgacccaaataaagatggttcaactcaacataacagtggcttagtctagtaatattttagctcggtccattttagtttggcccaacctgatagattcgaaaagataaaaaggagaaatcgcaagagagacaaagagaagcgtatatcagctctttgcctataattagcagaagacactatacagaaaaggattcggaccacaagtcattacttaggtcagctcgtcgcataaatttattttggacgaaatatctttgattttttttttttgtcaatttggatagtaccatcacaaacatcatcctttacatatatagtgaataactaatcattcaaatgttttactagtcaatccattgttcattttttttttcttttgtagtgatattcagattttattcaattgcacataataaattttagtatccattagaaaaaatggcctcacagaaaaaagtttatcagttaaagtagtatctagatttatgtttataaggttttactatctattttaggtactttctttacttttcttagcttaaattataattcatgtttcagagattaatcagtccattcttgtacacatgatcagttgcaaataccattaaaaagaagtcggggatgtactgtgggaatataagtactatactataagcagattcgatcccaactagtgcaaagcatttcaatcttcattacaaaagaaaaaagtagcaaacaaaaaagcattatctaaatttaattatccaatcgtcattagaatcattgaaaaggatataattgattttaatatctaagtggtaaccacatcaataattataaactttattatagaaaaaaaaacgtagcgaatcatcgtcactctcagtcgttttgtggcatatacaataataagccaaaacacaatgaatctggacaatttgcgaggcattattcactagtttacaagacttgccgctcactgataaacattttggaccacaaagcaataaggcaaatagtgttttcggggaatacaaaaatatacaataattctacggacttgagacttagctataagtcaatattgaatattttatagaaatccgagactagtggagacatcgcatgaattaagacggtttatcagcattattcaagattgatttggtttgcatctaactaacatgattaaaaataagaaccattgattaattcattccttagagtatgggttcatgcttgcatataaatcactcgttcgatttatttcgtattacatctatttattctgtttaggtgcaaagccggtcttaatagaatattgtcttgagaacatacatatataaactgtcattgtttctatctccataaattttgaaatcgatcctaactagttgaataatccctctataccaagaaggcaagaaccgacatttgaattaatttaaccaattatcttccacaattactttctttttgttgtccattgttcttcatttacttttgggttgaatttatgaactcaacaagtcaacaacattttatgaatcatatcaattttgggtacacaatcgtgaagataataacggagaaagcttgctaaagacttaaaagtggtgtttgtgaagcagtctatatggcccactattaaacatatgtgatatcatgcatgagttttggttactcattcaaaagtatgctgaacaattctttttttgttttcaaaaattacgggtatgttagattattttgagttaactaaaaagcatagaagattaaaaaaatgttacattttttatataaaatattacaactacatctagtgccggcttagcacatgtgcttaaggtgctaggacatatggtctagggtccaaaaaaaaaaaaacatgatatgattacataatagcactggatctacaaaatgtttgagccggtcctgactacatcacataatttcatgctaatgtttttgtgtgttcttacgcctaacgtcttctctacacaaaacaaaaacatgatcatgatttagatttggctgaaaacagagttcttgatttgaatttgactggaaaaatgtttcttgatttggttgaaacatgttttcttattcgccttactctcggatacctcgtagctgagaagatatggacattgttctttatagaaataatgtaaagcacgacttccataccttcttgcaaggatctttgataagttcctatcctcattaacatgtgttgcaccttgtttttcgatcctctaagcttccaagtatatgactacaacaacgagattgaatatctaatgatacaaatggtatcttaactatatactttcttttcaattcttctggtaatgtgtatttaacaattaattttgctaatcttggatgtagctttgcacatggattgctacagattagagctgtcacagcgggctgtccatgtccattagcccagtccaataatgtccatttcgatattggacaaatagtgttcatgtccactaaggcacatgtccattaacgcccgtgcccattaatgtccatgtccaaatgggttgtccaataggcataacaaaaccaaattttaacacaatagtatttgcttcagcaagatgcttgaatgtttctttgtaaataatcgctctagagagcattagatgtgtagaattccattttgtgcttactaccaattcttttttctgtttaagtaactcatattagtgagctaagcttttgatatttgcagtttcatgaatacacggtgtcaaaggaccaagcttcatagttcatactatgcataatgcagacaatgaacactatatcaaacaatagtaacagaaatcgaaagagacccatgtcaaaatcactctcaataagcaaaaaacagtaacaaaaaatcatttcgaattgagtaatcaaaaacccagatcgaattgagtaaaaatgacgagaatttgcttacttgaactggattaggaatctcaggaggatccatgatgtgatggagttgagatgttgaaggaactcgccggagaaatcgccggaaagaagaaatcgccaaataagcgtcggggaaatgttttttccccaaatttatttttgcccgaacacttaaacctaatattttttgaccattgggccgcccatgtccatcacgtccagtccgctgatgcccatgtccgttaacgcccatgtccattaatgcctgcttcataatgggcttgtccatgcccggtccattaggcgttggacacgggccactcgtccattttgataactctactacagatcaatcgttcaaagaaataataaaatctcagtagacctatgtttggaagaaacaagaaaatttcatagatccgtataatggatccatgattcaagattagcataattaaattcgaaagtaaattgaccttataactaaagtaaagtgaattaggtggttacagttttttccaatgacattgtaacataatatcttacaaaagccaatattactatttgaaaggtacttccgtactagtaatgtagggatttgagacgtgattatttatccttaatattctaattagattgaaggtttatatattaagttttccatagttaaaagtcaatcttgaaacaaaaagatagtttgagggttctcttgtaaatttcctaaaagtaaaacattaataccctaaaaatcgaaaaatcagaaaaagcttcggagcaagaaaaatcagagaaaattcaaaaacccttcacttgcctcactgttcttcgtcatggcgaacaatccttcacagcttcttccttcaggtatgcaattttttcttcacatctctcactttccaccttcttatatgtaagaaaatcgaactagatctgcgattttttggttttcaatttttgagcgatttggtttgtttgtgcagagctaatcgataggtgtatagggtctaagatttgggtgataatgaaaggagataaggagctcgttggtattctcaaaggattcgatgtttatgtcaacatggttcttgaagatgtcaccgaatagtaagtctgattttagggtttcgattattgcttcatatcttgtttaattggaatgttgcttgatctattacactttaggaggtgaatcatagacattgaaccatggatgtgattatgcagaacttagccttttggattttgtttttgggtaattgatctcaatactgatttgtgaatgtccatcacagttcattcatttgctgattaatgacatttattgtgtatgcatagagtctatttcagcggggtcatatgtggtttcggtgacttgagttgtttgtggttgtgtgaggattagttaattgatgcttaaacccgtgttgctttggagttaggatctcatagattcaagttttgattgtaacaaattcttgattgaattgtaactagagtgtgttactaatttatctaagcatcgttgtgtagtgagattacggcagaaggaagacgggtcacaaagcttgatcagattctactcaatggcaacaacatcgccattgtaagtaaaaaaacacttgtggttactcatagccatacgttgtataaacttccttgtgatgaattttcaagtatcttgatataaacagttggtcatttgaatagtcaaattgctaagaaactggtgttgaaaatgtttgtgatgcagctggtgccaggtgggtctcccgaagatggagaatgagatttgcgagatttgattggtgttttcagacttgtgtgaggaaggatgtaacttttggttttagatttaacactttgttcagagaaaagtagttgattttaaactcagaatgacaaaagttttcattgttcagcaatgtgaaagagctaaagcatcatatttattagactcaatgcatcattacttctacttattcaagctctcttcgatgttctaatgactatccccgttagccacacgagcgttggacaagttatcaacagagtctcccctctcaaaaacagctgcagctcccattccagtgcctgtgacgttcgcattttacatataccattaacataggtaatcattgatccaattcaatctgaaaaaaaatcttatatatatacctatgcacattgagattactccaaagcggcaatcttttcctctccgcttcatctcgtgcaacaatgtcgcaacacatcgagctcctgaacatatagaaaagaactctattagcctgtaacaaatgttgcattttatttagttacgacaagcttggtaagtagtaacctgtagcacccaggggatggccaatagcaatggctcctccattaacattgaccttttccatatccagctctaacttcttgcaagagtacacatactgagatgcaaatgcctgtttaacaatgcaacaataaagatttatatgtatgtattattccgaaacaggaaaaaaaccaatgtgaaatattttgttacctcattgatctcgaatagatcaatatcgctgacgttgagccctgcgagcttagttgcagcgggaatggcaacagctggaccaatacccattacagatggttccacaccagtaacagcaaaactcctgcattgttccggaatcagatttgctcggtttcttgaactggcaaaatgttgtatattcattttacctgaatactccaagaatgggaagtcccttcttcatagccaaacttctcttcattagcagtactgctccagcaccatcactgatctgactagcattgcctacacaaaacacatatacttaaatgcttcaatctatgatctcacttatgccagtgatagttaagagagttgtttctaaccagctgtggtggaaccgttctgtttaaagacagtcttcagctttgccaaatctgccatgtttgagtttggacgtacaccgtcatcaacagatacgacgattgccttctctgctttagtctcagggtccacaatctgtcaagaacaatatcatttactgagaaagctctaccaaaagggctttaaaggaagtttgggaggttcttgttttaccttagtagcaacaggaatgatttcatccttgagtttaccagacgcgattgcagctgcagcgcgtttgtgagactccacctgattattactgaatcagtacttatatgaactagagaggaaaaaagtgaagagaataactaactaaccgcagccatatcttgctcttctcttgtgacaccgaacctttctgcaacgttttcagaagtaattcccattggaagcaaacaatcacgggcttttgggaaatcctgtgcctattcccatgtagagtttacaagatcatcacaaaactcttcttgttgagtaaatttatacactcattgtgatagcttactcttggattagagccatgaaagccgcctccaggaatatgatcagttgacattgattccactccagcaccaatacctatgcaattcacaaagttgagagaatcaatcccatggcctatacaagcagctagagactacaaaaaactgatgcagcagcatcttaccaatgtcgtaataaccagctctaatggaagcagcaacatcagcaactgcttgtagtcctgatgagcattgtctattgacagttctaactggcacggagtctagctcgtaaaagagaaggatgaagaaacatatcaacaacttgtgagatattaagtttatcttgattcttgaatgagatttagtaccaggaaaaccagcaaaataagctgcaactctacactccattgctctctgagaaccaggcgctatcacggtaccaacaacgatatcaccaacttcacttggatccaaagatgttctttccactacagcctaatcagaacaaaccatgaaacataagaaatcattgatactactactccatgcatgcacaaggtttaattgatgacttaccttaagaacagaagcaagaagatcatcaggaagagtgtctttgaaacctccacgtctcgctttgcaaatggcggtacgatatgccctgaagaagaagaagaatcaagaaacaaagaaaactaaagaaagtgaaagtgaagcaaactcaatgagtatacttacgctacaatcacaatgtcatctccaaaagcagccattggggaaacttcagaaacacaattcacaggctaaaattaacaaaaacacaagtgagtcacataataaaacagagttaaagatcatcagcttccacaaacaatttcaatgtctaattaagactcacggattaagacaactaaacttacagacagaagagaaggttcatgtttaagagaagaattagaagaagaaactggattgagatgacgaagcaatatcttttgtctttccatagctctctccatgattctctctgttgcaaacacttgtgttgcagctgaattctaatggtgattgaaagacaaaaactttccggggaaactgaaatgggtttggttgatttttctggaaaggggaagacgttaagtacaatgagcttcagggtcctcatttttatcgtgggagagatttttgatcgatcgttctcagttctcacaagtctggtctgattggcctcgttgccaaaaccttgtcttgtcgtatttgtataagttaacgtcgttacgaaaatatcgcattttgacatgttttacgccacatacaaactcacgccgttaaaaatgtgaccggaaattaatcgtcggcaactataactaaaccgggccacgtgggaagaatctaacttttaagcaataaatgtttcttctcattttgggtattagtgattttgataatttgagtaatttacaaatttagaagaatttgagataatttataaaattttagtgaataatttggatatccagataatatacatgatttgtattctttacccacaagaattcatatcggatatagatttaagttgttttgtttagtaagaaagagttaagtatccttcaattattttgtaaaattctcgtccaaaaaatagttgttgtgactagaatataccatctaataaatcaattttgagagactaaaacggattttcttagataagtaaagtctttaagactcgtaaaagataagatggagagaggtcaagaaagttacccgacggatgaatgagctagtaagagttccaatagatatcaaaatctaaaagtagacaatatgcaaatgttgagataaccgattgttcaagattatatatacaaaaatagtgttgagagttagatgaggagtgaaagaagtgacgttgcatttggcaattaactcttttgccatactcttttgatcctccaccactcttcctaccaacctccttacttatctttcatttttatgcctacctaaccttccattcatgttagatttcttgcaaacctaatttcttttatttgtttattaagtatctaacttattacataaagtaaggttttgaactggttttgtttttctattttaaaatgtttaattatctatttaaaaacaataaatcaaatattgaattgattaaatatgttactaggtttctcttaaatctatacatatatatatatatgtttttcaatggaggttgtcgtcgatttcgattcagattactccgacaaagaggaagaagaaccagttcaacatcttcaaacagttcttcttcccattctctaatagtcaaagtgaaaccattatgaggcaaagtattccatgcaaacaatactattttttatttttaaaattacattactaatagtattgtttttaaaataaaaaattcagtaattaattaaaacagtcctctacattactactcaactaagcagcccaaattagaaacagaattttaaaaattaaagaaaagaaacataatagtcctatttttattttcataattaaataataatcaattaaattgggtctttttgttgagtagtttaaataaaatagtctatttataaatattgattatcaaaaagcatgtcaagttgtgtaataggagaagagcaaaatcctactttaatatactccctatatttttcatgactatgactagctttgtcaaacctaaatgaaattgtgctttgacatgaagcataactagaaacaattcaaaagccatgagaatcctaaaacaaaaaccaacacaaaaatacatacaccgaaaagaaagaaaatttgtatgtagctcacgctatacaatttatgtaacccaaacagatttacagtgtagttagttaattcacttgtactgcattgtgatgaatttgagattgatgaaaacatatattaaatttcaatgtcgaaaagaaaataacttgcgttggtggtttatagaggtgtaaaggccagtgggttgtttccggcctagtaataacaaatgaaagctaaacgggccgcaacaagtccataaaacgtaaaactaattggcttactttttttggtatagtgaacagaggaagtagccaactatgaggagacaagttgcaagggaatgtgggcggtgcgatcggtcaggagtcaggacccatcacagtctttatgactacccatttgcttctcaagttgtggagtgttctgcttctattctttaaacaaatatattgatttcgactgatgtttttttctttttttttttttttgggggctgaacacaacttttcattatacaaacattagttccatacacggtttatcaacctctacaaaacgattgaatctagataagcactaatgaataaagccaaatatcataattcataaatgaaagagattttccttttatttgatttctttcacgcaatttaaacacaatcttgaactctcattctttgtttacatgatatatcgttatataacttaagcatagtatttagtaaaaacatacttagttttttttttttggtaggaaaaatatacttagtttttctgtaacttaaattattagaaagtagaaaatgaaatagagtaacaagaaccaactttttttattaaaatatgatgaaataattcatgtgtaaatatgtgtctcaaagaaggtaatcttgtgattcttggtgtgccaaaatgaaagacaaaggtaatagtcaaagttcactaaaggaaatagagttccatttgcgaggaaattacagttaagccaatagcaaatagagttccatttagagatgatgcaaaacccaaaaatgctaatctcaagatatgaaaataaaaagaagtttcatttcccaattcaaaggtctctttctttctcaccaatcaatctccttttcattaacatgcaccacctttactcattctcttctctctctttatctgactctctcttatctccactgttcccaagcccatacgggcaaaagaacctgctcccaaagttggctctgcaacagaacagaactcttaattgtagtaacactaatgtatccactcacagtctcacagtttccaactctcctcaaacaccatcttaaacttgacttctcttctacttctcatcttcacacttgcccttttaaactcatcctctcaagcccacaacactcacattctctttctctccctctcggtcttcagctcaaggtatagctacattcatacgcatttcattttagggttggctttccaagttgtttgtgcacttattggaagttaatataatccttagtcacttttttgtatgtgtatagataacatagaatggaagatcattaccatcaagtagaagtggagggagaagaagagatcaagccaagcaaagaagccaacaagacagacgaaaacacatcatcattaagaatattcccctgcctcttttgttctagaaagttccatagctcccaagccctaggaggccaccagaacgcccacaagaaggagcgaaccgctgctagaagagccaaaagggcttatgattttgtcaacaacaatgacttccttcacacgttacctgttttcttatcctctccctctcaacatcacttgaccatcttaggctaccctgcttctgcctccgttgcctgttttccgacggttcatcccgaccatccgattttcaaatccagtggttctcatgtcgtgttggctacatcccaccaaggtagagattgcaaaggagggtactgttgtcaacaacgtgtagacattttggatcatcattataacgtggtcaatagtgacaagggtaaagatcagtgtcttgatctctccctacatttgtgattttagcattatcatttgttagttatggtcttgccaaaattgactacaaactgttccatccgtatcctgattttaattggtattccgagaaataatggacgatatatagtgattaaactatttgtaattcttttacgttttttttggtttatcattcttgaaatcttttggactttgtacatttaactttgctaaggtacttaggtttataaaataccgatgtagagtgaggttggcaaaaaaaaaaaaaaaaaaaaacgattttttttaatttattttttaacgacgttgttgtgtgatatgcccaaatcattgggcctgtttttaggttttgaatgcagatatttggtaaatattatagttttatccttaagaccatctccagaaactcatttttataaaataatataaattttattattattttactgttcaaatttttaattattatttaaactaatcagaacaaagtaaaggtagaaatgaggttttcaaagtttctcaggtgagaaacgtttctcaggtgagaaacgtttctgttctttctcctcctttttctaattttttattctggtttaatagagagtctctcctctaaagactcacattgaagatgctctaatgttttaattcttttggtcaataaaaatttttataaaatatattaataaaagataaaacattcttactttatatgagaaaactttaaataacatgtaattcaaaacggagagaatgtataagataaccataggaaaaactaattaatgtgagctgaacagataatatattgatgtggacaaaataagacctacaacttaattacattacttgttaagagttttatttatttatttaatttgttattctcctctcaaaattaatttgtaaattgagaccgaaagaaaaatggattgaagaacactcacacatgacatgatccgttgttggccaaactcattattgttgtcattgaatatctaagcatattgtataatattgtttctcttaattaatgttgatcagtctggaagcctaatcactgtccaacatgtgaaaattgatgagacacccgaattaatatactgtttgtacttctggaaataggagatcattcagattttttaattttctaattttctaattttctaatttttgtatgcaaaattaattagtgatatgaaatttaatcaaataaaagtaaaatacaaaacattaccagaaaaaaaaatcttcttgattttgattcaacactatatcaatgctaatgacttaatgtgctaagctattttaaaattttcaaggattgtgtcaataataattcatttcattggtttctgactttctgctaattattatccgataatgtaatccatgtagtaattataatagtatacaaactaatcttttgtcaattaattttgttttattcgaataatattttctttataaacattgttacacataatgttttagctgtagattataacttttaacgtaaatcacttaacttttctttaactctttttcttatttggcatcagtgtatacgtaactgtatattatatgtacagttataaaaaacagtagcaaaatttaacgttttctttaaacaatagtagaaaataggtaaacaaacgatgatgattgggtcttcaaggtaatatagataactttcgattggttagtttatatgatctgccacgttaatctaatctccggcgtgtttcccggacattcgaagccgacgaacagatagcaattatactattaaatattaatcaaacagtgacgtggaatcttttatgagaataacgtgtctgaatgaccagccgtccgggcacgtgatccatctgacccaccacacgtgacagagggagatagggagtaataaggccggtaagaatttaaatagcatttgcctttggagattaaatttggataatgctttagtttgttcctagtcatgttaaaatcgttatcctagaaaataccaaatactaaagcattattaaacttctaatcagatttatgcattatttgtagttttctctactttttttatattaatttaaggtaaatctttgaactctgaaaatatttattgggtagagtcccacaaaattttaaattgattctaaacaagagatccatatttatgtagttagaccctgtttgtttcttcatccaaatggatcatctggatggagatgaaaaatgatgtttgtttttgacaaattaacaaatcatttggatgaatcatttggatggtccatctgaatgactttgtaaatttaggctaatttgtgaaactcatttggatggacttggtagaaccatttggatggagatgatttagtccaaaaaaccgcaaaatcatattttcccgcaaaaaccataaaatcatgttttcccgccaaaatcatatttctcgccaaaaccgtaaaatcatatttttccaccaaaccacaaaatcatatttttcccggtaaaaccgtaaaatcatattttcccgccaaaacctaaaattgtattttcccgccaaaaccgtaaaatcatattttcccaccaaaccacaaaatcatatttttcccgctaaaaccgtaaaatcatgtttttccgccaaaatcttattatcatattttcccaccaaaatcgtaaaattatattttccgccaaaaccacaaaatcatatttttcgccaaaaccgtaaaatcatatttttccgccaaaaccgtaaaatcatttcttcattaaaattatatttggtaatgatgttaaatatttgtcatttgttaaaattatagaatgggtattttagtcatttttattagaatgagaatgtagatgaattacaaaatgatcaaacaaagaaatattcatttaaatgcatcatttagataaaatactaaataatcaaacaaacatcattcaaatacatcatttaaattgatcatgtaaatggatcatttagatgtaaatgacaaatgatcaaacaaacaggggataaagctaagctaaacaattcaattctatgttttaggagaatcgatttcaagctt

SEQ ID NO: 859 - DNA, 61712 bp, Arabidopsis thaliana
tgatcaacatgactaatcttccacgagactagaaccactaacccacctcctctagataaagctaaacaattctctacaaaaaatttccattaaatgtttctaattgtaattgaaaacatcaacttaaaatattattaaataaattttgtataaacgtgattcattttaactttttttttaatgaattctaaatccaaatgtgtcttaatctactgctatcacaactccacaatattagaaacaaaacatatagagcttgggccattttctgcttttatgattttcacgaagtgttttcaccaatatacttacatcactagttcagttgaatctacttaaaatcataaggtacgtaactcaaatcacattaacgattcaagttcattttcatggaattagatattttagtaaaattactacctattgatgaatttggatatttctagttttaaaacgggaggaaaaaatgattaacgtctttcatagcactatataaatgttaatttttatttgaattaaaaatattcagttaacgaaagtgtttgtgattaatctagagtttatttggagaaatagtcaaaaaaaagtttataatacctttttcctggttcatttttttttttttttgccaacatttaaattccaattgttgagattttagcccatcatttaatggtgagaagaatgaaagtgctaaactatttgtcttaaatgattatactttgattataaaactgtgacaatatgattattatacatattgttaaattttattctatgtgatacatatataaatgttttagcaagtacaaaacatggaaaatgtgagcgacttacaattataacatcaattctcattagcatttccgcttttactgaaaacaaaaacgagtgagtacaatttgtcttcccttttttttttttttggacacaaagtacaatttatcttctatttcctcctttttgtgtaatttgtctcttgtcgtatcacctacattttcagcattggatgttataaatgcgaacaaactataatgtaaaaaacatgtcagcagcatcgggccatttcaaactatgtaaataatgaagaaattatatgatctattctaaataattaattaggccaaatattattctaagtgaaaaatgtcacgctcaatttctcttatataataactccttcccttgaagcctttctttaactcttttcatcttccttcttccttcttcttctttaaacacaaaaaaccgacaaaagcctctgtctcggacagagacaaagaaacagaacagagcaagaacaatggctgttacacaaatacttgtcgtctttgcttctgcattactcctatcaatgttcttcactggcgtcgattccacaaggtatcgaaatgtttttgagtcaaatttatacgtgatctggttcatggaacaaagcattgaagttctcacttctcaaatctaagctaaaacaagaaaaccctttttcttgatttgaattacttgatcatgattacatggattttgtattatagatctaaatatggagggagttctttttattttatttttttatcatagattatgtagagatccatgtgatcaaacacaagtgtgttattagagtttattgaatgataatgcaacatttcaatgtgtattagcagtgattaagcgaggtttggtatattggttttataatttgagttgtgttttcgggtttaactaatgagttggttaattaatgacttccaggtctaatgaaacatggcatgaacatgcagttgagaatccagaggaagtagctgccatggtggacatgtgagtttttctgttgcttaaattttgtgttatatactatatatgaataataatgattgttgtttgttctctaattaagtattttagcatctaatgcgattggttagttagtaaaacaatttaaaaaatacactaaactagcattacttgacgttttggttggataaattcatgtgatcttcttttatacatttttaactactggagaaaaagaaaataaaaatcagaaaactggtgaaagttgtatttatgtggagcagggctcacatggcacttgtgtaagaatttttatacattctggtcaaaaggtcaaaaggtcaaaatccatagggccaaacaccacacctcgattccatttctttcatactttttgtttatgtttttgttttatattaccttaattctcataatgataaaaaaaatttctcttatgcaaattttaactgtttttaactaaaagtatgttcttggttcccgcgcactgactttttcaacgagaaaatcttttgattatttagaatttttcgtttgccgtagaaaatgattgaaaactttgttgattgttctattttatacagtattatgtttccacatttatcaaatacaaaacgaaaacctaaataggttataaaagtttgattttcacttatagaaacattcccatcggagttattttttggttcttccgttttcttttttgtgttttcaagattgactacattttgactccgtaagttatagaacttaatgccaacagactcgattttcgatttgtcttcgcttccatgtttttaattaaattttttcggcatgaaaccaatcaatacatttaaacaatttgcaaatcatattgtaaaacataaaaaaaataaaaatcaaataagtagtgaggataagttctttatgcttattcttactgaggggtttcagagttattggtggaccagacatgaaacatgatgcataacatggttcatttagttgagtaagatttggatgggattcttcatttaatgcaatgcacccaaatcatatagatgaataaatttatttttgtaaaaaacattaaatattattgcttgcaaaaatcttatggagttattgtagacattggtccaaaaacacgtgtaatgttcttgtttttgtttttgaagagaaacatgtgtaaatgttccaacacctaatctttaaaacagtgaattgccatcagccccatgcatctccctcgtgtagtgaattgttctctgaatgatttcactcgtatctttagtcttatctcgttattacttataactatactagtactttaaagatctgtttggcacaagttataatgttatgactatatgattaaacgaatagtattttttggattattattacccaaaaacatatacaactattataacgtcatttctaagaaagtttagcagtgttttatttttatttttggcttttagaaatcattggattcttgattgaataggaatagtttgcgtaacaaagcaagatttttttcaattttcttacaatgcgtgaattagaagcattagaataatcccaccgacgaaactatttgtcaaatgacacacattaaaagtggtccacccaattcctctgatttcggttaatatagtaaccatgtttatatttagtgattaattctgtcataattcaatttagcttagtgatcatgttaaattaatctggtttgactaaaccggttttgatggttcaggagcattcgaaacagcacagcgagaagaagattaggatacttctcatgctcaaccggaaatccaatcgatgattgttggcgttgtgaccggagatggcaatcccggcgaaaacatctagccaattgcgcaatcgggttcggtcgcaatgcaatcggcggtagagacggtcgttactacgtagtgagtgatccaaacgacgataacccggttaaccctaaaccgggaacattacgtcacgcagtaattcaagaagaaccattatggatcgtctttaaacgtgacatggtcataacattaaaagaagaactaatcatgaacagtttcaaaacaatcgatggtcgtggcgtcaacgttcacatagctaatggtgcatgcatcacgattcagttcgtgactaacattatcattcatgggatacatattcatgattgtagaccaactggtaacgctatggttagaagctctccttcgcattatggttggagaactatggctgatggagatgggatttcgattttcgggtcgagtcatatttggattgatcataattcgctttcgaattgtgctgatgggcttattgatgctgttatggcttctactgctattactatctccaataattacttcacacaccacaatgaggtaagaatttgtctcacattttatgttttttggttgcttgaatcggaagttagttttttttatggtagctctgttttatgacaggttatgttattgggacatagtgatacctatacaagggataaggttatgcaagttacaatagcttataatcattttggtgaaggtcttattcagagaatgccgaggtacatactttggcctaacttatgattcttggcaaaaacttcgaaaagtcgacaaaataaacatttttcattaatgcaggtgtaggcatggatattttcatgtagttaacaatgactatacacattgggaaatgtatgcgatcggtggcagtgcgagtcctaccattaacagccaaggaaatagatatctcgccccaagaaaccggtttgctaaagaggtactttcaagagttaggtcgactaggtcaaataaagaaccgatctttcttgacttttgacttagtgtcaaactataacccttatacttatagattacagtttcaacaaaattcttacagcaaaaacttatgggatgtttcaggtgacaaagagagactatgcagggcaatggcaatggaggcattggaattggagatcagaaggagatctttttttaaacggagctttcttcacacgttctggatcaggtcttggagctagctacgctagagcttcaagtttagcagccaaatcatcatctcttgttggcgtcattacctacaatgccggtgctcttaattgcagaggtggtcgccggtgttaatagttactaaagtctatcttcttttggtttcttgcattatacatggcaatagcactattgaatgtcgaggcttgatttaaaattgcctcaactgtattataaagttgtaatgatttgtttcaccgccaattattgatgtatctataaaagcaaacaaagttggaactctccctttactctctcatcttaatgttttcctacacaaggataaaagaaacatagaaatttgtcaaaaaaaaaaaaaatagcagttctctcggaaatgcaatgtagtatcaataatattggtgaagtttatcatcttggcatgtgactatggtttttggatcagtttggttcggttatatcgcctatgattgtttttgttcttggttagctttggttaagagtttcaaaaccaaatttaaccgattttcttattccggctaaattggttatttttggctgaagttggttttattttccggttaaattggttcaataaaactctagtaacagttaaaagaagtctaaaaatttggtgaaaacgggtctcagtttggtataatctggttattaaaacaaaaatacctaaggacggttcgatccgaaccgaaccaaaattttccgtttagcgatgcaaaattaaagttcttcctagaggttcaaccgatagaactgaaaatcttgattcaatccggttcggttttctcggttgggttatttatccattggctgaaatcccgcataacgggtcgtcttattatgtaggctaactacaagttggtcattcaaggttaaacctgaccaacccgtagagtccgctaaccgggatatgattaagatgggctgaccaagactaaccccgtttggtcgaggataacatccttcataatgatggagaggtgtggggtatggtgtcaaagggaataagaagggatgtgaaggtggtggaaccacgtgagaggagacaagaaccacatgagagcatatgagaggaaataaaagaaaggaccttagtatcattgtcatgttatgttgttgatattgataagataggtttggcaaatggcttgcttctctttcattacacactttgtttcaccaaatgttctctttatgctaatctctccttttttattttcttaatttgtcacatttagcgtgtttttttttacagtcgcagagactgcttctacggccacaaaattacactattacggcaagaaatttaacgccgttgagtcgctgcgattcagacgacaagtaaaaacagtttttaaagttgacgctgaaatttccagcgattacggaattactgtttctttttctttttctgatcgctgcggcaactgcggcactttatttttcccaaatacacatcatctcaggctttttatttgtgccgcagttcttgcagctgcgactgttaaacgaacatgctaattatcttaactaaatttaatttgtttcttaagtgagtaagcggagtaatttcttaaacaatttgaatagtaggttagataaaattaaaatttaagtttagaatttgatattcttttttcttttgacctgaagtgtacacataaccccgtcttaaatagcatcatgaacacatcaacaatccatctcaatttgttttcgtggtctcgcgaaagacgtacgtacaagtggctaacaattatattaagcatcctttaaatacattaagaataataatcttatgttacagaaatctaagacgtacagagggaattatgttacatgctccggtttagaatatttcatcacaaaaaatatattttattttgtagatttatatatgttaacatttcaaaagcatgtactttaatcttttaacaatacattgccgttttgaaaacaaaagtcgaaagacgtcaaatagagaattttgacgtcatactactatgttacttattccatgaagaaaacataatatctaaattagattttgttttgaaaatttcgacatagtattattgtccgtacttggacgtataccaaaaaccacttgtatttaaaaatcataaacaaaaaaaactcatttatctatgcgaacataacacaatatcaaatatgttagataaaaagtagtcaacacttttctcaccccttatattgtatgaattatgacataatatatagtgtttatagaattggtatgaaattatttggtcaacaaatatagtctccattttttgatagtcaacactatcaaaatttgttaaaaaatcaatagtttttacccatatagtttacctaccacattaaggttttttcctcttgtagtatataagataaactatttgacaacaataaagtaaattttacatacaacataagaaataatacgataattaataagtcttgcaccatgtctacgaaattattttcttatttcatgcttttggtagttctcttctcaggtaattaactttttttcttcttcttcttatatgctcaacgatctaatacgtcaatgtacaattagctttgacattttgacagaacttctttatatttttttcataggaagctaatgaactaatgctatcatttttttcttcatacatattcattttatttaaaagaagcatactaattttaatgataattctgtatagtttttaatttagatacatatctatgatactttaactcactatttgttgcagtattaacgattattcctaaaactgaggcacaaaagagatgtagacaagaactagagccgggaaagcaatgtgtgttggcaaagtgtagggaactgtgtttcaaacaattgaaaggattcgggagttgtattgagaagccaccaggctcttctaagtatacatgtaattgtttctacaattgtggtccaccaggatttttttagaacgcaagataatgtaaactcaatgaaacaatagtttaattttctatggattacaaaatgaaaatttatctttaaattacaaataatgtaatagtttaacaaaaaatgaaaatttatctttatcttaaaattacaaaacttttatacttgccatatttaaggtttgttcttctgatagtatattactatattgtgctttaaccattttttgataaacgtgatgtagccatctccttcttctagatcttcctgcataacaatttaatcacacaaaatcaatttctacctcatcggattatcacagacccatgaacaaatgatacacatcaaacccaaaattggaagcataagacaagctaaagactaagaagattggtaccctttgcgagatttgggacgagaaaatagctagagacgaagaatctccttagacgaggagaatagatacgaggagatagcgagaaagtctaaatttcgtttttccccaaatgtgtaaattttaaagatattttccgtatgagctagctcattatgcccgcgaacaaaattggtctttagaccatatgatccgttttagttgcgggctgaccacagaccgtccacaatattttggactgagcttagcccatggttggatgaccatttgacagttctacttattaaagcgatacagcttgtacagctttgacagttaccaatcacaaaaactttatcaaaaacgttacaaaaagttttactcagagttttttttgtacaacttttttgtacaactttttctaacagctttgcactgttccaataaagctaacagctaaaaatcttgtacaatttttggttactaatcagacccattatgttagggttctccctactttgagaaaaatcagcccaaatgtctaactctggtaataaatatttgaatgagtttattctactgtatatattttacacacataaaacttggtttcttataaatttgaagttttgatatttttttgaataaaaactttgagacataattcatcatttaccttttatattacaattcatcaagatttttattttatcacatttctaaactactgaataaaagattcaattcttataaatgtggagtcagtaaagaaacaacagagcttgtgtatacacagggaaagagtcttccgtctttatgtttagtttcaccaataatccatacacgagcatgagccatcttggaaatggtgaaaacgtttccggtctcgtaccgttatttttctcttgtaaactttggagatgagtttgatggacgaatgacaatcctcacagatacgtaggttcttaacaatgcgtattggtttgccagggctcgtgcttatcaacccaaacgctgtagcgatcttctcgctgtggtaatgaagtacattttctttatcttcttcctccaagtttaacaaaacctgtgtggtgattggtctatacccagctagtctcagtttgtctgagatttctacgagcattgagttgatttctttggcttttgggtgtgaatcatcttccacaacaaactcatgaagcacgccatcaatgtcgatcaaactacacccagggtcttttcttatatccttctccttcattctcagcctcatctctgaaacctctgaccagtttccttgagaagcatacatgtttgagagggcgacataagctccactgtcatgaggaaccatatccatcagaatattggcaacgcgcttgcccatctcgacatttccctgcattctgcaagcacccaaaagtgctttccatatcacatcatctggttttataggcatattaagtataaactcctcagcctcatcaagaagacccgaacgacccaataaatcaaccatacacccgtagtgttcaatcctaggctctaaaccatccacactcaccatctgactgaaatatctccttccttcttctaccaacccgccatggctacaagcagtcaaaagattaatgtaggcaacatcactaggtcgaactccagcctgcctcattttacaaaaacagtcaatagcatcacctgcctggccatgtatagcaaacccgttaatcatcgcactccaagtaatcacgttctctctaggtaacctctcaaatacatgaatcgctttctcaatgatcccacatttcgaatacatatcaatcaaagcagagccaagcacatcatcaatcctaattccactatcctctgcatacaaatgcaaccattctcccaactctaaagacccaagccgtgaaatagcaggaagaacactaaccaaagtaacataattcggtctaatatcccctttcttcatctcacgaaaaacctcaacagcatctttgaaaaacccgttcagcgaataacccgatatcatcgtattccacgaaacaacgcttctttgacgcattttatcaaacaacatccgtgcagctttacaatcaccaagtctcatataaccatcaatcataacattccacaaaactatttcaccatctctctttcttctatcagtcatcaccaccatatctttctctataatgttcttataaaacaacacacgagcatctttcataaaaccacacatcacatacattctaacaagattactcatcacaaattcatcaccaccaaatccatacttcaaagccaaaccatgaatctgcttaccttcttgaatcttcccagttttcgcacaagccttaagaacagagggaaacgtaaaccgattcggttcaacaaactcatcactcatcatctcgtagaataatgtgattgcgatcagagctttgtcttcgtcactctcactgaaacctctgattatagtattccaagagaagcaatttcgttgaggcatttgattaaagatcttatgtgcgtagtcaaggtcacggtggtggagatcggaggtagcacagaatcggagaatctctgcggcggcgagagtgtctcgcatttgaccagatttaatgaaaacggcatggatttgagagaggtctcttatagttcgacagttgttgatttgaggaaagagtgaagatggatgactcgccggagaagacgccggcgagttaccgccgggagagaaaagtgtctgtgttgggttcattgagaatcaacaaagattcctacgtgtggctatgtaagacgcataacaagatataataaagattgtggtcgaaaaccgattaaaccgaaccgaataaaccgatttattcagttatcggcgctgaagctgcaaggaggagttaaccgatcggcgaaattattttggaatttcggtctttggatcggttcggttcggcaactctgaaccgttttgttgtcatatctaaagatagttagaactctaaccgaataaccgaataatcttatgcatttgcgcagacaaagagatttgattatttatgagacaagaggaagccaagttgggactaaactaatgcaaagcttagcatgagagtcacgcaagcagaagcttagaagcacattccacaaatccgacctttacactactactattactactacaaataggcttcaacattagagactatgcacttcacctttgcaacaaccatttaagtacatacatactcccaaaatggctgcctctgtggaatactttccctattactcaccaccctcccatcaacatcctctcccttctccagttccaccccctccttcccacatttcccctccaccacctccattttctcctcctcatcacccaccaccaccacatttttctcctcctcatcagccaccgccatcaccatatcctcatcctcatccgccaccaccatcaccatatcctcatccccatcagccaccgcctccacctcacgttcttccaccaccaccaccaacaccagcaccggggcatcatgttatcattgtggttgttatctctcttggaagtttgttttttcttgcattcctcgctgctgctctcttctgctatctcaagaaaagaagaaagtcttctacaaaggctgagattatcgagtttgatgaacacctcaaagtccaagaaaccatagtgcaaggaccccatggcgaacaaacgagagtggtaatgcttgaagaggacattcatttggtagaggatattcacaagactgaaaagcttagccgtcctagtcacctcagttcaactggaagacatgccattgatatttcagatcccaatcatcattttactgagcaaaagtcctaaatcaaaaggctcaaaatgtaaacaatcatatttattcacaccatctaactaataaaaacaatttaaatatggtaccaaatcttgcaatccaaaacttgatattgattccaagataaatgctgtacatgtccgtccaattaatacaacttaatattttactatgatttccactttgcgaatgtaagtaaccttatatatttatgatcattgattccgtttgctggcttttaatgtagattcctagtgtactctgtttggtttctcaataacattattccatttaactcgagtttcagatgtttctattaaataagtaatgaaagcagctctaattctcccaaaattcacaagtatagaaagatagaaagatagaaacagagttattgcatggaagctgaaaatcatacagcatggtggatataaccaatgagacacaaaacaatcacggcatgtgttatagaacaacacttatcatctgtattaacataaagcaaaagttcctatacgacatagtccaaagttacagaccataagcacaccttatgatttgttgtaccctctaaaacacaggatgatgacaagaagcaaatttgcccaaatttactgagggaaaaacgagggcttaacgctctcatatctcaaacaaaaacttctcaaacagtttcatgtgttcagattggagggcaatggcaacggataagctgccatcattagtaggacttggtagcacaaaagacaaaccctcgtatggaattccaccaggtcccataaagataggacgaccccaaccaaagtctgcatcataaataggtaatctaacccagcttgtgattcccaaatttgggcacttgtaggtatgtgcaccgcggacaagggctgacagatcaggctgcatctccaggtagtcaagagctgacctcagatagttatcatccatacgaaccaagaaatcatgaatctgtcctgcagcataccatgttggcttagataacaaatcccctgcaacagccaatggtgttgcagtgaatatcacattcccaaagtaaccaggaggcagctgcggacgtagtctagaccttccatcagttgcaatgtacagtttcgtctcttggtcgtttggaagccctcgcgcctttcccactgatctccacacatgccctgccaacatctcgtatgagctgtagctgacagtgttcccatcctccttggatttcgccttaagagcaacaagctggtctcgtgttaatttgaatatagagacagtggtattctcaggtcctgatttagacggatcaagaggtatcttcatacttggtgcaggctgatattcaacatgatgaaaagcaggctgtggcgggtccctagctcggaggagtgttcgatcaatgaaaggtggaatggttaggtcaagaccacgagccatatcagaccatgtgttgataaaatgaagaccagagaaaccatctgccgcgtgatgttgcatcccaaccccaagtgaagctcccccacatttaaagaaagtcacctatatcatcaaacaatatcattacataactaaaaacagaacatacatcatcaaagaatatcattacagaactaaaaaacagaacaacacaagcattcaataaattaaaaaagggaaagactttaaattaagctgacctgcaaaacgagaagcgggaaagagtgaatgccagcggagtgatcaacttcgggaataagctgacggagattaagggtaggagcaaaatcaccaaaatcatcgataacagaaggagtatcagccacaacgaagagaacaccagcaccgttacaatcgatctcaatacgaccatcatcgtctctcttcaagcgaccagccatagggtaaaaagggacaagggctttggaaagagcttccttcatgacctgagggtcaaagaaattggaagcgccggtgggtctgtagaagtagacactaggggtatggaatctggggatgacaaggtcgacgttggagttccaaagattagtgattggtgtctcggtggcaggccggaccatggtggaatctctgatgttaattttcatatttttaagaaagatcaaacgaacaaacaaattttgttttgagtttgatctgagaaattgtgtgagaagcgaggaggggtagatataagtgggtgtgaacaaaaaaggaaaggtcgtaatccttcacctaccgccccacgaccccgcctactccatctgtcgaccaactctctcagaaggtttatcattggtccatctcatcactcggtcctacttttctatccggggttggtaaacccgttccctctgtcctaaggcccaaataatactaatgggcttaaatagtataaagttcgaatgaagaagaaggaaaaaaaattgacaagttgattgttatagctaccgtacaagttagtcaatcgaatgccaaagtttggcttaacttaactcattaccacgtagcagagcataacaacaaccaccaataacatctaacggcgtaaactcacgtgttaagagaattacgtcagaatccaagaaagtctttttttcagtacaccacaaataaattatgttgaatttatatccgaactatactatattatatgaaaacatacctcaattagtcataaatttcacatttcattttaatttattaactaatggttgttgttgcggatagcttttctttgctttctgttctaaaattatttcttagccattatttgatgatccaacttggtttgaggatctaataaaaattcaatttctttgaagcattcattggcttaatgatccaaaccttttgtcctcccactctctaagaaaataaagcaaaagcaaaactaaaagaaaagcaactagtaccgtgggttggtcaatggtaacccatgctaccaaataccaatcaaagcttaaatgacaatttagtaccttgggttggtcatgatttagagcggaacaaatataccatacatcaaacgaggatatacagagaaaattcatggaagtatggaatttagaggacaatttctcttctgggctacaacggaccggcccattcgctcatttacccagaggtatcgagtttgtggacttttgatgccgctagagactattggcatcggattgaaaaaaatgtttacttcgttgttaacaattttctgaatgcaatattttccttgtcatgaatatttaaacttgttattactttcttttagcttaggtgtggacaattatggagtttacttcaaacgaggaagaatcttaaacgctcggttcaggtctcgaaaacaaaccaactcacaatcctgacttaattgaggaaaacaatgcaaaaccacatgcatgcttccatatttctatcataatcttataagaaaaaacactactaagtgaaatgattctgtatatatataaccaatgccttttgttttgtgatattttatgtatatataactattgacttttgtcatctatggatagtgtctcgggctcttggcaaacatatttcaaagaaaagttaatgactgtaattaattaatctgaagctagaaacagaaccccgaggtaaaagaaaaagacagagcacatgaagtttagtacttttatatatttaatatatcattctttcttattgcttatctctaaagcaaaaacttccctaaaccctaagccaaaggactcagatcgatgcagaaccaagaaggcttgttttggatttgagagccaaatgcaaagaaaaaaactcttatgtctttgcaaatgccgattccaagaaaaaaagccttaactgtttctcatttttccattacattgtctctgtttttagctttcttcatctcctcgacctctgcatcaaccaatgaagtctcagctttgatttcttggcttcacagctcgaactcgccgccaccgtcagtcttctccggctggaatccttctgattctgacccatgtcaatggccttacattacttgttcctcctcagacaacaaactcgttacagagatcaatgtcgtctctgttcagttagctttacctttccctcctaacatttcttcgtttacttcacttcagaaactcgttatctccaacactaatctcaccggagctatatcttctgagatcggagattgttcggagcttatagttatcgatttaagctcaaatagtcttgttggtgaaataccttcgagtctagggaagctcaagaatcttcaagaactttgtttaaactccaatggcctcacaggaaagatcccaccggaactcggcgactgcgttagcctcaagaatcttgagattttcgataactacttatccgagaatctcccgttggagctcggaaagatctcgactcttgagagcataagagccggaggaaactcagagctttcagggaagatcccggaggagatcggaaactgtaggaatctcaaggtcttagggttagcagcaacgaaaatatccggttctttacctgtttcgttgggtcaactaagcaagctccagtctttatctgtctattctacaatgctctcaggtgagatccctaaagagcttggaaactgctctgaacttatcaatctgtttctatacgacaatgacttgtccggcacgcttccaaaagaactaggaaagcttcaaaacctagagaagatgcttctatggcagaataatctccacggacctatccctgaggagattggattcatgaaaagcttaaacgccattgatctctctatgaactatttctcaggaaccatccctaaatcgttcggtaacttgtcgaatctccaagagcttatgcttagcagcaacaacatcaccgggtcaataccttcgattctaagtaactgcacaaagcttgttcagttccagattgacgccaatcagatttcaggtttgattccaccagagattggattgcttaaggagctcaacatcttcttgggatggcagaataagctagaagggaatattccggacgagttagctggttgtcagaatcttcaagctcttgacttgtcacagaattatctcaccggatcattacctgcaggtttgtttcagcttcgtaatctgactaagctcttgcttatatctaatgccatctccggtgttatcccactggagatcgggaactgcacttcgcttgtcagattaaggcttgtcaataacagaatcaccggagaaatccctaaaggtattggatttcttcagaaccttagcttcctcgacttgtctgagaacaatctctccggtccagttcctttggagataagtaattgtagacaactccagatgcttaacttgagcaacaacactcttcaaggttatcttcctctgtctttatcatcgttaacaaagcttcaagtacttgatgtctcttccaatgacttgactggcaagatacctgatagtctaggtcatctcatttcactcaaccggctcattctaagtaagaattctttcaatggagaaatcccttcgtctctcggtcactgcacgaatcttcagcttcttgatctcagcagtaataacatctctggaactataccggaggagctttttgacatccaagatctagacattgcgttaaacttgagctggaattcattagatggctttatcccggaaaggatttccgcgcttaaccgattatccgtgctcgatatttcgcataacatgctttcaggcgacctttctgcgctgtccggtctagaaaacttggtttctctgaacatctctcataacagattctcaggttatcttccagatagtaaagtgtttagacagctgataggagcagagatggaaggaaacaatggactctgttccaaaggtttcaggtcttgctttgtaagtaacagttcacagttaactacacagcgtggtgtgcactcacatagactcaggatagccattggattgctaatcagcgtgacagcggttctagcggtattaggcgtgttggcggttatacgagctaaacaaatgattcgagatgataacgattcagagactggagaaaatctatggacatggcaattcacaccttttcagaaactcaacttcacagtcgaacatgtactcaagtgtttggtagaaggtaatgttatagggaaaggttgctccgggatagtgtacaaagctgaaatgcctaacagagaagtcatcgcggtgaaaaagctctggccagtgacagtacctaatctgaatgagaaaactaagtcatcaggagttcgagactcattctcagctgaagtaaaaacacttggatcgatcagacacaagaacattgtacgcttcttgggatgttgttggaacaagaacactagacttcttatgtatgattatatgtcaaatgggagtttgggaagtttgcttcacgaaaggagcggtgtatgtagcttaggatgggaagtgaggtacaagattatacttggtgcagctcagggtttggcttacttgcaccatgactgtgttcctcccattgttcatagagacatcaaggcaaataatattctgattggccctgattttgaaccttacattggagatttcggactcgctaagcttgttgatgatggcgactttgctcgttcttccaacaccattgctggttcctatggttacatagctccaggtacttcccaaatttctgttttgctgctaattagttaacttgatacatcataagttactagtagtcttagcctagtaatggtagaaattcaggtttatagtttggttttggtttttggcattttgaaaagaatagtattttggttcagttgattttcgatttggtttaaaattttagaaaaaaaatggtagaagaaataatttttgattaatattatatcatctactgtatacgatttaaaaaaaaaattgatttggtttggtctcgatattttgcttgtagcttggttcaatatttttactatatatatgattcatgactttcatactaatcaatatttgttcggtttcgttttgattagtctgaaagtgaatcatatagttaaaatattgaccaatctatcatatacttacacgctacaagattttcgatgtaattttggtgtaagcattttggtttttatatgttcatccttagtaactaacaacaaatatcaattgggaagcataacgttatatattcccataaggctataacactataattatgcagaatacggatactcaatgaagataacagagaaaagcgacgtgtacagctatggagtcgtagtgctcgaggtactaacgggtaagcaaccaatcgatccaacgataccagatggactccacatagtggactgggtcaagaaaatcagagacatacaagtaatcgaccaaggactacaagcaagaccagagtcagaggttgaagagatgatgcaaacgctaggagtcgcgcttttatgcattaatccaatacccgaagacaggcctacaatgaaagatgtggctgctatgcttagtgagatatgtcaagagagagaggaatcgatgaaagttgatggttgctcgggaagttgtaacaatggaagagaacgtggcaaagatgattcgacttcatcggttatgcaacaaacggctaagtatttgagaagtagtagcacgagtttctctgcgtcttctttgctttactcttcttcttcttctgctacttctaatgttagaccaaatcttaaataaatgcatgggtaattatgtttttaagtgaacaagtttctatgtctaaagtttttgttttatctatatatgacgttgagatgaactcggtgtttcaaaccaagaaaaattaacggagactaatctcgtcttaccttttacattttcttccgtcaaggcgtcaagttgatttttttttgaaaatcaaataaagaaaaaactagtgaaaacagatatgaggaggtcataactcataactgtgactcacgagataaatcatgtatcgtggctgacggtcacggaaccttttgctttgtacccattttttcgaggtttgtccaggaaggcggataattagtgtaccttcactatatactctataacttaataattttatatcaattagatacaaatgtttaattaaaaaataaaatagcaaacccttaaccaagaccagtgtgtatattaagtaacgaaataaaattgaacagaaattgttgaccagataaataataagtatagattcatgttttagtttttttttaacttcaattttcagattttttttgtagtctaaagtttggttgatgaaaataaaataaaataaaagaaaaatctatatttacggaaatatatctcttacaaataattctttgcaaatgtggaagacctattatacatatagacatatatattaacacaatcattatgagtaagtatcttaatattataaattgatgaaaatgttaaaaaggttataaatctatatatatttgtctatttaaaaatggttgaaaatcttcttttcaaaaaatcaataattgtttttatgaaacagtgaagcttaatctttaagaagtccctcaaacaatttttaccataaaataagatttcaaattataacatacctaatagttttatctatatattctaactatccatgttcctatggtataataatatcttctaacattatttttgaaacttgtttctctctagttttttttttttctcaaagcgagatccaagtttatttcaagagttaccaacataaacaatggcaacaaataaatttttatctattttgttgctttcgttgatggcgtttgctgctattctgctgccaatgatttcaggtaacacatctattatctattaaaatttggtttgtaatgttatgataaataattctactttaaatatgaaagttaccgtgtgtttctatgaaaaacaaaacctaacctaattttttgttgaaggttttaattagctcatgggtgttaaacataaactatcaaaaaatataaccaaaaaaataaagtttttaagttgtatatttacttttatgtgaaaatatttctactccactacgacaaaatgtcacttttgtaggttttttgtgaaggtcacaaattttagattacgagtgcaattagagtaacacaaatatttgattttgaactaaacagtcgtggttttaaaaatagtgttcaaaatcagaagaagaaaattgcactatgtagtaagaaaatagtcgtttattgaaattgatcaatttttattttagagtcgtttaatttgtttgtttataaactaaacaggacaaatcataacatgtttaccgggcgaatgtacaaacccatcggaatgcaatgcagcttgcaaatcaaatggatacaaaggaggggcttgtgtaagcatgagcataggctcaacaaccggtgcttgttgctgtaaacctaatttcaaatctcaagattctttcaaatctaatgatatcattattaataataattagtacatcattagatatatgtattttgatatgaataaaaatatattcaaatatgtttcgatattgaaccatctataatatggataatcattcgtaagttatagtacgatccaaacatttgatcgtatatattaataaagcatacgaatgctgaaatttatgttaactatactcatagaaatttatttatatctgccataccaatacaatttaaaagatttttcaattaaatgagagataaataatttattttgattatttttttgtttctgttttgtcaacaatatgtaatatgccgattctaaaaaaaaaatcatactctatatcatatattgtctaaccctctagttagttcaaacaacataagtaagataacaagaattaaaaataaatttaaatgattttgatatcatatattgaattaaaatttcaaattctatcaaaattcatgattaaattaacacatccaaatgccgaaaaaaaaaaaaaaaaaaattaacacatccaaaaattgtcacaaatcgtactaaaggcccagtaagtctttttgtcaataagtccattaagcccaacaaacctcttcttctctttcgttttatgacatcaatccatttgaagcaaacaaatcagacgtaaccgaacaaaaaaaaaaagttggtttgatcgatcgttaaaacctaagaaatggatccaaaatcgccggaatttatcattgatcagccgcttaaaatcttaggatttgtattcgatgagctctccgccaccagagtctccggccacctcaccctaactgaaaaatgttgccagccgttcaaagtcttgcacggcggcgtatcggctctgatcgctgaggcactcgccagtctcggcgccggaatcgcctctggttttaaacgcgtcgctggaatccatctctctattcaccacctccgtcctgctgctctcggcgaaattgtcttcgccgaatcttttccagtctcagtcggcaaaaatattcaggtaacctatacataacactgaccaatacacatatatacgcagctatctttagactttaatgtatataaaattatattaactagaaaagtttttagtaatattaaattttaatattgtgtcaaagtaatgtaaaaataaattttttttaaatgtaaaaaaaaaaattaatattttgttgaagaagttaaatataattctgcaatttgagagataacataagataaattttcacgtattagtaagtaaaagtgacaagttatgttttataaccaggtgatttttaaaaaatgaaatttgttttgatgcaatatcgtgtgaaaagtaagaaaactaatatatgcaataccatatttaaattgtgaaccttattaatttcacctaaaatgaaaattggaaaactttttcatgtatttgatagacttgtgagtttgaattgtataaatttccggcaagcaaaagcagctcgtgtaccaagttgtcggaaactttaattttgttagcatgcattggactaaaccaacgcaaatattttattttatttatcgtagactgaagacctaaagagtaaaatgaatgtgaaagtgacacgttgtgtggagtattttgtatctaactaggtgtgggaggtccggttatggaaagctaagaaaaccgagacaccggacaacaaaataatggtatcaacatcacgggttactctcttctgcggtttacctataccggaccatgttaaagatgctccagacgagctgaagaaagttatatccaaattataaattcaaattgtatctatctcattttgttaggaataagaacaattttagtttggttttattgtacgaaccaaacgttttaataaattgttgtaccaaacatgagatattataaggttataaaaattgacaagttattgtgggtttagtttgtagatcattttgaaatatagtattaatagactattttgttgaaacgtccaaatcgtatagatggggtaacaaaactaaactcctttatatgattcttttgcataaaattctgtctttgtaataactgaatcatacatacttttttagtttgatacgcataatataattaccacaactatgtagtgcatttaagatatctttcttcatattataaatgtgtatcaataccatttaaatcttcgtatacaaagaaaaaaaacaagatggatattagtttttcgatggagatattatttggttgagttctttcttcttgagacaacaacatccagtgtggagtctaaatgttccacaataccatccatttgtatacccgtggcttaagcaaatctgatcacatacgcttgtacactcggaccgataacacatggcgtcatgaacgtcaatagcgtttattttagctgtaaaagatatcataaaaatctattatatatgatagatcatcatttatgtttatatttagagagctctacattgagattcgatcacgatcaaacggtaaggttacttcacgataaactaacgaagatagtgtattttgctgaatgatgtaaattatattaaaaaaaaatataaggtatatatataaacaaacgaaggtaatatggtttagatcaagaaaataccctaatagaaatcaaaaagtttgtgtatatgttttatgaatttgtaaattgacttaccggccatcgcaaacaagagaacaattgttatggcagtcagtatatgtgaatgtttctggttctgcatttttttgttttgaggtgtcactagctaatagctattactttgttttctctttgtttttagatgtatccattgagattaaagtgctcttatataggggtttggttttcgcagataaaattaatcaatttagctggattttattctatacccacaaaataaatttataaaagctaagatataattttgatatgatggttcatgaaagtgtcaactttggttagatttaaacctgcataacgcattatgaaattgactatatatatattaagaaagagataattctcatttaatttttagtaaaataattactcaattttatattataccagaaacaaagtgggttcaaaaattattaaggctatatcatatgtaaatacaattaagaaacatttatgtaagaaaattagaaactgaaatttcatatcaagaattaacaaagaaaacattaataaaatttcttgttaccttaaatataccattttatttaaatgaacattaaatcatagtattttagatttaagaaaaaagaactacacagaaatttctttaataaatctaatatatatgaaaataaatagaaagcactactgaaagaagatccatataaattaaagatagtttggtcaatgccaatcatcattttgaaccaaatccacatttaaggaaaattgatgttattctttaacccgaaaacatgttcttgtctttgcacatgtgtctcgccctattttttatttcttcattcaacaagtcaaaatgaatctattttactacatgatctctataaacgaatgtcataaagattttatggccttcaaacttggtctcaacatcgatcatgtatatgattatctgattcatccatatagaagagggctaacccgccccttgtaccttgctttggccttaaaaaggttttcaagaatttactttctttcttatttgattttaactttgtaaatgtcacatttttccgttaattaattctttcgctgagtgacaaatatgttaatatgacatttatcatcaagatatatattttatcatatttttgatacatgactatcaaacaaacgtcacactattggtcagagattattcgacataatccataagaagttgtaaatatatcatcaagtgtgaataaatgtatataaatattattaaaaaaaaaaattagtagttgctttttcgcgattcgtgcgaatagattctgatgccaaatttggatattattaagagcacatgtttctccttgtgtcgtgtcttttatttaagagagaatcatcatctctcactctcatcttctagaagttaaaacatcacgccatcttccgaattcaaacgccgatgttctgtcgttttctgtctcacatattggaacgagcgtaaagatgcctaatttctcagttaacgttccccaactctcatctctttacagtacaaaaacgcccaaagtgagaatgaatctatgtgccgatcaggtgttcgataaaaagcttctgtggagagatatgtcaacgaagatgaaatttccttctttttctgctgcggaattacctgatttgaggaaaagtaacaagaggaggggatctcttaggatgatcaagtgcagagccgccggagctgacggtggacgcgtggctgttggggatgatgtgttttcggttactacttcttctaagtatgaagttgactatctgggtcaaagtactaagggagatttgaatctcaagcttgaccctcttcagtcatttggtatatatacaatcttcctttttgttttgttagttttcgaaattcagattggttttagtgaaatgtgggataaagttttggtctttggttagggaacttgattttggttgatgtttgtttaattgagataaataagagctaaaaagatcgaacctttgttgtgaatgtcacgttgtatgagcaaaatgtaactttggtgtatctatgtaggagatgggcaggctacattggagggtcccattgaggaggtagcgagaacagaggctcaagcggctgaaaatttgattagagagttgggtatccaagttcgttatctaatccttacaactttgtgttatgtatttgaagtttgagtatccctttgttgcgaaaacatgaatgtattgagttatttgtgtctggttttatatggacttttctttttcttttgtgtcacattctcatgcctggtattgcagggccctttctctgcacagcactctcctcggggtatattttgtagtcgtacattgaatcttcggtccattagtgcaattggatatgatatggattacactttgatgcactacaatgtcatggtgagttcttcctttctcagacataagtaggaaacatttatgcacccatatttgatgctaatttatggtcttgttcaggcttgggaaggaaaggcttatgactattgcatggaaaatctaaagagcatgggtttccctgttgatggacttgcttttgatccggaactggtgatatgtttattttcttgtgaaagttgaaaggttccacattgtagtaccctatctagtttttagagtactcaaactatgttttctcttattataggttatcaggggtctcatgattgacaaagagaaaggtaatttagttaaggccgatagatttgggtatgtgaagagagccatgcacggtacaaagatgttatcaaataaagctgtcaggtatatttgacttttcaacaccattggtaatgtgaagaaaaaagagagttgcaaagtcattgttctgttttgaaggaagtctcattctcttattgtctttgtatggatgaaagtgagatctatggaagggagttagttgacctgcggaaccagagtcgatgggagtttctcaatacatttttttcagtttcagaggctctggcttatgcacaggtacgttcttttattacaagaaatggtagctgaacaatttgcagttgattttggacataatttactttatttatttatttgtaactcatataattttcacattcgttttctcaactgatgactcttcaccccaatgaactttcttttttacaaaattttccgcacggcttctgctaagcaatgaaagttcaaatcatttcagatggttgatagattggatgatggatttatttcggcagatcttggcactcttgattataaaggactgtataaggttgtgtttcatagaacctaaatttcattgaactgaaatctttgcatatatattttttaatctaatcattttttccaggctgttgcaaaagctctcttcagagcacatgttgaaggacaacttaaggttgatagtttgtccattccataatcattttcttaaatatcagttttctccggtccctcttgaataatagttactttgcagagtgagataatgtccaagccggaactatttgtcgagccagacccagaactacctttagctcttttagatcaaaaggaggtaatggttcagtctttacacaatatatctaactatgatggtttcagttgttaatattgtcatgttcgttcataggctggtaagaagctcttgcttatcacaaactcggattatcactacacagacaaaatgatgaagcattcatttaacaaattccttcccaatgacatggactggcgagatctttttgacatggtgagcaaacgtaaatttgtttctgcattttgattgtaaatctgttgtttttcagagagtagtttgcattagactttactgtttttgaattcatgtttccacataggtgatagtttctgcgaggaaaccagagttcttccagatgtcgcaccctctatatgaggttgtgactggagagggtttgatgcgtccatgcttcaaggctgaaacaggtaatttctcattgtttctactgaatttaagctgataactttacggtggagaaagctaaaatttttttcctctcactgtttgtctcctataggaggtttgtactcaggaggaagtgctcaaatgatagagagttcactcaacgttcatggagatgagattttgtatgttggtgaccacatctacactgatgtcagcgtatccaaagtccatctcaggtggcgaactgcgctgatttgccgtgaactggaagaagaggtttggataaattatactctgaactatatcaatagatgacagaacttgaagggttttcgttcgttgaagtaacataaaaaccctgattttctcttgtttctttgcagtatatggctctaattggcagtcgtggtcaccgagaagagctaatagagcttataaatcaaaaagaggttgttggggatctctttaaccaacttcggcttgctcttcaaagacgaagcaaaggccgtcctgctcaggtttgtttatctccttacaagctctagagtctatcttctctccctgtgtggaacacaatgtgtatgaacagataaatagatagagatttgtgacggaaattgcttataaagatatccgtttctcttttccttctagactctcgctgctaccaacttggatgatcaagaactgacagagaccatgcaaaagcttcttattgtaatgcaaagactagatgacaagattggtctaatgctggaaacagatggcgagctctttaacaaaaggtaaaaagaaaaagacaaacaaatgtagtaagattactcaagattcacagaaagggatatgtctgagccataattcttgggctgttttgcaggtggggcttcctctcacgcgcgggtttgtgggataaaagccacttgatgagacaaatcgaaaagtatttatgcctcttctctgcatttccgagtaactcataagctcaaaccaagctcacatttaaactacacttactttcttcaaaattggtttcaggtatgcggatatatacacatcaagagtctccaacttcctcaactacacacccttcatgtatttccgctcacaagagcaggtaaaaagcttaaatcagattatcagtatagatacaaacgaaatctgaggcagattctaattaaactcactcatgttttttctctcctctgcagtcactggctcacgattctccgcttccagatgcgggtatagaaaactagcggttgtgaccaaagttgaggcaacttgtgtgttgtaatatttttagatgaaaaaactgtggatagaagaaatgtaacaatagaaattcttaagctcaaaagtctactttatgtataaaatgtgtattcttattctctgaattgaagttaaagctggccttggttggtatgttgctgttgtttttatttactgtcttatcttttttaagctttttcaggctgacatcagaggcagattgtgcaaatgactacttttagagaaacattatactttgagattttgtgaattctgatgactgttatatcaaccactagacactagacagtgcagacttctatataaacaatcgattcgttgtgagcacacaattcattacttcaattgcaagagaattaataagaaatctctcaatctctttattattcagtatctcgatctttcgcagataacaaatttgtgatattactatacgaaacatctaagacctatgatgcagaaaacgcaccgttttccttacgtcaaagtttgaaacatacggactcttctctgtcgttcttattcgctcttctggattttgtttctccaagcaaaaaaaactccgactttcaacgaaaactcagtgcctcgtccctctctttcaaaaaggtactctttttttatcacccagcttagtttttagggttcaattttggatcttagggttccgtaattttaagattctcgaaacatctttttgccttgcgttagctgaggattagaatcccaatttgagttggatacctaaaagtcagattcttttttgttgtaaatttgaaggtttttggttatggcgacgaagaaagtgatagctatatgtcagtcaggaggagagtttgtaactaataaagatggctcattagcttattctggtggtgatgcttatgccatagacatcgatcaggacacttgtatgagcgatttcaaatccgaattagctgaaaatttcgggtttagttgggagaatatgacactcaagtacttcctccctggaaacaagaaaaccttaattactatctctaaggataaagatttccaacgcatggttagcttttccgcagacgcaccaaatgtcgaaatcttcgtcttacccgaagaagccgaagcaaggaatgtctccaacatgccagctagtaggtgtgtgttctagttctaagacctaacggtttatcgacattgtttatgattgtaatgactgatgtgtggatttctgtatttgacagatcaagtaggacaactgcatcagaagcagtggtacctgtagtgtctgcaggagatattgttgtgggagatgatatgatagcaaatgattttcagattgaaatgggtataatgcctgaagaaagcagccctttgccgtgtaattttgttttgactgatgagaaacaacatataaaagctgcacagcagtgggaaaacgctattacgggtgttgatcaaaggttcaatagctttactgagttccgagatgcgttgcacaagtactcgatcgcacatgggtttacttacaagtacaagaagaacgatagccatcgtgtttcagtcaaatgcaaagctcaaggttgtccatggcgtatcactgcatcgaggctttcgactacgcagctgatttgcattaagaaaatgaatacgaggcacacgtgtgagagagcggttgtgaaagctggttaccgtgcaagtagaggttgggttggaagtatcataaaggagaagttgaaagcttttccagattacaaaccgaaggatattgcagaggatatcaaaagagagtatgggattcaactgaattactcgcaggcatggagagctaaagagattgctagagagcagcttcaaggttcttataaaaaggcatatagtcaacttccttctttctgcaagaagatcagggagacaaatcctggaagtattgccattttcatgacaaaagaagattcgagtttccatcggcttttcatatcgttctatgcatcaatatctgggtttagacaaggttgtcgtcctctccttttccttgacaccgccgacttaaactctaagtaccaaggggttatgcttgttgctacagctcctgatgccgaagatggaatatttccagtagcttttgcagttgtggatgctgagacagaagataactgggtttggtttttggagcacctcaaattggcactggccgatccccggacaatcacatttgttgcagattttcaaaacggtctgaagactgcattacctctggtatttgaaaagcaacaccatcatgcctattgtctgcgccacctcgctgagaaattaaacatggacttgcaggctcagttttctcatgaagcaagacggtttatactcaatgatttctatgctgctgcttatgcgacacaacctgatgcatattaccgttccttggaaaatataaaaagcatttcccctgatgcttatacttgggttatcgaaagtgagcctctccattgggcaaatgctttgtttgaaggagagagatataaccacatgaactccatttttgggctagatttctacagctgggtttctgaagcacatgagttgcccataactcaaatgatagacgaacttcgagcaaagttgatgcaatcaatatatacccatcaggtacaatcccgggaatggattgtttcaacgctaacaccaaccaacgaagagaagctacagaaagaaatagaacttgcaaggtcacttcaggtctcagcgcctcacaatagcttattcgaggttcatggtgaaaccatcaacttagttgacatcaatcagtgtgattgcgactgtaaggtatggagactaacgggtttaccgtgtagccacgcagttgcagtggttgaatgcatagggaaaagcccttatgaatactgctccagatactttacctcagagagttaccgtttaacgtatgctgagtccattaaccctgtccctaacacaacaatgacgatgatgattttggaggagccgcccgttgaaggggttgtttcggttactccaccgcccacaagactaacaccaccagggaggccaaagagtaagcaggtggaaccgctggacatgttcaagcgtcagctccagtgtagcaactgcaagggtttaggacacaacaagaagacctgcaaagctgtatcttaagtattagggagagagagagaaatagagaggagagacatggttaggacaaatttgtagttatatagctgactttgcccaacattttggttttggttcttctgtttgttgggtttttgagaatgatcttaaagggtaaaaatctccttcaggttgaaacccaaacgtgaagagagcaaagcggctcagaatctctgttcctaaatggcattaaacttgatgaaagattttacataaatttttttgtatgtaatttgatttttaacaaaaaatttcaatgaatcttttcaattacatatattttgtatttcgagctttacaaaatccaccacacttgttaaaaagcttatgcagttgccgacaacactttgacgtttacattccaaaaatgatcgatgttcatatgagcctataataaatgctagagacagtaagatataagtatcaaaagagtaaaatctctaccaagaaattgactccaaccaatcggaggtaaactcataggccacaaaggttacagcaccagcaggagcagctttcacagtcgatggcacaatgcctttgtacagaccatgccacccttctgatatcataatctgtctaagaccgtctaacatgtttctgtatgcacgtcgctccactcgggctccatatcttggatgtctctgtaaaccttcaatctgcaacaaaagaaactttcaaaatctatctggcatttctattatttcatgtttgaaggcaattgcattttcattgcgttggagatccactggcaagtttgaaaagcttttatatttaagaaatgtttcacacaaattggagttttctttctataggtacggtgacagaacaagtggggtacccggaatcagtaagtagactcagcaagcacatatcatagggcagtaaatgtgaaagtctagtctaagatacataaggatagacccaaaacatgaaaccacatgaatacgataagtcattgcgctagttcagtgtaggagcattgtaattaccctagctggtttgtagtagatagtagatgtgttgacaactcagcaactatagttgagtaagttagcaagagagctaagtggctaaaaggaagtttgggatgtgtaattaggtcgagtagagattctcattaatcaagtctctctatgatgtgtagttcttgctgaagtgaataaataaggagtttaatagtttggatcctatcacattatcttcccagagaatccattgggtaaagattaactgacctggaatcgttttttgaccacatcaaggggatggcagacgagcttggcgctagtgcccgccccaagcccacaaatgaaaagctggaagctagaaaggttggtgtccacattgatcgggattttggaggataatttgtatcgattccagtcctgtttaaaaataatcaattgagttgattatcatatgaacattgatcacacataaactatatattcctatgctcttaccatcatccaacgcttaaacatatcatatgtgccaaattgcaggccagcgtaaggcacaatctcaacaagagttggtgttaatccattatacaatcctcttatacctcgagactgaataatatcgacaaaagcagacctcattgttggatacacctgttgacagtcatcagtcagtcatctatatgtcacttaagcatgaataaggaagaaaaacaagaaaatccccagtacatggaatttaaattatattacaggttcataagtcacgcaactaaccttaggctccccttgtgaggccaatattgtccttaaaagatcaaaaggataagatcctagagtagcagcacatcctgctaacgctccactgacgaaggatagataagggctcaaatgtatatgatcctctgcattgccataagatcacaaccagctaataagtaaggaaccacattgatctctaaattatacgagtcaattccaaaagctattcaaagaaatacacaattaacaaacagaaatgatacccctaagatagccaccagactacaacaaaaaatagcactggcaatctaccaaataccatatctagagagaccgcaatgttactcagtagactaaattacctgttttagtagaaccagatgcaaaagatttcagcttatgtagtactgtaaactgaattgaagtatacggcatgaccatgagcaaagctggcacattaccccgccaaaacccctaaagaaaacaagtatcaaacatcaaaacagagaacaagacctcataaaaactaatgccacaaacctgaaactactaacatactataaacaaaaaagaaatggtttcagaaaacggaaatgttcaagagacggacccgaaaaccttcttctctaaatatatctttagtcgcctgtaccattccagtatacttagaagctcctgacaagtttccccgaaccaaaccccatgaagtcgtcggttctagctgaacctgcaatcacatataacattcttcaaccatctctaaatatataaaagctaaccattttctaacaatgataattctcatctaaaacctccacaatacaatccaaagcaacaacaacaaactcaaatattctttagctaaaccaaataaaaatctaaactttatcactcagaggatagaaaaaaaaagccaaacctgaaatctaatcttaatgacatcaagaggagaagttacagaacgagaaacaccaccagagatagctccggcagaagcatcaatcagagcacgtttaatctgtcccggctcatcatcaaccgtcgccgtcgtaggaatcatatttttctagggtttttggtctctataagctaaaatcaattaaaaaagtttccaaaaccctatcatcaatataataaacctcaaacaaaataaggaaagaaactaaattcaaggcaacaaataaaatcaaaaacgaaaactgaaatcttttttaccagataaagcgagaaacgaaaagggtcgacattgatggagtttccggggaaaaagcaaggaactttgagatgacccttaaacgtttgccgcggatttgagagttgggtggagattgaaaatgatttgactcggaaaaagattataaaaaaaaaaagaagctgagagattctttctccgtcaacgttcgtgttctctccgatagagagattaaagctggctttcttacaaaatttgccctttttaggactcttgtcggttcggtttaatgaagtatcaattcgtcttaaagtaattaaattgtttcaaaggggttttatggttactcttaaaccttcttcctttacgtttgttggatggatttagtcatttactaatttgaagatcaacagagacccttacaaaaagaaaattactccttatgttccaatatattagatgttttctgctttcttcttgtttcattttattatattaagaaaaaacattatgtataatttatgcatatttaatatgttgtgattatttctattctgcaatcttttttcttttgattaaacttttttaaataaaggtagataagatttttttagagaaatacactaaaatacatttatgtaaaaataataaaatagtttcttattttttttaatgattttagctaaaacattttcttatgtaaaatatgattttcatagttggtaactcaagtgtttgcaacacatcgacatgtgtcaaatctaattttgttaatatttaaaacaaaaaatatagaaaatttttaaccctatggaagaatgaaaatacatacaaaaatcacaaaaagttatatttctattcataaatttttaagtaataagatttagaataagttaatgggatgtaacattgctaagagttagaatactttctctttatttttggggtaaagttgtagaataattaattagttacaaaaaaaagtttttaattttttgaagtaaagttgtagactaattaattatttacaaaattttttttattttttttggagtaagttgtagaataattaattagtcacaaaaataagtttttaatttttggagtaaagttgttgaataattaattagctaaaaagatagtatcgttttgtaatttttatatttatctctaaatattggtccaacaaggcccaatttttgattgaatttgtctcaatggcggattcccaaaggttgtccaccgcttccggcgtcaaggacggccaaccaccatggaagaagaagaagctgtcgaacgatacgacttcgaatccgtcacttccatatgatgtaatactgatcatcttagcccgcgtctcgagatcgtattacacaaatctctccttagtctccaaaagcttccgatcaatccttacttcaccggagctttacaaaacccgaaccctcttaggcaaaaccgagaattttctctatgtttgcttacgcttccctgatgaagctaatcctcgctggttcactctctacaggaaacctaatcaaaccctaaccgatcacaccactaagaagaagaagaagaagaagaagaaggaggagaagtcaagtgttaatctgttggctccaatctcaattctcaattctcatcctgtggaatggtcagctatcatatctgttgatcattatctctacgccattagtgcagacatcgaaaaggctccgtactctaacgttccttacctagattgtcgaactcacacttggaatgaagctccaagaatgagattggctcacactaatagtgaatttgaaggaatagtgtatttaccaggaagctttgaaagtccagattctttgaactgtgttgaagtgtacaacacaatgactcagacttggaaaccggtgccccccgaaaaacggatgttcaaattggaaaatttggaaaaaaagatttactacaagagctttcatttagactctagggctgggaaaggtctatctttgagctataaatcgaagcatttgacatgtggattggtagtattggatacggtggattcatatcttcgctcttcttgtatgatagagaatatagcctatttttatcgtaaaggaaattttatttggagaggacttgacggtaagatactggtttacgggaaaatagagggtttagaagggctacctaagttttctagatattctagtgttcaattggcggaatatggcgggaagctggtggttttgtgggacaagtatgtacctgcgagtgggtataaggagaagatgatttggtgtgcagagatttcgctcgaaaaacgtaacggtaaagagatttgggggaacgttgagtggtttgatgctgtgcttacagtccctaagtcttacaaaatcttgtgtgctactgctgctactctttgattcgatgactcgggaacttgaatttgtcaagctatttattgtttattttcttctcagtcgaacatagtcattacaattcagttaactcattttccattgatattactccttaatttttttcatagttcaaatcaagttagatttcctacaaatgcacacaaaacgaaattgttgctttacttgcttaagtgattcaatgaataataggttacagaatatgattcaaaatccactattgttttaaggcccattaagaatcaatgaaaatgattttttttatcatttctataaggcccatgcgtttgtgttcactagcagtgaagtgagagtgtcaaatccctaaattcctccctccctgcgtttgtgttatctgcaagtcggagaagaagcagaagaaatcgactaatctctcgccaatgtcgtctccagagaagaagaggaagaagaatcagaaatcgtccccaaatccgtcacttccagaagatttgatagtgagcatcttagcccgcgtctcgagatcgtattacacaaatctctccgtagtctcaaaaaccttccgatcaatccttacttcaccggagctttacaaaacccgaaccctcttaggcaaacccgagacttttctctatgtctgcctacgcttccctgatgaagctaatcctcgttggttgattctctaccggaagcctaatcaaaccctaactaagaagaagaagaagaaagaggattcaagtgttcatcttttggctccaattccaattctcaattctccaactgtggaatggtcaagtctagtcgctgttggttcttatctgtacgccattaccgcagacatcaaagattctccatgctctaacgtttggtaccttgactgtcgaacgcacacttggcttgattctccaagattgcgactggctcacatcaatagtgactttaatgggaggacgtatttcccaggaagctctgaaaagccagattctttgaactgtgttgaagtgtacaacacaaatactcagacttggaatcccgtgcctccccaaaaacgaaaactcaaattcggaaatatggaaggaaagatttacatacccccttgtcaagagaatcataggaaggctgtggctctaaacccaaaggttttgacatgggaagcggtaggattgggtacgaatttggataggggttctttttgtatgatagggaacatagcctattgttatgaccctagtgggaagtttagatggatgaattgtaacactgcggaaggagactggagcagattagagggtttagaagggctacctaagtttgctagatatagtactgttaaattagcggaatatggcgggaagctggttgttttgtgggacaagtatgtagctgcaagtgggtataaggagaagatgatttggtgtgcagagatttcgcttgaaaagcgcaacagtgaagagatttgggggaaggtcgagtggtttgatgcggttcttacagtccctaagtcttataaattcgtctgtgctaaatctgctactgtttgattgatgactcaggacataggtacgaagcttcttttatttagtatgtcacagttgaaagaatgtcttgtatctttttcggaatgcagttgtcattgttttcgccttacaaacacctgcactcacttgcttgtagatgattaagcttattttgtgactgtctctttgataattcctttgatgccaaactctttctcctactgttttttgctctgaatgttgtgttgcaaaatgcctatatttatgtgactatgatgaatgcttctctcatgcttttagcggatattgtttcacttctaaacatatgcactcacttgtagactgtttaagcttactttgtctatgagaatacttttgtttgtcttgcatagaaaagtactgttatctttacatttcacgataagagctagaacaagatacacagttagtgcttgttttgttgtttaaactgaggcttatgttcatgtcttgtacttgtagccaacctaacctacaaagaaattgctactgtaacaatttgaggatcttgtgtgaaaatacgggtggacttgtcaagccactctttcttttcttctcaatcgaacactattattatccaattatatactctctattttttatgattcaattcaagttagattccattatgcacagaaaattaaattgatcatatgtccaaagctctactgtcatttttgaattttgttgaaattttgaagggttaacttattttgtgccattgaccactatgatgcatttgaaagactttttttttgttgttgaacatacgtgattactagcttcataggaagaaataagtgtaacaaaatatatatatttgacgaatttttggtcctctactggtaattttgagttgtgttgtagaaatttgtggtgactcaaaactattgttttaaggctcattaagattcaatacaaatgaattagataattctataaggcccattaagattcaatgcaaattatttagataatttctaaaggcccactaagattcaatgaaaatctgcaagtcggagtagaagcagaagaaatcgactaatctcgccaatgtcgtctccagagaggaagaggaagaaacggtcgcttgaaccgtcaccggaatcgaccccaaacccgtcacttcccgatgatttgattgtgagcatcttagcccgagtctctagattgtactacccaattctctcgttagtctccaagagctctcgaaccctcgttacttcgccggagctatacaagactcgatctttcttcaaccgaacggagagttgtctctatgtatgcttagatttccctcctgaccctaacccacgttggtttacactctaccgaaaacctaaccaaaacatcaccgagaagacaaagaactcaagcgggtttgttttagccccaatcccaaatcaccattcacatagttcgagtatcgttgctattgggtctaacatctatgccattggtggatccattgagaatgcaccctcttctaaagtctcaattttagactgcaggtctcatacatggcacgaggcaccaagcatgaggatgaagcggaattatccagctgctaatgttgttgatgggaagatttatgtagcaggaggcttggaagagtttgattcatctaaatggatggaggttttcgatataaagactcaaacttgggagtttgtgttaagccctttagcggagagatttatatataggagcttggtgattgaaggagaaatctacatttttggggataaggttgtgacttacaagcctaaagaagatagatggggaggtgtaggagaacatcagagtatggatttgggattgttttttcattcttattgcgtgatagataatgtactgtattgttatcgtcctggtggaatcaaatggtatgaatcagagaaaagatcgtggaggaagttgaggggtttgaagggattgtctaagcttgctagtagctgtgttaagttagcggattatggtggaaagatggctcttttgtgggacaagtatatcccttgtagtgggaataagagtcattcgatttcgtgtgcggtggtttcccttgagagatgcaagaatcagggtattaggggaaaggttgagtggtttgatgatatgcttacggtacctagctcttataactttgtgggtgctcttgctgctactctttgatgatgattgccatacgaggcacacacatttgattgtctagctagcttacagataattgctttctatgttgtaataacttaatgatgggattcttcttaccatattatttcaaaatgcaactggcttcatttccttcttcatttttgttttcttgtcaagatcaaacaaagattattcagttatagcgtcttttgttgtctagaaatcactgaactagtagttagttattacaccttcaccggttgaaacaacaacttgatgggacagggaagtgagaatcttttttgccttctcggtcttagaaagaatgtacatttgcgatgagagtaagagcaagaatttaaaaaagaacaaagaggaaaagccgaagaaattgacattgtttttgcttataaacatttgcagtcacttgcttgttgattaagttgattttgaggttaattgacaactataacaaatcagaagatttaagttgcaattatgtgcgctaagctaaggcttttagactcttatcatcatgtagtaacatcaagccaagtgccaatacctttatatagatacttcctgaatacaacaaaattggacacaatgatctgagtttcatattatataatataaattaactaaaccgatttctcaaccacacatttgctaaaggctcaatataaattaattaaccctaaatccttcttcttcgaccttttatttggcgccaaacccgcagttacatgtttttatttcccgctcgagcaaattgatctgatccgagtctttcaagcggggagagaaagagagagattcgttagtacattgatctaatggcgtcgaattcggaagcgggaggatcggcggattacgaaacattgatgtcgacatcggacgttgagctattgaagagggcgtggcgtaacgagaaggcggcgccggagattcttcagtacgaaggagctcttgtcgatagagccaaagaacagatcgaattagtggtaaaatgtctaaaaccctaaattattctgttggattttttcccagaaattaaccactaaatcagaaatcttttggtctatgatccaaattagactttccaattgttagaatagtattcgtttttgtgtgaaatcgaatgccacattaaacttagttagagttgttcattgtcttgtcactttctagtggttgcatttggaaattatcagtttttgaaatgtttgtaaataaacaggaagaaacaattgaagattatgtggaaaatggcatagatcctctggtggtgtctctatatcagatggatttggacagagcccagtttctactcagatcatatctcagagttaggcttctcaaggtttttttttttttccaagactttcatattagttttgcgagtttatcaacgttgattccaagtgtcaatgttgcttaattgactttgcttttatgtcatctccaatggtgttcttttgattgctgcagatagagaagtttatgttccacaacctcaactcagaagaagctgaaaggcgactttctgagcaagagaaagtgtttgctaccaggtttgttttcttacttgtctgactttatgttaattggctgtcttcttccttgtatgcgttttgttctaaatgttataggtttggtgtagaatctgtgtggaatagatagtgtttagagatttgtctggtactactctctacatgtttgagttgtgaatgggatacaatgaacttacatattaatatagttcttgttcatggagtatttgaactgtcccgagaattgaaaaacttcaggtagcctaggcacttttttcatgaatattttgtttgagtggttttttcagactttaaactcaatttttttacaatttacgttagtggctgctgttgtgagacatatatttgaatgatcacaggtgtgctgatgatttggcaaagcatttcgaagagactgtactgcttaagctgcccgagaattatcagtcggttctcaagcaatcccttataagtgaagtggatgatatgggtacctccctaaatcttattactttggaccataatctcagttggttaagattgtttgctattatatctgagcattcccttcacagtagctagagttgtgtttgtgttagtgatgactacacttgtgaacttacagtgccgcagccgcatttggatacctttgttgtttgtagaagcaagaactttgtctccctcaatctatacgaagagtgagcattctcttattcctccatacacatatatatatacacaatctttctgtaatctaagtgtgggtttgcctttacttaccttggcagaggagagagccccgagactgtggagatggagcgcggtgatctctacttcatacgttacaagattgtaaaaagggcaatcgaatctggccaaattgacttgatctgagctcgccttttttttcactcaaatctcttctcatagaataagtttcggatgatgctaccagtattcactctgtatgatcttgtgttacttgagttgtatagtgagtttgagtttctgttcttgatataaacttagtagttagtatctttgtagcttcttgcagttgtgcctagcttagctatccattggcttaaccataaccagtggcggagccagaacaatgactcactggggtcaaaaaaaagttaaacgaaacgataaactttactataaacataacaatgtcattacaaataaaaactctaaagatgaactctacgttcactcatatcttggaatcgttttatcacgattcgtttgtaacagtgttaagtacttgcttttcaataaaacaaacaagacaatcacttaagaacacatcactgatacggttacgcaatgtagtcttcacaaaattcatcgcggaaaaacatctttcgacagttgccgttgcaacaggaagaatcaaagatagctttagaagacgatataccaaaggatgtgaaagatgcttttttgtctctaccatcacacgagcaagatcaccaagacactttaaatctgtaaacttttcatcgtttttcacattatcaaggtagatctcaagttgatgatcaagagatctacgctccacaaaactaaagtcatctggataaaactcgatcaatctcacgagcatggacttatcaaactaacgaaaagaatctatcggactcacagaatctatggtccataactaaaccacatacttctttttaaaagggcctgtctgtttattttttattttcttagatctttttgtaattggtccatgatgactgagtaagaccccaaaagccgtaaaaagtaaaaaaagatggaatctttatagtttaaaaacaaaaggctagtactaaaatatctagttacggttacgtgtgccgccatagaaaaacaaatcttctgctcagtcttggattgagaggtaagagatccccaaaacttcgcttttcaatctctgaagctgcttttgaattctcatgttgatttctttgaatttgcatcgatcaagtttaggttttttggatttgggtttctcctaaatatcttctttgaccagtgtgtgtgtggtttggatttatccttttggatctttgtttctccagaataagtacagaaattgtaatctttgtcaaattttgtttattttgagtttcttagtgaactcagttggataacagtgacacatatgagatttgagatgaatttattttctggtaaatgcatagagattattaatgtttcttactgatttgagaattgcaaggcattgtcctttgagtttggtgttaaagttagcaaattggtgactatctctattgagtttacatgttttcttggttgttattgtgaggatttaagatttgcctgcttttgtatttctctttggtcttgtaatgtcagaattgtttctttcttaaagttgatttctttgtcaatctttaaacagagatcgaggtgtttttgacgcaatagaagatcgttctgcgtgttattatccaagaactgctttagtgttataaacatttgagcagagatgcatttgtggccatcgttgaaacttcgaaactctttcaagagcactagccagaagagatatcaaaggatgaacagtgggaaacaaagtcaaagcaatcagcagaaactccttgacggcgacaaagaatctggaagccccgagatttcgtctggtggtgggtttgctgttgtttgtagagatgttgccatggttctttcttgctgctactgctgtttctgctgtggaggtaaataaaccttctcgacacttttccccttagctagtatctgtgtgatctctggaccaatgttttcgtatgacctttgagcattatatgcaagcaccatggcacattctcatcacatattaacttagttggtatcagtttagaatctagattaaaccatgatttttatcttttagcagatatacaatggttttcctttagtgattattcgttcttcttcatcaatttctccgattctgattctgattcctctgatttgttcagcttgcattgatgaggaggagatttgatgcaatcatgtaagctcctggtggaggagttaagtgaaagattttagccttagaaaacatcaatctctcaaaatgtaattagaaatgttgtttataattaatctgaattctttttccacctttcccaaatcaaatttatatattatgattgaaattcacgatattgactttatcaaatagataagcatggttaaatgatttcaaatgattttctatttaacacaaactaaacttaaacagacacaacttttgttcatgtagaattttaactattcatggcatttaggatttgaactgttgaatttccgtttaaaattaaatgtcatttttaatgcattattttaaaaattatttacatttttatgactttaatttaaatgtattttaataagaaaatttataaaatatattaataaatagtaaaaaataggtttttcatatgtatgtcaaattttaaaattgttttttttatataaacgatatttatttataaacggaaggaatataattttatgagttttttttctttttttttttgtcatccaaaattaattaaaactcaaacgagccaatctcgagggatattgtttacacatgtgatatgatgcggttcggtacggattttccgcgccaaattattcgcttttacattagcacttcgagaaattaaagataaagaaaaatttgtgagttcttccttgtcgctttgcaattcctccaaatacacagaaaatgccggccattcggttggacaattttatgaattatgagttagaaatttagaatataattctctatttaggaatttagaagattgttagaagagcaaaagtcaaaattactaagtgagagtatttactcgactcagccaaccaataataatccgacacgtcatataaaagttccagaaaggtcaaaaaaaatcacacacattaaagtgctttgaatacaaaagcagactccactatccaattaaattacgaaaataccacttcggttaactccactcttttcatcttcttctctgccgtcgtcgctcggagctcgcgaagctctctcatcagaaatcaaaaaccctaaaaaaagtcctttctgattcatctatacagacacatactgtattctcaaaacaatggagattccttctctgaataagcagcaagagttcactctcgcctccgtcactgatctcacttctccttcctcatctctttcgtcctctcctgttgtagctacgttttcatgcgttaatgaagtcaaggaactccgatttcaggaatcgaaatcgtctgatggtttcagttttgatcttagttcgactcaggtggctctcgattcgatttacaatttgcacttcttctggttaaagaatctactttaatctcgttttgaaacgtttctatgcttggttaagtaatgcactaaaacaatctctgtttagttaggattattaaattatacgtgtggtaagtttctgttctttgagctagattctgattagtgtatttgattttgtgctgctcagttgttcaagttggggccacttcagttcacttgtgtatctgatggttcgatttcttctgcaaaggaggtacgtgaaacatttcttttgttcagtttcttctgagtgttcatgggattggtttagtgtagttggttgcaggagatgacttgatcgactgcgcatccttgtttactatatctagtgtgtaatcggaaatgtttttgctgattttgttaccagaaatcgtcattttctcgaggagttgtaataaaatttagagatgagaaggatagcaaggagttttgtgattcatttgaggaatgtaaaaaggatgatgctgttaaacaaggtgcgaatcaatgtgctaattccccatcctagttgtatcgttcatcaaaatcccatttcattgatcataatatattcatgactcttgatcgtactcattctttgatgtctttttcgttcttttgtttctaggatcagccttgccgaacggaacagttgtttcagctaataaaagcaagttcgatgataagattgaggctgcttcagccaaaatgtatttccattattatggacaacttttacatcagcaaaatatgctacaggattatgtgaggacgggtaagatctggcctttgtgcattgattacctcagaggaaggataactttttttttgttgttgcgaacagcaatttgacccaagatagctctttttcgtcatattactctcttcaggtacatatcatgctgcagtcatggagaaccgttcagatttttctggccgtgttgttgtcgatgtaggcgctggtagtggaattttgtcaatgtttgctgcactggtatgcataaatttaagatattgtgggcctagaggtctactactactattcgtctgcattttgctttcactttttctgataaacgtccattattttcttcctaatttaggctggtgccaagcatgtgtatgctgtggaggcgtcagaaatggctgaatatgcccgtaaactgattgctggaaacccattgcttgctgagaggatcacagtaagacctgtagtccagtttcgtttgtaatttttttcatttatatccatttttctgatgttcttcaacttgacacaattgtatttgtaggtcatcaagggaaaaattgaggatattgagttgcctgagaaggccgatgttttgatctctgaaccaatgggtacgtgtttcagagacggattcttcttttcacgtgctcttcatgaaaatcagaatctttcagaaggcaaattttggtctgtgagaaaataaatggagaaacaccattgctgattcaaagttatgtatgaaagaatatctcttatatctgatatacctgtgtctgtaggcaccctattggtcaatgagaggatgctggaaacatatgttattgctagggatcgttttctgtctccaaacggaaaaatgtttccgacggttggaaggtaaagctgatcttcgatagttttacttttctatctcataaatgtcttctttctcatgtaactttgtcactgtaggatccacatggcacctttcgccgatgaattcttatttgttgaaatggcaaataaggtacatattgcacatcttatcaggaagatatgtttgagattgcttgtaacataaaataaaatggttgaattaagtatgggatggttaggctttcagtaacttaggcttttctacctctctatgcaggctttgttttggcaacaacagaactattatggagttgatttgacacctctatatgtatcagcccaccagggttatttttcccaggtatatgcatttacaaccagtgaatcactgatatttctttgcttgtctcatcctttacaatttttcatatttactgattttgtagcccgtggttgatgcatttgatccgagattattggtggctccctcgatgtttcatgtgatagatttcactatgatgacggtaaagctatttcctacattagattcggttccacggtgtttccttaaaattgaggacacttttctgtcatgctatttctatgtgcagtcgtccctgtttagtgaatggcatgatccaaattcaataactgtcaaatttttttcacaggaagaacaattttatgagattgatatcccgttgaagttcactgcgtctgtgtgtaccagaattcatggacttgcgtgctggtttgatgttctctttgacgggaggtatcaagccgtaacaatttatatgttttcatcctgtgctagctaaagattaatattcctttttgaccatcaaagcctcaaaggtatatcatacaaacctgatgctttgtatccaacagcacggtgcaaagatggtttacaactgctcccggtgcaccaacaacccattggtaccaaataagatgtgttctctcgcagcctattcacgtcatggcagggcaagagatcactggtagacttcatttgattgcccacagtgctcagagttacactataaatctaacactctcaggtcaattttgctttctgacatctctccttttgaatcatatcatctactttggacttattttctgattggctttttaaacacagctaaaatgtggggtcccggtgccaatcaaggtggaatcctccagacatcatcgtgcaaactcgatctgaaggaaccctattatagaatgtctcagccacaggtttaccctacacaggaaccaccagctcagtcgcaagtaagcgtttgttattgtcttgattaaacaatcaggatatgattgctgttgtgtttaatcatttggcgctttaaagccattacattctttgaatttgcatatttgcaaaagtatatatcagcattaaacatatgtggacattctcttggtgcaggacatacatatacatagtgatgacttggaagaactagagttgctacaacaaaacgcaaacgctcagctctagaactagaactagaaatagaaccgttgtttctgtccatgtatttgtactttgcgtctgcttcctacggtttagcaccaaccctttattttcagacattatcttgcgttttcttgtctagttcgactctatttcactacgtatcacccacatggtatttgatcctctacacgcaaatgaatcattctattttgggcgctaagccaggttaattgaacttctgtacaactatgttctgacactgcaatttttaaaattgatttggagttgttttcaaatctgcaatagggacctagataattcataactggagttgacttcaatttattgagtttactgaaacaaaaatgaatcggagaacgtgcaaattgtgcaatggacaaaggaactgtaatagtatagagcaaattttaggctaagctgttcacagctgcaactgcaggctcaggtggattagcaacaatgacactgaagcagcgtccacagagagtaggatggtcagaaaatgatccgacctggcccgagtaattccagcacctctcacacttagacccctcggctcgtgacaccccaatccacactttgttctctccctccacatactctcctgtgtgttgcacactgcttatcatctccttctccattgaagacaatacttcaacctgtaatatgcatccacatcagtttcatggctatagtctcatagaattacactcagcatgatcaaatctcaacttcaatcgaaaattgtggataataattgaggaatttgagatgaatcaccatcaccaagtataactaaaaacacaatatattgtaattccttcatacctatttcttagggatttaaagggcttttcgagagtgacttctatagatctgatcagtacatgtgtctactgctacaaagtactcttcttttaacatctaaacatttagcatttctcttggggtccaaatactatatctaggataaagaaccagactggattaaaacaaattccggtttgtgcctaatcctattcacactaaatcttttacttatctgttttgggaagagcctacttgtagtttggcctgaactttacacagaaaaaccacggttcacataaaaacggccctacttgttgatggtcaccatgattctaatttatcttaagctataacaggaatatgaattttccagataaggagatttagtgcttacttgtgatgttatgaatatgcgttgcagagtgtcagcctcgttctttgcttcactcatctctagtaattttgcagccatgcctgcatctgcagtatgcaaatacacctttgcttctaaactggaaccaatcattttctcattacgtgctagctccagcactttgttcacctcagtcctcaactgtcacacaaacaccataagtatttctaagatcctcattacaaaaagcgcatcaagaataaggccagtaaaacaaagaataaacgtaaaagttcttccagagaaatttcgataatgccatatcataagaactgattacacgatcaacttgacataacatcgagttgaatattctgatattgtgtaagatttcattgagttcatctccactaagtagctaaggaactctattactttaattacaagcagagtagagagtatacaatgggctgaattgctgagtttttccgaattgatttaggagagttttgatacctcgagaagcctttgccagaagagaacatcttcagcaggaaatgaaagccattgttcattcaaagtaggccatttaagttcgaagacaaattctgctgcagagccatcttcatttctgtactcaaatggaagattctgccagacatcttccgctaggtgaggtacgattggagcaatcactctcaatatggataaaagatgtgttgaaagaactgtttgacagcttcttctggtaaaacttgaagtacccctgagaaaaaagatttttggtccagattacgttgaatagcacagacgtattaagaacaggtctacataggttctagcaaatatcaaccaaaagaagatgagaaacttacccagtatacagtctatctttagctatatcgaagtagaaatttgacagatcaacaattgtgaatcgttgtatgatctgaaataaagaaagctcatttagtaacacagatgatctagaacatgaaattaagcctcatgaggttcaaaggtccattgcaaatacatcaacctcactctcaccttaatggatagtgatccaattgctgaactaaagtttcttagatatattaaagcttttaactgataaattaactcctgtaagagtgatctatgtctgtttcccgtcacaggaaaatcaatacatacgtgaatgatgtaccaaaataagatggagaggttacctggaatattttaaagaactggtagttctcgtaacattcttgtatattctttacaacattctcaagctgaaagagagcatgctgatcaatgataggtaaatcctggtatggaacagcattatcaacctacaaaccaacacaagttaaatattaacagattgtcaccaaccccagaatataaaacagaagcaagaagtcttgacaagtgggaaaagaggtgaaaaacactactctatgtaaagcttaagagttagaaaacctactctccaatcatgaagatttcccaagaggtatcttaacgttccccttaacttcctatatatatcagacatttgacgaagaatctggggacctattagtacatcccctgtgtaatctacactagaaacccaaagacgcataacatcagctccgtaagcaggtgcgtcctgttgtaagaagacaaacccatgtcaggaaacagattaaataacgaagatagttctatacaatgggatttacaatgtgacaaacctttgaatttttccctccttcaatgaccaaacgtgggtccactacgttacctagagacttgctcattttcatacccttctcatccaatacaaatccatgtgttataacagcagaatagggggcttttcctatatacaatcatgcaaaatgtgaagaaaaaaatcaaaagccacacaaagatagctaaaaatctgtagaataatctcaatttataaggcaatatcatggcatgcacttctcaccttgcgttgcgatgcttgttaacaaagaactttggaaccatccacgatgctgatctgtaccttctagatacacgtctgcagggaaactaagaccttcgcgtttccctaatacaccagcccaagaagatcctggacatacagatgggaaagaaagtgatgtaaaataggtgttgggtgcttagtgtgactatctgattttaattagcttcttttatcatagtacctgagtcaaaccagacgtccatcgtatcagtccccttttcataatcagctgctttatcacgatatttctcaggaagtaggtcttccactgacatataccaccacgcatcactacccttttgggaaattatagctgccagacaaggtattcaaataaggttacagaaaacacagccagtaaataacaaccaataaaacacaccatactctcttataggcccttacatttaacatggttgattgtctcttcattcatgagtggttcttttgtcttaacatgataaaaagcaggaatagggacaccccatgtcctttgtcttgagatgcaccaatcagatcgactggaagtcatggcagatattctgtttactgcctgaatgacaattgccaaaagataacaagtaccaaaattaaactccaaacaatatatatgcatctcttaaaaaagataaagtaaggaaagacgctaagtcaagcagtacggtatcatctcaacattgaaaaaatctcacagcaaggtggatcagatcatgtggttcatgtgctatgaatctcctttcacagctaacacccacacatgatacttttagcccacataatgaagaaaaaaaaatcaacttataaactcagtatgtattcaactaggtacctgatgtggtacccattttacattgttgattgcatccattgtggctgtgcgaaacccttcaaccgatgcaaaccactgctcagtcgctctaaatatcgtcggtttcttagttcgccaatcatatgggtatttatgagctgcatgacaagaaggaaattaaatcatgagactctatagcaaatgtttcctcaaatggttcctcagaaagcatttgaatcaaactcaccataagattcttccatgaccagagacatattttcatccaggtaactgacaacagcggtattcccttctccaaggacagagagccctctaaactgtccagcttcttcagtgaactttccttcatcatccaccggagagacaagaggcagcccgtacttcaggccagttgcataatcctcctgaccatgaccaggggcagtgtggaccaaccctgttccagattctgtagttatgtaatcaccccctataacgactggacagtctctgttgtcaatgggatgagtgtacctacaaccatgatgacacaccataaactaaggggttcaatttatagcattacatgcaaaactggaatttcttttattctctaacttaaaatgtaacctgcagttttcaagatctgaaccaaggaatgttttacttatgctaagcttcacaccccatttcgcttctaatgctggcacaaggtcggtcgctacaatcacgaaaagcttttgttgattctttagaaccttcccgggaattttctttttattgcttgtcactgttgattcatcttctgagaatgactgcacttccacaacagagtactgaagctttgcattcaccgcgacagctgaaagttagacaagaaagaatagaagaagagtcactaaatgtgcttatatagcattcaaaaaaggtacgtattattgcttctaagtggagaagagatatgagaaagaacggatacaaagtaaagtaggatgcaatttgacagctgagagaaacacatatactaatataaccccttaccagcattggctggcatagtccaaggtgtagttgtccatactgccaagtatatattagggataaactcatctaaaaggcttgttttcgctccaccaaccaatttaaaaatagcatatatgcttttggaaatatgaccctccggatactacacataatggcagatacatgtgggactgatatcagataacaaggtaaagtgtggaattgtcaaaatattatttcatgaaagcggcatgcgttgagaacagcaatagaaaactacattaaatcagggttcattggtgatacataaagaattagtcttcgactaatggacaacagatcgcatcatggtaaaatgtcaacggaagtaagaaagagaataggaagactggtatgactttagcagacttaagttttgcattgaactggccgtaatattattattattcttagattattgattcaaatttacctctagttcagcttctgcaagagcagtccgagatgaagggctccagtgaactggtttcctacctctataaatgtaccctttcaaggccatctggccaaatacttcaatctacaatatatgataaaaatatatgttgactttatcaggctttgaagaactctaataatcatctcctacacggttatttcatccagtaaataatgtgggacgtgagaccattacctgagctgcttcatattccggatcaagagttagataaggattgttccagtctgcccatactccaaatcgctgtaaacaccaagaataatgtcatatgtgctacatgtcaatcgaataccaaacgaaatatctttcttaattattatgtcctgagagatataagaatcattatgacggttgcattcaaaacaagaaatcagatatgaaaacaaagcttgatagccaccttaaatgattccatttgtgttttgactgttgcttttgcaaatttcgccgcctttgcccttaattttaatggtgtaagttcctttcttacttcctgatccagggactgcagaactgaaacgtttgacggttacaccaaattacacaggcaagtaagtaactggaaaataacaaaagcacagttactttctgtttctaatgactcaaaggtccataacctattgtgtgtttacctttcaactcaattggaaggccatggcaatcccacccaggaacgtactgaactttatagttttggagcagctgcatgaagaagcaggcagtttgatgagaaggaactccactattggacgtaaggaaaataaagaatccctaaggagagtaaatggatgtccaagtaggaaagacaaataccttatagcgattaatgatatccttcagtatcttgttaagagcatgacccatatgcagatcaccattggcataaggaggaccatcatgaagaatgaaactcccctgaaattctaactaactatcagacaccagtctctcaaagcaaagttggcataagataattttgagaaactcactccattgttattatcagaaactctcttgaagacctggttctcttcccacaacttctggagttcaggttcccttgtcaaagaattcgctctcataccaaaaccagtctttggcaaatcaaccgtttgcttgtactttccatcttcttgcttttcccctaaccaacacacaacggtaaatgagtgccacattgcaatatagtattaagaaagaagtacaagcaatgtgatgcaaaccttcagatgctttcttggctgccataacaggcccacgagaccttcgttttgatgaatgaccaaactcattgtttggttcagttgaaaaccgtgagacatataagaatgaaaaagccttgacggaagaccttcccttggcaagaaaagaatccaacggcgtgtttctccttaaatttgaacaacttttacctgacaaaacctaaacggggacaaactacatctcaaaaactatttccacgcaaattttcagcaagacacaataacttctatcagattgatataggtggtagaagtagtttctccaaacaagttcctgagacaacacatttttctaagaaagaaaatagagcatagaaacagacttagtttggttaataagggctttaagcattacagaggacacatatgagctcgtcatgtgatgctcagatagtcagaactcaagtaaactacttgcaatttcattcttcaaagatataagcaatggataaaagtcaaccaagaagcctctgaaattttatcgaacaactggtgtgcaatagtaaaccttaagaacacaaacaataacagaaagcgaactactttaacgaaacccacaaaccgaaattgccaatgcattgataataagaaccaattcgtcgacaaatgtgttctaggaatcgaacttgattagaaagactatcactttccccagcacacaaaacaaagagtcaacagagcagagatggattcaaagtaatcaaatttacattcacatactctgtaagatgaagattgaaccatcgccattgcagcagcttccctgggatttcccgcgaaggatttgaagaaagacgacatctgcttcaagtttctctctgtcgcttctatctatcagagctcattttcacggcgaaacaaagagtgagaaggaaggaagaagactaacgtcaccaaattcagggaagcgtatgtgtgtatgtgtgtggataactgaaaagttgaaactaaaaccaaacctcagaactcggtttcaatttttggattttatccgttaaatccctaaatctcttgttttttttcttcaagctcataatagtaaaagataatcacgtttaaatacataaatatactaacaagtaacaagaggcgaaattcttttaacatgtatggtaaatagattaaatataaacaaaaacaaaaacaaccattagataaggcgggtgaatttataggcatatatcatcagtaatgcaagatataacagttagactcaacagtagcatcaccagtcttcatatcgaacaacttggtccgtgcttcgacataacctctagcaaaccggaacattccactgcctccaaccaccggcatttccctaaccttggacatcaccgtgttccgaccaagaatcgttatggtactcccgttgtacttcccagtcttaaaagccaagttcatcgccatcaacaaccctatctccttttgggctgctccaacgtacatcccttgggcttgacccaccacagtcgagttaatgggcacatctaatgttaaagcgttgtctatcatggtgattgatccgaaatatgaggaacttgagtattttgcaaccggcccttggatcctgatggaacttgggtttcgaccagttacaatgtcgtgccaatagacacggagatgtgtgagtttctcttttttgccgaggccgaggtgttttcggtttattgttcttgcgaagtcttcaccgttttttccggctaaggcggttgcggtgaggaggaggatttgtgcggtgaggatgagaatgagctttgacatgttagttttctggtgtcgtactttaattgttttatttgttgttgatagaatgatagtttatgtaaattgtgggtgtatatactgcaactgtgcaacgtgctatatatatcgagtaatagatgagatcacgagtgtgaaaattaaaaaggggaaatagataaacgagtgtctacatatagaagaagacgtgctatttgataaatcttctagaaaataaagtgagtttggattatttgattttgttaggtgaataaagtgtaaaatattgtattttatgggggaagttacaaaagattcaatcaatatcagtttctaaaagtttgattggcaaagtatttagatgagtatagctaggtgagcatttgtaagttatacgattcctctaagctttgatttcgagtcttttgttggggtgttaaattcttaaaaacaaaaacaatattatatcctttttttaattaaatctcacgctttacctttttatttcatgcaaaagattgaataattgaactctctccactttggtttgtttattcatataaaaccaaacagaaaataaaaacaccttggtcataaccttaatagaccgatataatcgggaaaggaaaacaaacctaactatttaaatgtttctttaacaaaaagtattgaaactgacctgttttagttggaacaatatgcctcgcgtgaatatcggtccagacaacaacgctcaaatagagatcactactctacaatcacaaagcaaatcaagaaagctaaagaaaatcaaaatggctagtggaagtgagcgtgtggtggttgtcggagtagatgattcagcccatagctaccatgcactcgagacggctcttgatctctttttcatacctttcaaggccaacccacgattcaaacttgtcgtccttcacgctcgaccaacagcgaccttcttcctcggtgttgctggcccgggaacggtcgatattataccaatggtggaagaagatttaaacaagaccgcggacttggttaagaagaagtgcgccgaagtgtgctcggctaagtccgttgagatctcgtctttggaggtgattgaaggagatccgagaaacataatgttggaagccgtggagagacatcatgcatgagttcttgtccttggtagccatggttatggagctgacgtcaagaggatgtttttgtggagcgtcaagtgtgcgtaactatttagctcattaagcacattcctccgttctgatcatcaagaagcctaaggataaacctacttctaccaataaacagcaatgaggaacaagacgacgtgattttcgtatatgttaccattctgttttcttaagtaagaccctatctatcgaacattgtgcatactcttcttccccaacatcttccatttcaacgttaatagcttagctctaatgtatatactcattgtatatattcactatattaatcgcctcttctttgtgttattaatctccttacttttttctgtatatattgcataaaaatgaagttcttagaacatttttacatttattctatatgatcataattgaaaggttccaattaaatttgttctttggaaacttgtagtaccttgcaaagagcttgatcatgtacaaagctgaggtagaaattaaaccttatcgtgaatgtactataaccaatgttgccgagaacttgtaagcaatggcttcagtaacttctttttcttttctcagtttacctttaccactttgtgagtcttgtttgcataataaggtttgatccgagcttgtagaagacgccacttgtgttttatgcgaaagacatttaaaactcctataaccaaataatcatgttgctgactgctgaggacttgtaaacaatcgattttagcaacttttttcttcttttctcagtttacctctaccattttatgagtcaagtttgcataacaaggtttcaatccgagcttgtgtaagataacacttggtgtcttaaatataaaaagatccggcaatgttgatttccttctaagcaatattttcaatcttcaaactcatttatacatagttaacataacctccaaaacataaatatcacagatccaaaagatcggataaacataatctctccaaataatgatgcgttactctcatactctccagcagttctcaattctatctttcatcgtcacaatatggaccgtccaatcggtaccaccacagccaccggttcgatgcgatcaaaccggctgcaccgtctccaatgcaaaagagtgtcttccacaaattcactgagcccttcgagaaagagagacacaatgccacaactaaaaattgaactgaaaattgtagggctttaccccaaagggagcccttccagaaattctcgaaggcccaagacaagctt

SEQ ID NO: 860 - DNA, 36243 bp, Arabidopsis thaliana
aggcctaggagggggtttggaaatagttttcaaccagcaatagacgcgcctcggttagaacctcattagctgcgtcattgccccaagcgcaaagataagtttgtttcaaacacaagcctctttatttatatccaaacaaaaccgaccaacttgatgcgttcttccgatgtggtattcttgtaccaatacaataaataaacacaatcgaattcgaaacttacaattcgtaataagaaattaccttttacagctttatttaacaaaggtttcatgtaaaaagaatggtagggaccgcgcgaacgcaggccccctctgccacaaataatgacgcaggctctcccacttggggagaccttaagctaagcacccctccgttatgtgcaatggaggtcactagcctaggccactcgtcttattgatcacaagttgaccccgtccaggtaagtaattttcacagactgtccacatcttcagttatactctgcttcctcaatcattctttcaggtcttagcgatgtgggactctgcaaattaacacatctcacacacctattggtctctttttaacgagatgagttttatgttatacacatgagccatagcccatatgtcctctaggcccattgaagtgcatactataaattgtttttttttttattggattatcagactgttttaaacacgttcgcttgcttgatacacgatttcttaaatattgttacggaagctgttaatatatttttttcctttttcacaagctgttagtgttactgtagatttacgcaaggtttagcttaactctaaaatggttcagcatcacctactttagtactacgactacaaaactgatcagcttctccttctctcttccatggcgattctcgtcgtctgaattaggtacttttctaaatcttacaccttctattcagtacgcgaaattgactcttctttgctgtcttgacctagaaatacgaaaatttcaaaatcgaagctcgattccatttgtttagggttgatattacgattctgattccatttgttgttgaattcgtgtaaggttgtggaatcgaagtattgagaggggagattattgaaattaggggttttgaatagtgatggatggtaataaggatgatgcgtctcggtgtttgagaatcgccgaagacgccattgtttctggtgataaagaacgagcgttgaaattcatcaatatggcgaaacggcttaatccaagtctctctgttgatgaacttgttgctgcttgtgacaatctggattcagtttcgaggaattcttctgttagcgagaagcttaaaactatggacggtgatgatgataagcttgagactgggaaaatgaagtatactgaggaaaatgtggatttggttaggaatattataagaaacaatgattattatgcgattttgggtttggaaaagaattgttctgttgatgagattagaaaagcttataggaagttgtctttgaaagttcatccagataagaacaaggcacctggttcagaggaggcgtttaagaaagtttcgaaagcgtttacttgtttgagtgatggtaactcgagaagacagtttgatcaggtggggattgttgatgagtttgatcatgttcagaggcggaatcgtaggccgaggaggagatataatacgcggaatgatttctttgatgatgagtttgatcctgaagagatattcaggacggtttttggtcaacaacgagaggtgtttcgtgcttctcatgcttataggactagacaaccacgtaaccaattccgagaggaggagattaatgttgctggaccaagttgtttgacgattattcagattttgccattctttctgcttttgttgctggcttatttacccttttctgagcctgactattctctgcacaagaaccagtcttatcagataccaaagacgacacagaatacggagattagtttttatgttagatcagcatcagcctttgatgagaagtttccgctcagtagctcagcccgagctaaccttgagggcaacgtgatcaaagagtacaaacactttcttttccagtcttgtcgcattgagcttcaaaaacgtcggtggaacaagaagataccaacccctcactgcatcgaacttcaagatcgcggatttgttgacaggtaacagcttttactttacctccacatttatgttttagatatgtcatgtacttcatagatccccacgtatcatgtttactaagctcctccacagttagaagccgagttgaccaatctttttaagatcttaacaaatgaaggcttttagacaggttaagatcgtaaacagggccttacacatagaacctatatctctcatacaaaacgtggaacccatacataacttattacaaatgctagtgctagattttcttatggtcacacaacaatcattgatgttagtcctttgtttgtttgacacaaaacaggcatataccgatatgataccagctcagaactttccaacattcgctgagacctgccagatttggatgttccagaggttcttgggctgcaagtataatctgtaatgtgtgtagggaggataacaatagtctcttttgtttggttcatatagatttggagatgataattcctaggtgaatattgagaacaacaaagaagaaattactcacaacaaggtacttgtcaccatactcacattatgattcaataaaaataaaggttgagtctaacaattctctctagaagatgtagcagataacaattctattacttgtttatatggcaacaagtcctttgatttgtttcaatcagatctcttaatgctttacgttagaacattttggttcaagattctcggttcttggtcatatattatttcaaaaattcaaatgctattgttacagctagattatacacatgaatcatgtgaaaagtaaatatcaaattccagtgtcttaatagagggtgaaaatgagcccaaacaacattacaaaacctgtgaaaagcggtctttgtgttcattgagaatgaattgaactaataactcagaaccctcctgagttctatcttcaatgttatattgcttgcacatgctagcctggtctgatatttgtagagtcaggtacgtctacaggatatgagtcgataaagtcgagccatttgttttctgtgttgggctccacttttcggatgcatctccacaccgcactgttacacttgaacccacttccaaatgcaatctgcaagaccctatcgccttttttcattctcctttttgcttccaagtaagagagagcgtaccaaatggatgacgaagaagtattcccaaacctatgaagagtcatctttgatggctcgatgtctacttttgtcagtttcaggttcatctccattgcttgaattacagctcttcctcctgtatgaatgcagaaatgctcaaacgctgtcttgaagtttggtgtataagaagaattcgactcatagatctttagtttcttgcaaagaatgtgttgtatcacatattggaattgctctaagtaaggtaataccagaggtcccagtgaagttagattcatcttcagcatatccccagcaacgctgattacatctttggttatcgacaccccttgcttttcatcagagtctatgtcttgatagatacatcggtaagctcgatcatctttcgctttattttttctaacaacatgcaagagctcatactttgcattgtctctgtcatgatcattgctagacatcaaaactgcagctgctcccattcggaagagacaattagtaagaagcatagatctgtctttgccaatgtaccaatgtgtgttcagcgcttcggtgctaacaataagagccaatgagcctcggtgagcctgtagcaaatcattagccaaattgactgatagaatcccagccgcacaacccatcccagacaggttaaagctcttgatattgcttctcatatggaatttgttgatcaccattgcacttagagacggtgaaggcgaatgcaaactacagtttgttatcagtatgtctatgcttcttgggcttagtttgtttttcctcaggagatcctcaacagaggtgaagatagtggtcatggtttctattttgaccgaggagagagatttcttgaggggtatttccatcagggaacgaggaatactggtttggttgcttaaccaggacctctcaagaatccgggcttggaagtcaatactctcttgatcaagcttgtcatcgaggtagatggtttcgataagagttgacattgggacgcggtttgagtcaggtgcccggtaacaagtgaaatcaagtaagtagactttgactcttgttctaattctttggtagatcagatgcactactagcaaaccggcaaagatctcaaagacagaaacacctgagctgagaagtgttgtcagctctgagatgctcatggagattggtgaaactctgtgtatcgtttgattcatttcactttattcttttaggttcaagtttttcatggatgattgattttcccattatggtggcttttacgtgaagatataagagaatggacttatcatgtggaagttgttgcagaggatttcactgcgttaggcaatgctatttttttcagcattctttatgtgctttctaacaattagtcacaacacgtcttcttacttgtctgattagttaagagctaacttgggtctaagggtttacacgttaaaccagccactgtaaaattattgtaattgtgttgattaataaaacaaaatccttcccaaattttgaaaatcatacattgcaattattaaataatattgtaagagaaaaagtgagactaattccaaagttgttatgtcaatttgtttgttcgttgttgtttgtaatttgcatgtgaagagcttcggataggataagcaggggatatgagctgcaacaaacaatactctctcaaggggttggcttcctttgcaactgattacactgcgagtccggtgactgactgattaattcttcctcttctggccattatgcaatataaacgagaagacgaggaatcaagaaaataacgaaagaaactatctatcctaaccaaaatacttttaatcattggattgcaaaaaatatatagattagaaatttcatgccaattcgaacaaatatcaacaaaaaggtgcatataaaaaagatagccaaaaatgattggtcaaataaaaagcttaacaaaaaaataagatcagaagaatcaagagaaaaaaatgacaaaaagaaattattgcaatcatgtttcttgttaatgaaacaattcaaaatcaataatagggtgccttgtagacatatggaggtgggagagacttataagtgactttaggagaaggcgaatagtatggtggaggtggtgagctataaacgtatggtggtgggggagatttgtagtcaacttttggagaaggagagtagtacggtggaggtggggagttgtaaacatatggtggtggtggagatttgtagtcaacctttggagaaggagagtagtacggtggaggtggagagctgtagacgtatggtggtggtggagacttgtagtcaacctttggtgagggagagtagtacggtggtggtggggagctgtagacgtacggtggtggtggagacttgtaatcaacctttggagaaggagagtagtacggtggaggtggagagctgtaaacgtatggtggtggtggagatttgtagtcaacctttggagaaggagagtagtacggtggaggtggggagttgtaaacgtatggtggtggtggagacttgtagtcaacctttggagaaggagagtagtacggtggaggtggggagctgtagacgtatggtggtggtggagatttgtagtcaacctttggcgaaggagagtagtacggtggaggtggggagctgtagacgtatggtggtggtggagacttgtagtcaacctttggcgaaggagagtaatacggtggtggtggggagctgtagacgtatggtggtggtggagacttgtagtcaacctttggcgtaggagagtagtacggtggtggtggggagctgtagacgtatggtggtggtggagacttgtagtcaacctttggagaaggagagtagtacggtggtggtggggagctgtagacgtatggtggtggtggagatttgtagtcaacctttggcgaaggagagtagtacggtggtggtggggagctgtagacgtatggtggtggtggagatttgtagtcaacctttggcgaaggagagtagtacggtggaggtggggagctgtagacgtatggtagtggtggagacttgtagtcaacctttggagaaggagagtaatacggtggtggtggggagctgtagacgtatggtggtggtggagacttgtagtcaacctttggcgtaggagagtagtacggtggtggtggggagctgtagacgtatggtggtggtggagacttgtagtcaacctttggagaaggagagtagtacggtggtggtggggagctgtagacgtatggtggtggtggagacttgtagtcaacctttggagaaggagagtaatacggtggtggtggggagctgtagacgtatggtggtggtggagacttgtagtcaacctttggcgtaggagagtagtacggtggtggtggggagctgtagacgtatggtggtggtggagacttgtagtcaacctttggagaaggagagtagtacggtagtggtggggagctgtagacgtatggtggtggtggagatttgtagtcaatctttggagaaggagagtagtacggtggaggtggggagctgtattcgtatggtggtgggggagatttataatcaacctttggagaaggagtgtagtacggtggaggtggtgagctgtagacgtatggtggtggtggagatttgtagttaacctttggagaaggagagtaatacggtggtggtggagagttgtagatatatggttttgaatgtggtgtatacttaggtgatttgtgttgatggctgggaaaattgtattgtggtgtttgaggggatgagtaaggatatgatgtcaccgtagccgcaatggcacttaagaccacgacataaaccaaaaactgccttaaccccatcgtttttgaggatcgtttcactggttttttgtttctttgtttttgttatgatatatttgaacatgaacaccctttatatagtttttctttgtatgtaaatagcatattatcttgtcaacttgggttcgtgtgtggcacttccaaacacataagggtacgtgctaagttgtaagttgaaaagtagtgactcggagaataaatattattaaattctcttgcatctttcattttcttaaatatgttctcacaatctttatttgtatgaattttatcgactcaattattttgaagaacaaaacatatccgtcgattgatgattatttgaggtgtatagattgggtaaaatttgttcgaacataaacgatttacttggttttaatcaattttattaatttgaaagttgtataatttaaagtgaaataaaaataactatatttagaaatgaaatacttctgaaaacaaagttcattaagaattcaatgtgatcgatatacaggttcacatgacgttttgattcttcctccaacaacacattttttaatatgtactaaaaaaaaaacttagtgtagatgaaatatttatttgtaattatgggtcaaattattcttgaaattaatagattaatatttttgtagaactcttcaagataaattatggaaggtgaagcaattaattctttggcagaggaaagcattagagcctaattgttacgagagtagcgttgaaatatgtcgaaaatgtaaaaaggatctttgttctttttttgaataaaatgttaaattatatttctcttttaaataactgttttataatttttgtaactgttttattgataggtaaacagggctggaaaaattaaaactaaagagtgttaagctcgtaatgcgaaccacatttaaagtccttagtcgtattttttgtccctcattcgttttataactgagaacgtgttcctgatgtgtttatttatccactgaatgaatctagctgctggttttggggattcaccatgtcttctcacattacgctctctccaaattgtatataccaatgcttgtagaacacttctagccaagaaaccctctatcgtgttgtggcgttggtcagatacagatatgatgaggttatgccagtctgtggtgtagcttcgtttgagaatgttctttgctaaagcttcccatatttctgatgtgtaggcgcagaaagaagaagatgtggtctcgtcattccaagctattgttacagaaaacacatcccactgaagattggatgttccatttttccattcgatcccttgttgagagtctattcaggattgctagccaaacacagaaaaagtgtttcggagtttcatgagcaaactatgctcctttgtgccaagctacttgatttggatgcttacatgcatcacacatcttttgcattattactgcacatgaaactatttgcaaacaccaatatcaactacaaaataatgggcacgtttaagggatatgattcatgaacagtaaaaattatatacaaatcatatatatatcttcaacaatttgttttcttcggcattcagtatactttcgcagtatgtcaaaatctaaatgcatgcagcaacaatgaaaattcgtttcaactgattaaaatacgtagaatttgaaagaagcgacattgacattaccattttctttctatcatctatcatctatgccatagtataaatgtatgatacctacacttctcaaggggaattgatcccgacctgttatacttgattcttgatagacagatttgactttggaatgttaaaatagcaaaacattctgacatattccttgttatttataccgtagaaagttagtcagtagcctctcatcatataatatgtctcccaacggaggttgaacattttaggtagagaatatgtcttgatttccaaaatgcatgttttctttttcattctttttgtctagaaaacctattaagtgtttgagaccacaaatggtggaaaacactaagatcataataacatttataaaacgatgctaaaaagggataaaaacacaatgttatattatttaaatggttggatttccagaagaatcgatagagtctgtatactcatcttaaggtttttatttttaaacaaaagaaattgtgatgctttttcaaatgttgtttatcaactgaaaaaaaaaacactaatgagagcaacaatgatttcagtttaagcaaaagaattctccctctgtttgaaaatatatgatgttcaaagtttttgcatacagatcaataaatttatttatttatgtttatttctaaaatattatttattatttatctatctaaatactccttctgtttctttttatttgatttttctaagaaaaaaattgtttctcattattagttattattgttgtattttaaacttcaagataaataattaaatatcattagtttagaattatagaaaaatataaatcacaaagattcatacatttataaccagttttaatatattttcttaatttgtgtttttttttagaaaatcaattaaaataaacagaaagggtacaattcaatgataaaatttgcagaaaatatatattgtcaaaattaattaaatatattagttaatattgtatcgaaagttgaaactatcatctaatataaaacaaaacaaatttctaaaacatcatatgatgaagcggatggaatataaaaatataaaatgcatgccattctaatactatagcagaacttcttgcttttcagattatattggcctcattaatgacaagtaggttttggaaattacagacacaatagattctggttggctttggcaataactatgaaaacgatcgacgaaacttacaacgcaacacatgagcatgaagaagtcatagaggtattaaatggacgggtttgacccatcatgaatagtatttatagacccaacatgttcttgtcacaccatgattgaattagctgggtcggcaaaaaaacctttaagttttccggggtagctatatcaaaaatctatggacttgatcttgaaataactatttgttatgagcgcaaatttcggaatttaatgtaataatcaataatgagtggttgtgttcctactaatcactctagcgagtatccaaaagtgggacactgggccgtgatatattcagattacgacttcgattgttgttttttcattgcatttttctacttctttttttgtcatttgttgaaagccaaactcaaacaacgtgcatttgtattatactacaaaactcttttcggaaatttaaaataaaataaaatgaaaaggttattttataaaagataataaaaatgttcgagttatgctacaaatgcatttgcaaaagcagaaatttgcattgaataaaaaaacttaaatctttattaaaatcataatcctgaatatatatttttagattagcatcgatcatggattttcagaaacacaattagaaaccaacgccgattattttgtagattagcaagttctttggcaggagtttcccacaattccactacggatttatccctagaaccgaagtccaaaatttcaagtagtccaaacaaaacgaattagtttggacaaaaaatcaaactcccactaaagtcagaaggatacaaactccttttctaagattatgatctaactaccattgcaccactttgcttgggttaaattaccaaattttgattcatagtacagaacacaacatgcctagtatttttattgagatcttgatctcttaaacgatccaactaaaattgatctaagaacacatgatcagcttttaatttttaaataacacatagttttggtctttggtacatggatgaatccacatgaaaaaaaaatacaaataacgattgaaagagtaaataataatgagacctttttgccctgtctctttggctttgcagaatccttgatatgtgtagtttccatctcatggacccctttcatgtcctcttcaacacgttatgtaataacaaatcttctgagtctttttgtcgttaatctacttaacaatatcgatgtgaaaccaaatttgcactgtattgatttctgaagattaggtgatcagtgatgtatgtagcagtgcaaccgttattaatgccttaattttgtgggtcacataagataaaaaaaaattgaagtattttggggaccatggaatcataatgcatgtgcaaaggcatgtgccttttgattcactcatctatcacaaaacatacacttaaaagccagtcaaactcataaaacaatttcttcctttgactggcttttccagttggtttttggttactaatttaattaatacttctaaaacacacatcataatcacaacataaagcaagacacatggctctaagagagattagagaaaagaaaataggatttataaaatagacagaattggcaaagagccaagctttggccaaaaaaaacatgaataaaagtcatttggtaaataaagttatatcatatagaatgaaatttatcaaagaaaaatcacatgatattaatctaaataaaaccaatttatttaccattagatcattcaaagagacataggaatcaatccaaagatcaaaataaacaaaagagaaaaagacaaataaacagaaaaagtagctcaaagtatcctaagttccttgtttgacaaaagatgataatgaacatagaagagtggtgtgacattacaatactaataagattatcaaaaagagcatcaacaaatatttgaagaacacctaaaaaaaagataaacacattgatgaaaatgataaaaactaattaaatgtattttctcgtttaagaacttattagaaacacatagatcaaagtttattattaattcagcttctgacagacaacaaagaaggaattgcacccaagtttggagttgtgttcttgcttgtagtagaatctgaaattgtacggcctcttttaccagagtaagaagaagaagtaaaagctctcattggacttgcaaatgaccatccccagcttctgttccttcctccaccaccatgacccatgttatgattatgatgatgatgatgttcagctgatgatgatgatacccatgatgatgaagatgaagaagaagacgatgacgtcattatcataaacccaccaaagatcccaccacatctcaccatctctctaacaccattactagggttactactgaccttgttacctttgttattattaccttctctctgtgactcaactcttctcaaagtacaatctccaaacccatttgtgatcctctcaaagaaatcaccagagaagcttctacttccacacccaacagatctagatctcgacactttcctctcacttggtgtgacttcaatgttaggacttccatcttcttcaacaatcacatcaataccgtttctgttactactactcccaccaccaccaacaactctctttgacattgaagaagaagctgacgaagaagacgaagatcccactgttgtagtctctgccaactctgtttttgtctcagtctggcttatgggttgatgaaagtttccaactttcttactgctaccatgttgtttcgaagagtagagatgaaaaaaggaccaaaacccatttctctttctcgggctcaaatctgaatctccgtacgttgtcttcgtagtccttgtagattgacttctcttgtagacaatattagccgtggtcgaagaagaagaagaagcagtaagcatcttcttcttcttcttagctaacaaaaacggaagcttgctgttgttgttgtttgttgctccggagacagagagagaaagagacgctgagagatttgcggcagaggcagtggttgtgctaccaacagagtcagatctgaaggaaggagaagaagaagttgaagaggaagtgaggtgtttaggaagtgggaaagatgaagttacaagctttccaagcttttcttgaagacaaaaagcacagatcccacctgggtttttagtaaatggatggtttatacattgcataccatcacccatatcttgatcttttgcttccaccattgttgataaccaaaaaccaaaacttccttatagattcctctgtttctgtgtgtgagcttttgagaattattagtttctcttcttttgagagagagaaagagagattggtggagaaagagagaaatgaagagtgggttgtggcagaggagaggggtcgagttcccagatgcacgtgggatactgacttgtgtgtgccttgtggcctctctctctatttcttctctattttttcttcaaatcttccaaaaggtttttaacactaatcttttttggttggtttttttttttcatcaatcttttttggttggtttgggatggactaaaaaggttttctggtctagtgtgtaatgtaaccatacatccacgtggctttgtttcttctatttttggtttctattattgttattaaatctagctctctttttttctttggacaaaattaaatctagctcgctttaaatcaccgcacctgctacaggctatatagctaaaagctaactaggctatacactatacagtaatttactctgtagtctgtagtattcatgtaaaagaaatggttatacgtaggtagctttaaacaacaaaacttactctgtagactatataaagatcaatacttgatgcagctggtaaaaaaaaaaaaacgaattgactcgagcagtaaattcctattgattgtgaaaaccaagttttgttgtttcaatacactacaaatacgggccgaacaagaatccaatggtggttgttacgcagtttgcaataagaggagtgtcacatgcacatttttcatcttttgttttgtcttattctaaagaacttagcgaaagatatgggaaaggtgtcacgccaccttgagagcacactacctacgaactatttttctttccaattttattttatctttgacttgctattttccctatttcattaatcgactacatggctacatactttatgatataatatacaggtcttaaattatgactggattatgtataatattaaaatacagatgcttcacgtaatagtgtaacttgatggagagaccaagatggactgaaataataattatagctacctacattaaaggctaaatttgcatggataacaaatttttaatttgacacagtttcgttttacaattttggtttggttcgatagttttttccgattgcagattttggtccgcattccttcggcccatataacactaaggcccatataaagtttcccgcgtaaaggaaaaagaatcgtaaaattaatcttccccgagaagtttcgaaatcagattaatcccgccggagagaaaatgaccgtcgccgccgcagccgaagaaccatctcagagacctctcaccgacaaagatatcattcgtttagcacagtaccaccattgtcaaaccggattctctctcccaccttaccttctctcaccgtcttcccacgattcccttctctcatacctcaaatctcgctcttcttcaccatctccgtcgaaacaagtttctgagtatgtaatcgctcttctatctctaatatctctctcccctactactccctctctctgctctctcctcgcttctcttctcatctcctacacccaaatcttcaattcctgcaaaatcccaagcgattctgattctctcaagacgattcagctcttcggtactctcttacgatacttacacgttaaggaggtgaaatctgtagttgattcgatcttatcaggtgtgactagagttatcactgttgatgaagcccaggtgttcgatttattgcctgtgtgctttgatttattgcgtagagaaggtaaagctagtgaaatcgatttcgttaattcggcgattgatcgtgttcttagttgtgaatggaacaaagcgttgttgacgaaaatggtttctcttgcaaaggagttttcatttctggataaagggagaaaaagtgaattggtagagaaagtgtttgttggtattaagttgatagacttgcaggatttgccttcacttgtgtatcaattgttggttcttgcctctaaaggtttttgcaagagggaagtgattggtggtgttgttggttactttgggtctaaagctgagactagagtagcttccgttgttagacagatagaaggaacagttcttcttcatgtgaattttgctgtgaagcaggatccttcattggggcaagaggttgtggcgttagtcaaatctgatcttagagctttcaatcattttacagtcgcggttctgttttccgttgctcgggttagaaaattcggtgagagctccttggggatgttgagaacggctttgcttactgcgtacaatgattacagactctccaagtaagtaatagtctcttacacaaagaaggctgtagggatacatttttaccaatgttttcgtcaatgatgtacagagattgcaagtggctacctgttgagcttaaggaagagagtttcctgcatgccaaattggttgaaaaatctttgctaagagcggtatgttgccatgattttttatttttggacttttagccctttctatcataccaggacagcattgcgagacgattaaaaaagtattttgttatattgtgttaggttagtgagtgccgatatgggagagagcatgtggttccaagtgttattcagtttggctttatgttgctagaatctgttgaagaaggtagatccaatgagtttggtgattcgaaaggtgtactcggtattgagaagcttagcattcagattctgggaaccctatttgaagtccatgatatgacgagaaacgaggttgattactactgccttaattattaatgctttatagactgacatttaaacttttatgctagttctttgcatccgtaacttaacaaaacatatttgagtgacattcaaattttgcagataattgagcaatgcaaatttcgcattctttctttgaaatgcgcaaagagcaagccaatagtaaggtcaataatgtttttaatggatagggttgtcaaccttatttccatgtgctaaggttgttgacttgactttgtaggttgttagggtatcttgtccagagatactcacttatcatgttggaatttgtccaccatctcaaagagttattggattatttcactttcatggagggacatatcagctgttttcttgtttctgctgttatcccgctcatcaaattcagccgtgatcttcaggtaaaatatgtgttgcacattctcttttgtaatactttcttctgcacatctgctgctgctagtgtttcatattgattatactcatcaatttgtatgcattttacttgtctatggaattgggaaaaaaaacaagctgttcacgccaagacctcagattaaatctaacttgatgatgcaggactacaccatcttggtgattcgcaaagctatgtttagacgggaagatacagttcgtgttgcagcaaccaaagtaataactgatcttatacttgcagagaaactagctaagagagacagctcatttactttccaagactcagcaagccaagccagttccagtcagcagactgagatgagctgtattgtgaggggaaacctctttactgaactgaatgggttgcttcaaagatgtctttaccagcaggtgtctttttccttctttatcatgaaaagttactttcaagagtatgaaaatattctttgagctctttggttcctacatgtaggcaagagtgaaggaagtagtttatgatgggcttgtgaagttagtcctgattgatccatcaagtggaggacatgtgttggactttcttatgcctcattttcttcgtttcttcggacaggtaactgtcagcttcatccctccatgcttgacaaaacagaaaacgttgatatatatatatatatatatatatatatatatatatatatattgtgaacttctctctacccttgactatttttacagggacttgctgttgattttttcaacttttattgttgaaagacacaacctcacacatattttgacaacttacgattatgctggcaggacacagattttcaacttggaatcacttcatgcattagagtagaaggtgacaaatttactattgaagagcccttggataggcttctcttttgtgtctcttggattttacttctccagcagcaaaacagctctgatcggccttccgatgctgcgtggccatgctttggtttctccctttcacaagataatgaggtattgctacagaaagaactggttttgtgttacctaatagagcatagctgtcaataataacgtgtgggtacattcaaatttcgtatggcagcagcaggttggaagaaacctatctcatgaagcgtactccagtgctttggtaaagatccgaagcttcttactaggcaagaagttaggaggtacgtgacaaatgatcgttcttaaaaaaagccttgactagttttatatacctgaacacgtttgatctgctgttacatttgtttgctttcaagtctggttcgtataggttgtgtgttaggcttagtctagtgtcatttgaagtacaagctataaatagtgagtcttctaaccgaaaggagcacctgtctcaaaaaaaatctgtttatttagcacatagcttctgatcttttcgtttgcattttacagatattgtagggcagtctcaggacacagtttctgcatctctcgaagaagataaaagaaaatcctattgtttgattatattgggaatcgttcaagtgctgctaaattatattatagtggatctagagaaacagccagaagggaaaaagggttctgtcagaaaggagattgtcgacttaattgatctttatgaatcactggaaaaggatgtgggaaaatcgaagcagagcaatgttggcaagagagtacgatttagcgcctgtaatgatactgatctgggaaacacgagtatcaatgaagagcgagagaaagttccctttttggctacttcaagtatctaccagctatttctactcagtttcaaactctatagcagcaaatccgttggtactcagtcaggctcgcaggatcacagccattcatcaccagcgaagacagaaaaatcaattttctccttcactttgcatgtttgtgttgggcacataaattcatctctttgcatgaaggaggaaaatccacttaaaccgttggtctgtggtgacatgaaggttctgggtcctccactgctaaaagtagtttacctgctaaagccagagccacctctagctactggacagacgaataaggagaagaaaggaaggaaagatgttgacggaagaaaacagtgtctacatctggccttacttagcttgaaagagctactcaatatatattcaagtggatctggtttgactggcttgcttgaagatttgttggcagtacctgcatccgaggatgctactttagaagagtgcagggaagcttcaaaaattgaagatccacttataaagagcatcgaaattttcatggcgaaaatcatgaagcccatgatcacagactttatcgcgcaaaactctaatgacgtagaggtaaaatcctttaaactttcctgctatttctcttgagtgcattctttaacgcacaggaagctaagaccataatattcaattgcactgttcagattctttgtgacataatgttgaagcttgggaacaatctaccagacaaattcaaacaaaggcatggatcatgggctcatcaaatctgcagaagctgtgaaacatctaacaccactgtggcaaagagcgttctgaaacttgccatctcttttactacatcccctggtgatctatgcatagccgtggaagtggctcaggagttgcaaaatatcatgggtttagacaaatctgatacgttagaagtgtctgagtcatacatggtcataaaccagtcaactagtgcttccgtaacttcttgtatattacagtctattgattcagcaatagttgacatggattgggccacaaagaagctaaagaacttttatgtggtctctcaaaagaacatccatctcagcgatgatactgagagcacagtcgggtcggttctcgaggaagccctttactcaatggctgagtcaacagtcagaatactttcttcctttgttttgatgaacctcaaaggtaagttttcacttctcactgatctgcttctcattaactctaactgagcttgtttaatagatgtttttggtgatctgcagagtcgcaagcagcgcagtttcttagactagcagttaggttttataaacaattggcacaaattgtgaagctgaggattgctcccaagggttgcaagcaaattcttcctagccttaaatttcaaaaactcgtggaactgacttgcaagagtctcacggttcctttatatccctttttatctgaaatgcaaaaggtaaaagttgttcaagcagtcattacattgatgtttcttcgtatccaaaagcgtgaagtgttgcttcttttccaaattcaggaacaacaagaaagtgtgagtcacaattccaagggaataatcaataagatcaaacaggagaacaaatgcattcctgatttgatattccagatagaagactgtgaaagatacctaattcagctaagcaaagttactaaattgaatttgttgaggcatgccaagcgcagcactgccagagacttcaaaataattgaagattcagaccctcctgcaggaggcgaagatggaggaaaccaggaagaagagacagagacacagaacaataatattggcgaggatgatttaagacaagagtcagatgatgatggttcagaagaaatgttgtccccccgaaatgctagttcagtatcatcaccaggattagattctgataaaacaatagcagcagcaacagaagaggacgatgaagaagaacaagaacaagatgaaggagaagaagaaagtggcgataatcgtcctaaaaagatggctaggaagagttgggttgtggaagattctgatgaagattctgaaacattttaggttccctgtttgtaaataaaactagcaagctcagagaaggaacacataaagattatatacttatagctcttaggtttttccttaaagagcaagtcttcatggcaggtcatctctacaaagtttgtattagggtttctattgctgcaagcttatgtgagtcaaatgttgataatagtcctaaaccagtttgattatataatttatataatctcaccatacttggagatctttaatagtgttttgtggaatatacacttagataagtacatttttccggagtcaaaatccaaaaacattttctcataaatcaagtaaaggacattgacctattttttaatctttttttacgtaaacgacattttgattatttaccatttgacttttaaattagtaagtgttttacgtgtgatttaaaacacgttattcataattgtacgctattgctattttgcccagaagacattagtttaccatgtcaagttatcttatagaatcacagaatttttaaaaaggcataagaatcttttcgccaacctacgcaaaaatcccgttttccttcccatcattttatcattttgccatcaaaattatttacttaatttaactatgacccaaattaaatgtaactatcttcataattcataataacaaattgtttttgttgctgttgtagactctatgctacatccactaaccttttgagtaatttagtgttgtgacttgtgcctctgaaaaaattgtggattatgcattaaaatgatggtttataagggaacatgtggtctgaccttcattattaactaatgtatcacaagccttatccagaagtttttagttattaaaagcatagttgggattaactaaccctactaactaaggcaactaggttttaaaatggttatcaaattcacaaattcctaagctaaaacaatttttttaataatataattaaattacatgtctgacgtatctatgagttcatcagcttttttacaggctgtataatttttattagtcaggcatgcaataactaagagccattgttaatgaatgagcaggtgtttatgtgaagaaggcattaatttaaagagagcattgatttgttcaactaaaaaccagcttctctaatcttttgcattaaattaaggaattgatcacaaagtattaaaccccaccaatataacaataaacacacttttgaaagtgagaaagagacatataggtaagggacctcagtgtcttttacagtcgaatcctatgaatgtggagcactaatttcatgggacacatattattacataaagacaaagtaaaatgccaaaatatataaatttaccccacattattccaaaacctaagaaaactagaatcttgtgagtctagagacttgaccaattgataatactctttacgttgccatcgtgctggtcaacactaaatattgatttttaaaaaatctaaaaaaattattgattttgacctaaactttccgattgtacatgactatatcgaatctcaaccacctgtatgatctcttgcttcttcttatttatcttttcatgatattttcattaggaattcggataaaaaagaattgcagaagcggatcgttgcattaagatgaaaattaacttcaaacttttttttaattgcaatgtgaaactcacattaatcaagtttttgcattgcatacgattttttgctttgttttgaccaatagagaaaccaatatagtaaacccatttgttatatactgtaaaccactaatccactatagtaaagccatttaatttaatccacaaatgtcgtctttaaaacgatttgttatatacagtatccttttaatttcaagttgaacattttggaacattccagtgatcgttgatatgatcctttccattttatacaactagatcaatacgtataaacttccggtgattgtcatttagaaacgtactttctgacacaaagaaccatacattttttcatcattatggaaaaaaaaacatataagatattttttgttaactgagcagagcatgttaatgacatgtttgtgtagtactgtattattttggacactatacgagataatgcttttcctttatgaataaaacaaagtaagcgatttgaaaaaaaggtttctatagtctatttctgcttgtcatatgaatatataacgcataacttcgattcacaatcaacctataaaagaaaaagtatgtaagttggtaaatgttttatcctttaaagaacgagtaatacagaacatgttcataattaaattccaaaaaaataaaattcttatacgtctacatgtgaaataaatattacacaaacttatgtcggttaaagcttaaagattcgcccacacattgaagctaaattcgcatgaaaccaagagaatatctttatttatactatataataaaaaaatatgtagtatttattacgtatcccttttgtttgtcggtttgtggattagatcaacatagtctatcactaatcacttatataatatcacaaattcccttttgtttatcatcttctaacaatttctaatcttttaaatataaagttgcatggttgcgagattttaatactaattgtataaacgaactaaataaactctaatctctaagttagttccatcaaagctaacttaattgtcaaaaaggtctcaatcagattaaaaaacactaaatgaaattaaatattttactaggggctcccatagatatgcaaaaagaaagctctgaaatacccaaaacaccctttcggctttacacgttattaaacaaaacgacaaaaattagccaaagggtaacaaagtcaacaaaacataagttttcagtttttgcgattctctctgcttcagtaagcgaaaccgcctgcttggtttctcggatctcgacggtaacgcgacggcgcagtcgccggagaatcaaatttcttcttcttaacatccattaaagaacaatactctcttctcaagctttcttcttcgtccataatcatctgcttcgatctacactccacgctacaaaacgctctatcacctctaaaacaaaaatatcaaagatctcaggaaacaaacaaaagaatatatatggatttagccatttatagatgatgacttacttatacatgtagatatctttcgctggaagaagttttcgtctacagagaaaacaatgttcgagaaatccagaatcttgataacaacgacggagattagtcgtgtccgtcgtcacggcggtggtgacaataatgttggctttgttgacgactttaggactaattaagacaccttcactaagagggtttttgttgttgttgttgttgttgttgttgttgttgttgttgttgttgttagtcatctccaaaacaatacttagtcccaccattttttttgttctctcctatctcatttctttcaggtgttaatagcgaaaagaaggaagaagaagttttattttttttggattcgccgagaaaagagttatagaggataggtgggacctacaagtgtactatgcgaggacgattgattttgatttcttttgctcgatatacgccacgtgtgtccttctcttcattacttgtgtaatcttttttacccatttttttgggataaatgtttacaatattatcaaattttacttttgtcgttttcttttgtttttcttatttactactactactataggagagtttgttttgagacgtgtcatctttaaatttcagtccttatttcatgtttttctagtctaagttgtatcatttctaactctatttcgtaatgctaagattagtagctttcttagaagatatttttaaattattcaactcttttggatctattaacgtggaattgcgtgattgatgatgttaatacgatgataaatcagctggttgggaaaaaatacataatctttttaatttccattgaataagatgaaaatgaattgataaagctgaactcgtgtatgatctcgcaaatattcaaactcaaccattggtcaaatttgtctacaactgaggttggattgcggtaattgagtttaaattttatcattttaaatatttaaattgaatttagcatgcatacacgattactatttttcattttatcctactatctgaaatgtggaatagagagtatcttcagggtttagatgaatagttattgtaatgtctttggctgttctggataaggggtcagttttttcatttatggtgtgacaatgagtggttgctcgactctggttattgctaggttcgcaggtttttattatcttatgaggttagtctatagatctcttacctttcttgatttttcgagcatggtgttatactgagtttggatattttactcctcatatctttgtatatcatatctgatcaagatcttgatcttatagtatggtttctatctaggcgtgaattgtcagtttgtctatgatatatatcatcgtattcgaaaaagtgtgaggtgattacaaattaggtaattcataaattattatgataaattattcagccttagccctatttgtttctccatccaaatggatcatctggatgaaaatgaaaaataatgtttgtttttcacaaattaacagatcatttggatgaatcatttggatgtttcatctgaatgactttgtaaatttaggctaatttgtgaaactcatttggatggatttggtagaaccattaggatgaagatgatttagtccaaaaaacaaatgacaaatatatcctcttttaataatgttaattttcaatagtttttttttttttttaattacatattatactaaaaaactctaaaaattgtgaaatcactaactattattttacgtcaaaattataaattcgtttttcccgccaaaatcgcaaaatcatattttcctccaaagtcgcaaaatcatattttctcgccaaaaccgcaaaatcatattttcctgtcaaaacgttaaaatcatattttcccacaaaaccgcaaaatcatatttttccgctaaaaccgtaaaatcatattttcccgtcaaaatcacaaaatcgtatttttccgccaaaaccgtacaatcgtattttcccgtcaaaaccgtaaaatcatattttcccaccaaaaccgtaaaatcgtattttcccgccaaaaccgtaaaatcgtatttttccgccaaaaccgtaaaattgtattttcccgccaaaaccgtaaaattgtattttcccgtcaaaaccacaaaatcatgttttcccgccaaaacgttaaaatcatattttcctgtcaaaaccgtattatcatattttcccgccaaaaccgtaaaatcatattttcccgccaaaaccacaaaatcatatttttcgccaaaaccgtaaaatcatattttttccgtcaaaaccgtaaaatcatttcttcattaaaattatatttggtaatgatgttaagtatttgtcatttgttaaaattataacatgggtattttagttatttttattagaatgagaatgtaaatgaattacaaaatgatcaagcaaaaaaatattcatttaaatgcatcatttagataaaatactaaataatcaaacaaccatcattcaaatgcatcatccaaatgaatcatgtaaatggatcatttggatgtaaatgccaaatgatcaaacaaacaggcctaagactgaagccgagatactaagccgtggtatcatgactcatgagatgtcgaagtcgttcaccaatagatgaaatgcggaatcgatgattagagttttcacaacacatgagatgtcgaagacaaaaggaaggtgggtcgggtatcttttttggcccatattgttaaaaagtaaaaactacaaacactatttttttatattttttttttgtcaaacaagctacaatgcaagcacatgattttgtcaagtttgctttacttcatcactagattttcttattatgcagtttcatctatataataagctaacactttctgctataaaacaatctgaaattggcaaataaaatttgaaaacatttgtgaacagttacatcatatattgacattatttatctctatgttggtgttgggcttcgtccatattagatgcataagtcagaaagccattaacacaagaatcacgagtttggcccaatgattggaagctttactttcggctcaagaaacattagttcaagtccaaggtgctgccaaaaaaaagacattagttcaagataaaggaaaggttaaaggatatttttattttgtttagtttctaaccattgtttccgtctacatttctaattttagttaatgtccgttaacaacttaacatacgaatgttctctttcaaataatgatgtcctctcatatcatatatctttaggaagatgtggtttttttttgtttgttttagatacaagcaatggttgattaattatgaaagcatcgctcttattgttgatgattagactactaagcatcatgagttcatgactctaaacaatcagtcaatcacacataaacataattaaaatttcacgtggacattcttgcaaacatgattatattaaatctactcttttaatcggaatgtgaatattaatgtgcaaagatattaatttgtaagtttttatcctctttagaattaatagtttaaataaaaaatatttggcttgacaaatatcgtgattgttacaatttggcatatccaaagaaatccgacagtgtttatctatatcagaaataagaaaacataacttattgggatgtatctatatatacatttttgcaaccattttaacaaataaatcgtggatttggacttatttacaactcaatgccattagcattaaatctttctccaaaataattaattttactttaaattgttaatcacattatcaatcaaatttaatccaaacaaacttcaaatcaatctcttaaaattagcataaacatatttgttaacaatattttaaaacaaatttttttgttaaaacaaatattattcttactaaacgttttttgtttaaataaataaatcatgtatttgaacttatttacaatgtaatgacactgacattaattatttaggaatgaaaatattaaatcttctaaatccttgcttttagaattattatgtcattacttaaaaggctcaaaatataaaaaaattaaatattattatttatatatctagactttataaaacattattaatatttaaacttataaaaagtttaatatatcataattttttaatattattatataatatatagagttttaaaaaatcttaattctttccgtcatattttgtgactcgaaattttaaaaataaacatatattaatcaattggcaaaaaatgtgtgagttatacgtcccacatgaactaaaatatttagacaatgattcataaatatatcataaataagattaacattaataaaataatgatttttttacaggatgggtttggcgggacgcgatttagcaggacgttacttaataacaaatataaagtataaaataaaaatattttatagcaaaattttatatatactaattttaaaatataaattgtctccacggtgtaccacgggttaaaatctagttatttagtaattatgcatctcgtataaaccagctacaaaaatatcagtggaaggatctttatcagcaagcatattagaaaacattaaaaaatgaatagtaaactatgagtggggaagcaaaagaagagcgacggcttgctattggagacaaagttcataccacacgaactagacgatgcatagtatagatataggttaggcatatgtccatgcatatgttacgtgtagattgaaagggcatcgagatcaacggtggagatggaagcaagtaaaaatagccacgtgtggaaaaagcaaaagaagagaagaagaagatataagcgacgaaaggagagaggatatgtttcctttgtgatgggaacatcacaactctgtctctattggtacttctagttcactacttgtctatgttttttctttcagtacttagtttcccccacgatttacacaactttcttctgctcgtatttacagattttgaagattatttatacatctttatatagaactacacatgaaatcgtatgaaagcatgcatgaatcatgattcatgtgtgtgaaaattgacggtatgaagatgtgtataaattttatacatctgcgaaaatcatatcttgtggccaaatatcgaccaattggaacggcttgcaaattctatgaaaacgatcgatatgaaaatctgatttacatatataatagtattttcaattaaaaatcattttcctcaatttctatatatgtgtatttagcatatatatatatatatatatatcaaataaaccaaataacttcaataataatttaaatatatgaaaattaaaaaaattcactactcatatgatataattcatcactatagaacttataaaataagatcctggtaaaaaaagcatcaatcttgtatttcagtagtttataatgttaaaatatatgtaatcaaacttctcatatttttattaaaaccacacatgggctatctagctaattcacacacacatatatatatatattgttttcgattgtcatgatgatcatttatccacgtaagcagagacaagatgtaaaatgtcactagtttatagggagtggagtgggaataagtaggaaaagggaaaaaattaaaggaaaggtatacataattttcaagtcgattttgggttgataattacagtgagagggagacaacacattgcgctatacctaattctaactagtttcatttctagactgatggaccaatcatatcactttctactaatatcgttagtttgagcttcataaatatcttttatcacattttattttagaaaggttgttgttagttctatgcatctttttaaaccacacgaagtttcaaaaatattcataataatatttacgcctttataactaacatattcaatttcttacattttatcatggacaaaaaaagagagtagttcctcaggagaaatacaaattcgatatctaaaatcaagtgttagtaatctattggttaatattttttcaacacaaagattatttcatggtaaatgcattttttaagataacaattgtatgttcgaacactagtttagattctctatatgattttccgatactcaaagaaactatacactcactttcttaacaaatttattaggccaaatatatactgtttcaccggagatgcattcatatttactatggattagataacaattgtatgttccgaacactattttagtttaatttagattgcctatatgcatgatttttttataaccaaagaaaatatacactcactttcttaacaaagattaaataaagagataatcataaatggaactttgtactaacagaatcttgagaagaaatttgatttgagttttgttcttttttttttgttgttttaaatttccacatgcctatactttcgtttgtttatgtgacgcttttgtacgacaaaatcaggtttggattcgtacttcttttaggtcaatacattcttttgtttaattctgaccaaaaataaagaaatatgttgtttaataaaaatgtaggatattgagagtcgtactataataaaaaaataaaaaaatctcgaactttgatagtataagagatatacgattaaatcttgaacttaatatcctatatttttctcaaactatacttagtttgtatttatacttgtatatattagagtccacacaaagaaaaatggataacaaataatgacatcaatattttgggaacccccaccatgccaaacccaactccatgttacaaaacaaaacaaataaaatttctttataaaatggcatcttctcttcatattttttaaatctctcatctcaataaacaaacactaacaatggtggtcgaagaagattcacgtctcataaatctccaacacaagtacaacccgacaatgcccgaggtactaaattaaatctaaaacttctattcttagtaaacttcttcctcagatagagtctttcaaatatctcctctcttataattattatttttttatttaaaatatttaaaaaggtggtggaggagctgaagagaatttgggacataagttttccggtggccgccatgagcatattaaactacctaaagaacatgacatccgtcgtgtgtatgggacgactcggtagccttgagctcgcaggaggagccttagccatcggtttcaccaacatcaccggttactccgtcctctctggtttagccaccggtatggaaccattatgtggtcaagccatcggttctaaaaacccttcactcgcttccttaaccctcaagcgaaccatcttcctccttctcttagcttctcttcccatatcactcctttggctaaacctcgcgcctctaatgctgatgctccgccaacaacatgatatcactcgtgtcgcatctctctattgttccttctctttgcctgatcttctcgctaatagtttccttcatcctttacgtatttacttacgttgtaaaggcaccacttggcctttgatgtggtgcacgttagtctccgtccttcttcatcttcccattactgctttcttcacgttttacatctctctcggagttcccggagtcgccgtctcttcttttcttaccaacttcatctctttgtcgcttctcctttgctacatctacttggaaaacaacaacaacgacaaaaccacttccaagtctctttgtcttgatacgccgttgatgctgtatggttcgagagactccggtgaaaatgatgtgtggtcaacgctggttaaattcgctgttccgagctgtatagcggtttgcttggagtggtggtggtacgagttcatgacggtcctcgctggatatctccccgagccgaaggtggcgctagcagcagccgccatcgtgatacaaacaacctcattgatgtatacaatcccaacggccctctcggccgcggtatccacgagggtaagcaacgagttaggagcaggacggccagagaaagcaaaaacagcggcgactgtggctgtcggagccgccgtggcagtgtcagtgtttggacttgtggggaccaccgtggggagagaagcttggggaaaagttttcaccgccgacaaagttgtcctcgagctgacggcggcggttattccggtgattggagcttgtgagcttgccaactgtcctcagaccattagctgtggaatcttacgtggcagtgcgaggccaggtataggggccaagattaatttctacgccttctatgtagttggagcaccagtggcggttgttttagcgtttgtgtggggtttaggcttcatgggcctatgctatggcttgcttggggcacagctagcttgtgcaatctccattttgaccgttgtttataacacagattggaacaaagagtccttgaaggctcatgacttggtgggcaagaacgtcatttcacctaatgtcgatcaaattattgtcaaatgcgaagaaggcctacactaacagtttttccttctcttttctttttgttcttcatatatactatctccatttatgtctcaatgatttgcttttgttttaaaacttatacatttatgtaagtgtcttcattggacaaggacagaatgtaaaactttatgaaacacaaaactgttgaagattttgcattattgaagggagtggaatcgtggattggatgatgaagacttatatggatgcgatggctaatgaccatgacgtgtaatatatattgggtgcatgagtgtatatagagataccgaaccacatggaaaaacaagagctaattggccggaacacatgtgcaagcatgtgcatgtgtacccatacaaaataggcatcatattagtgtccttgtggcttctcgcttcttttctcccaccttaattatctttcacaacaactaaagctttaagctcatactttcagaaacctttaaatggaaatatatgattctcattttcattcaattgaatccaaactaatgtttacatgttggcagtggaataagcagttagtatgtttaatgaggtttaaaatgaaagaaacatcatatacacagtttcaaattactactgataaaatattataaaatttgtatcattcagatcagaaaaaatgtggcatagaattaattattaacaaaaaacaaaaaaaatggtgatcggtgatgaaagtaagttgcctaatttcatgcttgaagccattgtatttgataataactacgtacgattgcaagagaattttgcatgactatcttaaagatatattattattagccctgaatatattgcgtagatatattataaaaaaattgaatgcaaaattatctatgttccggtaagattagtcaatgagaaatggtaagtcttaataacaaaattttgttttttttcgccaacaatttttttagtttttttgggtaaaagtagaataaagaatcaacaattagaattagccacgaatatatttgggtgtagtgaaagtaagcccgatcgaagaagataggtggggaggggataaggagtgagacacattatgttttgtttcctttgttgttaacaaatactaagacctttgaggtttgacgttttttacctcaaaaaacttcattaccttccgttcgtacgtaccatgatgtgccctgcttaattaacacgtgttccttcaccttttcactgttttctgttgtttatattaacactttggctcgagcaattttatctacaatagtcactattaaaagaagttttgataaatcttgaattgaaaattagtcttaaaccttaccgatctctgtcaacatcacacgtacggggtttgcaagaacaaatcaaaggcttaagcgtaaacttgacaccacaattattagttgttattgttgaacaaaataaaaccaataatgaagcactaataacacaacataacgtgcgagtattttagtggatatagtttgaaatgaagttaaacttttaacataagtactttttttcattttcgaacgctccgacatcttgtagaagttcctgatagctcccgaatgcttatgcatctgtcaatatttgtacaccacattccgtaatctcgtggtgtatgctgctgaatccaaaccgtatcacatccacttcttcaagtaagactgagttaaatataaacagatgcggtgtgacaaagtccttgacaactccaccaaatctatgtgctgcgatgagacgaccactttcacctatgagacgacaatatacagtacaaatattgttcctttcgcttgggaaaagtaggatgcaagccttaaatcttaaagatgaagaacaaacattttcatcttctagatggatggtcaaggaacctcctctggcacggtgactgaactccagaggaacctctttgccaggtaagcatgctctcttgtaaacccattgctgcgtgattactcgtcgtgcttctccatcgaaattcatggatttgctgaactcgactttcgcatttggacagtcgaaagatgaagatattctctcaagtgattcacaatttattgctgatagaatcttgatcgaacttggaagctctggcagtgacacaagttttctacaattatcgacgtataagtagtgtagccaagtgagatctttgatacaatctggaagcctttcaataccgctatccgttaggtatatatacactacactcttggggacatgtgaaaatatcttgaggtttaggcagccactaatatcaagggattcaaggcgagaccattgactaattgatggaggtatttcttctatccctgtgtttttcataaagattctttcgatgttcttcgaaatatctggaaaacttttcaattttaagcatccttccatgtcaaggacctcaagagatgccaaattgatgtgaagcggtataacttctagcttttcacacatagtcagcctcaaccattttagtctatgaagattcaagacagaggaaggaagctccgccaaactttggcaaccttctagacacaatgtctcgagacttattgcctttgaaagatccggaacttctactaaattattggagaagctcaaatctatcgtcttgagatatgcaagcgtctgaatgcaagaagcacaacaaccaaaaaaagaatgtatcaacaaaatatcaatagtataataacatatgcaaacaaattaaataacatatcaataagatgatgatatatgctatgcaatcaaagaacaaatcaataagatgagaatatatgcaaactaagaacaaatcaataagatgattatatatgcaaacaaagaacgtatcaatataagataatataataataacatattcaaacaaagaacacatcaataagataataatataggctaaagacaacatcaataagttgataatatatgcaaacaaagaacacatcattaagatataaaatatatgcttatgtatgtttgaatcattcgggagagtttagaagaaatgaatgtactacaacacttacatagacaaataacatgtttaaatattgatgaactctttaaccatttttccatggacccgcatatatataaagattgatgtgctagagaaggaccaagtgggctagtaagttaatgtttaagcataataagaataagaaatttcttaagattaactcattttaataaaaatgaaaataaatagaaaatatatagttttcgatttctatgctgataaaatagtgaacactagataaaccacccaaaaactatggttttgtgattaacatagtttttgtaacataaatcgaactatatggttttgtgatttcggttattacgaaaaatgatgtggaagtttgggaagacgatgatggaagaagattaacatcaaacaaataatcattcagtgatgtgtttgtaattttaagcaacttcaagttttccacccttagtctaaacacttttatcaatatcacttaattagatgacaactttgggcaattaagaagatattgaagtgattattttagatctctctctctcttttttaaatgtaattttctaattttttaagctatgtagagtagtactagagagagaactaaggttctatcaatatgaagaaactataataagtataagaaaaatatacatatgaagaaactataacaagaataagagctaacctgggttccttcccaaagcttcaccactttgctatgcatcatgcggagttccacaaggcattctggacgaaattgagaaggaatatacttcatgggatatgaatcccaatgtaataatcttacagcaggcaagtagtttagccctcgaggtaggtggagtttcaaacttgggttttcatcaattttcttgttgtagaatcttaggaactttagattgcgcatgtcttcaaaaactctctcactcatgaagacatcgttttggatctcagatgtatctaatgatatgccaagtactgcttctgaaccctgtaaatattgttaccaatgaaaaacaaaatgtgtgaaatgaacgtcaaacaagttcatcaagccaagctcatgaatcatgatcaaagtttgttaacatacgtactgtattatttgaaagtatgttacaagtctcctttgtattgaacaagaactgacgttttccaggctcgcttgaatgctgacaaacgacttcttttcccatttttagtaacaaactatgcatgactatttctctatcatcatttatttgaatgagagatttatcaagcaagagttggagcccaagactcacatctaagtcactattgacaagcatttgcttcacaagatcaatgttctcaccattgaacatacatgcaatgtgaaggaaca

SEQ ID NO: 861 - DNA, 86001 bp, Arabidopsis thaliana
aagctttatccctaatatgtaagtcatcatagctgatttttaatattttctccaccttttcgtcaagactagttgtgagccttcctagttcaagtttccaccgatccttgctctttccgcgcatatgagaacctaacacacggagacctaatggaagatgaccagaaagctctgctacttcaaccaccacatccatgaaatcatctggtgccacattttgcttgaaagcatagaggcataagatctcaagtgctgtttttctgcatggtaatttgacctcgtatatatggtttatctcatgtcctaccaatatctgtttatctttggtggtaacgatgatcctacttccaggaccaaaccagcgtgtctcgttagctaaggcttctaattgctctaccttatccacatcaccaagaacaatgagaactttttgcttctttagcctttcttctatcttccatagatgatttatcttcctatctttttggttgaatattatgggcaaaaactctttttgtaaacgagcctgtaagttgtactcgccgccactatcgacaattctttgatagtttcccctaacgttctccatgaaaacagtaaagcggaagtcaccagaaaagcggctgtgtaaaacccttgcgatggtggtcttaccaataccagcgggaccccaaatcccaaccatcctaacgtcatcatcgtttaaacataataattgaaccattttctccatatgggattcaattccaattatgttttcaaaatcatttgacggtgtaccattgagtttggccaatatatctttcgcgatttttgtgagaaaatctgcctcatttttcctgcagagaaaacaataccaagcctaaagttttgtctagaaaaacctatgttataaacgttctaaattttgtgtgaagactattttttttaaatactggtatttgaagcctaagaaatttcaccgcctcttaaatcatgttcatttgcttttttttttttttgtgataatgtgatttatattaagaagggtgcaccaaaaaaataaaactctaaccagctttgtgaatcctctcccgctatatttgccgcttcggtcaaggctgccttccatttattttgtgtctcatcattcttcccttcacaggtttctcggaagcctctcccaaatttcccggtctgatttcttacatcggatggattcactttgtagaaaatcggtattagcctcctctcctccttgcactttaaaatttcaaccaactcatccaaacaccagcttgaagaagcatagttctttgagaatatcaccacaaagatcttagattgtcttacggcttctttgagctccaatccgattgtctggcttctttcgattagatcatctttgaatgtaacaattcccttgctttcaaattctttcatcaagtggctgagaaagtttccgcgaacatcttcccctcggaagctggggaagacgtcatacttccaacagctactagagccagacgaagaacatggagccatgggaataatataaaacaattatttctatgttccttgtgtaatttctatggaacataatacatggagctaacgaatgacccttcttgtttaatttatacggaattaggtgatctatcgactatgtcagcggtttgaaaagttcaaaagtaaaaataagttaatggaggggaaaaaagttgtatgagctaatacatatcaaattttgaatgtgacatataattatttaatgttttttcttagttcaataataattgataagccaaatatgattgattcatattatattttaccattcttaaggacttgacaaaccttgcaatcggttttctaatattatcgtggacttagagaaattattagtctttagttaatcatttatttatgtttttttttgttgtgaaatgttaaatctactattcaaaaaaaaagaatatttacaacgaaaagagaagaagaataaagctcaactaaattttgaatttgaaaataaaaccacgaccttacaactacatctcttgtaattgtagttaagatatgagtttttaaaaagaaaatctaagctaacattaacgggatattatatatgttcttattgttttagacttgaaatcccaacagttcgcaaagcctttgacgttgatagccgctgatgtgcactgcatgtagttttttaaatgaataaagtgaaaaaacaaagttaaaaatcggtttagagtggttttcctccacgaccgcctcaaaccgcaataatggaaatcaaacggtttctattggacacgtgttatactttctatccatcgatcaaataattcggaagataaagaagaaacaaaaaaaaactaaaaaagtaattttcgaaattcaaatccccaaacatcacagcagttggcgctttcttccccctaaaaaacttcgatcgtcgcagtttctctttatcaatggcgattaaattcgtttcactgttaaatctcttcttcttcttcctcttcttcaatgcaatctcaatttcccaatccacaggttcgtttatgtcattactttatccattttactcgacgggctttgattttgagtgtttttcttatcttagatgaatctgggatcccgaaatttactttcagttggtcgaatgataagaacaagttcaaatctggtgaaatctctgaaatttcaatcaaagttctgggaaatttcgacaaccatggaaacgcttcgttgggtcagagagcttttaagcctacagttactgttaacggaaaacttgggaacagtacgtatatttctggggtttcgttggatcttggtgaagatatcagcaattggaagatctattttactccaatcatggttggtatcttcaatattgttatagatgaggagaatttcaaagtcctcgattcgtcgctccattttgaagtcgaagcaggttcgcgatttcttgagaatgttcctttaattgttttagtgtcagaaatttactaaaagtatgagtttttatactcttgttgtgaagggttaatgtacccatctgttagtgttgtttcttggatgggtcttgcaaatgtgtttgaagccgggatgaatgcgtcgattttgattcttccgaaggatgcattcgggaacaacatatcgttttccgggaagaagatggagtttcaggagttttctctgtctcttattagtgaaaatggttcatttgctggtgttcttaatagtacacacattagatggattgtatctggttatatttccattgattttgttcttgttacttctggaaaattcttattgcttgtggagaaggaaagccaaacattgaatggtggtccattacctcttgaggtgaattcaggtgattgggtttcgattccttaaactgttctcagtttcagaacgttttggacttttaagctgagaaattttgttggtttttgtgcaggaccattggatgtttccaattgtgtgagtatatggaagtcagagttaagcacatggcagatattttccaaaatggagatcttgttacaccagaaagatcgcttcgggaacattgtttctggattctacgaatttgatgctgatgtggtggaagtagagacgggtttgtccataccggtagcagatttccagtttgagtatgtagagccagggattcagttgatgtctttcaccttatctgaacctggaaatttcttgcttactctctctgatatgaagcacaataagagcatctctagtatgccatatgtgtatacagtatatataggtcagtgtttgcctaaactcctccatggtatgatgcttctttgtgaatgttctctgcagcacttatctcattttttttcttgacaggttattgtgatggatcaagaagtatagtaaatggttcagggatcaatgcttctattgctggggagtctcttggcttctctgtttacttgaaagatgcttatggttatccctcaccagtccaagtcgatagacttcaggtccgaatcgtactagagattgattcctcaattattttgccaaccatacagccaagagaggctctcaatggtataaacatattttcctgatttgcttactttcagtattggttaatttcttcactggtggcttatacaatgatttaatagggactggatcaagtcaccaagctgctactccattgtacgagaaacatggcggaagagtaagtagattatctgcatttgtgcttatgcataccagattaggcctgtagacttaaggttgtttccatcttgcaggcttcaggcaacctagtgactcaagcgagtatttttgacgtaacttatactcctaaaaggactggaatttatagaatctttatatcatctggaaacatagtcctcaatggaggccagcctttcatcaaggaagtatatgcaggtatcatctggaaacttccatgtgtaaaatgtccgctctccttgtttgtgaccagcacactcttgcttcttttaggtgaagtgaatgtggcagcgtgtagtgtgactcaattcaatggaaaagtaccaaaagaaatcaagaatgaaattgtagtgttgctcttggatggtttctacaatcctgtaccgtcacagccatctcggttaaagtttgagatcacctcagctaatacatcaagtttcactacatgggaatttgtagataataatgatgggacatatactggtagctatctggccatggaggttggtacttaccgaatgtgcatatcttttgacaataaacatatccaaccttgccccttcgacgtaaatgtgtatagcagtaagtccattacttttcttctttcaccatatatgattcttcgtttgcatgtttttgagattctgccatgatttagatggatactttccaagagcctatgatgatccagtcaatgtgtgggaagatgagtcaatatctttcaatccactggaaaacgactattttgctggcgacaatgcaagcatgctcggtttctcacaagtgaggaatgaatgtttcatttcctctgttttgcagatagttaaatcacttgacagtagcaaaatctttgtctttaaactgttgttttctattggttttgggatgttagccaggtcatggttctcttctgagagatggaaacctccttagatacacgccaatgaagaatttttcaggaaatgactcctttctttatacaatagctgatatcaatggaaacttagccgcagctacagtatacatctttgttcttactgctcctcctcagtttgtttcattttcgggcggattgcaagcaactgaagatctaatcagtcctagatatgggcaagcattcttcatttttccttgcttacataggttaatttatctttataatgaaattccacttcagctatatatagtaatcctgttcttgaatgttattatagtggcttctctggcctggagataagctactcagacctgctggagaacatttcagtaatggtacaagcactttcgggatcagtcattctgtctccgatgttgatgcagtttagacctcctggaagtggaaaactctcagttagcaatggaggtgaagatagaagggtcttaatcttagaaggacaagtaggagttatcaatcccgcacttcagtcgattcaatatctcgggtatatatgaaaccacaggtactatttgttgcatcttaagagagtttcaagttttattcatttcaactttgttttctttggctttgcctgcctcagaaatgagaattttgctggtgttgattctcttcggctgtctacaaagaacaagaatgggatcaaccatctggatgttccggttttcgttgaacctgtaaatgacccaccgtttattaatgttcctcaatatataatgctggagagtaatgggagtgagtcacttatatttcaccccgaaagagacaagttcaacttctcagttggagatccagatcttgttaatttccccggtaatgttcactcttgatcactttcaagctagtaactatccttttttggactgatgaaagcaaatttcaggtggtgaatctcatttcttagtaacattttccttggaagtcactgacggatttctgctgacaaacttaccgtcagagcttataaactcaacagagctgaagttcaaaaacttgttccaatggcagccaattcagacgtatgctgccatttctaaacacgtgaatgtcaaagctagtgggatcaggtttcgtggaactataaggcaatgcaacgacctcatgcaacagctgctccatcgcgtaaattctcttcttgatcattcagataaatgtttttggttcctcatatgtacattatcatcacaaatcttgtgtagggaggagagaatggtgcggtcttgactttgaaactgagtgacatggggaactacgggtgcttccttgactgtaccgagagaatttcactgcctcttcacgcagaagctcgcgtaaacctcattaggaagagacccttgagttcccttggagcccacggtacgtttatgaaatacttggttgtggttccattcagttttttttcaattaagctttttagtttgttaatggttctgataggttaaatctggtgtgattttgtttagtctaaatctgttttgaacatgaagatcatatattaaatgcatatatgaacgtacacgtaataaagagttaggtgattggtggtctggattctagtgtcgcttgaaaaaatggtttgattggtttagtattgtttcttaggcacacctctgataagcatatgtatattgggtagagaagtgataagagaggagtttcatatcttaattcttatcactcttatttctccggttcaaatagtttaatagtgttgtcacttggtcgcagttctaggatctgtgattgtagtggagtctctcgtggtcttttctctagctactttgcttctgttcttcacttgcaaatgcgcatttctactagtacacgagaaaagaatccaacacaagaatttgcagaaaccaacggtaactaaaaacacatctctcttgttgtattttcctatagccatttatattcaagcataaaaaggttattctctcttctggagcaggacaatgccgaattgttaaacagaaatctttcaacaacaacaatcactggttgtctacctgagagtatctggaatcgccatccgcagcagaggtatattttgggggaaatggtttaattgtataaaatagtatcgcttgttgaaatgtaatctgttctgtgtatttgtttgttggtaaagacacataggtgaaacttccggcaaccagaataagcagtagtctccagatattaacatttttccgttccagctagataaggctcgaagttgataaatctgagccatcagaatgttttttggtcatgcttctgttgtaaatgctcaatgattctataattacctttttggtttagctaccaagattaaattgattaatgatccgattagatttataaaaagacatgagtttggacttgaaactacaaatacaaaacatagaaacagaacacaaatatctgcattaaacagaacacaaatagacaaaaaaaagcactaactgtatatcttgatttagtttttgtgaatctaaagagaaccataccattctacaacacagacagaaaatttcacttaacctaatcactttgaaccatcatctaagttggttaagcttgtttgttattatagttgaaaaatccattcacagtagctagagttgtttttgttagtgatgactataatggtaaactttttctccctcaatctatacgaagagtgagaattctcttattccctccatacacatatatacacaacctttctgtaaactaagtttgggtttgcctttacttattttggcagaggatcggagagatccccgagactgtggagatggagcgtggtgatctctacgttacaagattgtataaagagcaatcgaatctggccaaattgacttttgtgtagtgaatttttatattgtacgagcttcctaatgtcttgatagaaacttttactctgtagatcgtgcattatcgaattttgttgttgttgtcatctgtgtttctattaataatgccattaaaagatataagaaggaactaaataagtttgcgaaaaaaaaaaaatccccacaaactatgctcaaaattgaaagataaataagtatattaatttgaggttttcaatgtatataaatctgattaactcatatgattattcatttaatagatttactagatcataacccgtgctatacagcacgagcattaatattttgtataaattaaattgtatactttgtttgaattacataaaaaatagtatagtataaaagtgatgccataatatttttcaatgttttactatttacatataatgctgcattagattgactttgtttaaaaatgttattgttataataaatacaacatatgtagttttaagtaaatgtgtaaaatttgtatagaagttattttggtaagaaacatgtttcctttgtattagaggatctaatttttggcctaatttagaattagtttttgtatagtattttggttatatttgtggacctaattggggcctatattagattatctttaatagggctgacgaaaaaacggacccgataaccaacccaatactcgaaccaaaaaatcgggttagggcgggttaaaattttaggaaatttccttattgggtagagttttagtaaacccgtggatatccgattggaccggaaattacccgttatctaaaaagagtattcaaaaacccaaacattaatttaatatccaaaatattaattatatgatattattttatttgattttaaatatatagtaaactgcgagttgtatatgttttcttgatattatttatattgtttagtgtttaaaattatacacttgtattttgattgttaattttagagtttcacctgtagtataccatcttatattaatatcgatttaaacccgtcaattctaggattttccagcttgtattaaaaattgaatcacatcatacacataaaaaaatctaatatgttattaattattgttgtatataagattataaattcttaaaataatatgcatgaaattgaatataaatatttaaattatgacccagtacttagtaataaatttttttaaatctatttttgacccgttataatatttttttatgtattgaacagtttatattcgtttttaaaagtttaaattatggcatatgcgaaaaaactctaattatttttttataacgatgatattattttttcgcaaaaatagaatcatataaagatgagaggtgaactataataattaataaaaaattaatatgataatttagatattaaatctaatttgttgattttaattggttaattttttggaaattaataatgtatttcattttttaatgaaatttaattaattaaattagtatttgactttttaatttttaaagagatgaattactttactctttaaattttatttctaatggcatacatatgtaattacttacaaaaagtaaggttacatttaaaatgtacttcccaaataatatagtaggatcatggtaaaatgttagttctcgaaagaaaaaatattgttataaatcataaacctaacgagctaactaaaatagcggcatcctaccaatttgagatttttcgtatatatattaaaattatccatttgataaacacttcatgataaagtattagttttgaaaataaaaatattgttcttgttataagaaaaaacacacacataaaagtattattggaggatctcattgttaagttgttaaccctcaacatttcgtctaaaaatcagacttttttctatcaaaaaaatatctatactttgtagtcaaataaaaatcttaatcaaaataatactcgtatactttgactgttgactgatggaaagatattagaatataaacattagagatagaaacaaatctgtaaaaatcttaaaattaggattatttatacggaatattccccaaaagataaaatcattgaatcataaaaagccatttatggtagccctaaatattcaggcgcggctttttttcttatttcgttttcattttaaaaaagtttttagcgccgtttattgccgcgcgtcgttttcgctcctcgtctcgtctccttttattattaccccctctctctctctcccactcttcctctcaaatcacacatcactgctttcttcaacctctctatctctcagaccaattagggtttcgcaatcttccagtagatttcgcttctcaacgtaagtttttctctataatctgtgtcgatttcagtctaactacagtgattgttaaaccctagactcggaaattttcctgggctttgttattatttgcgtcggtttagtcaatgcgatgtagtgaacgcttcgattacatagatttgtgtgaaaattttatagtccaattgcgttatagtgatgattttgttggtaattttgattttgaaactagggattttgaaaatggtggaaaatggggctaaagctgcgaagcgaaagaagagaccacttccagagattcaagaggtagaagatgtacctaggacgaggagaccaaggcgtgctgcagcgtgtaccagtttcaaggagaaatctattcgagtctgtgagaaatctgctactattgaagtaaagaaacagcagattgtggaggaagagtttctcgcgttacggttaacggctctggaaactgatgttgaagatcgtccaaccaggagactgaatgattttgttttgtttgattcagatggagttccacaacctctggagatgttggagattcatgacatattcgtttcaggtgctatcttaccttcagatgtgtgtactgataaggagaaagagaagggtgtgaggtgtacatcgtttggacgggttgagcattggagtatctctggttatgaagatggttcccctgttatttggatctcaacggaattggcggattatgattgtcgtaaacctgctgctagctacaggaaggtttatgattacttctatgagaaagctcgtgcttcagtggctgtgtataagaaattgtccaagtcatctggtggggatcctgatataggtcttgaggagttacttgcggcggttgtcagatcaatgagcagtggaagcaagtacttttctagtggtgcggcaatcatcgattttgttatatcccagggagattttatatataaccaactcgctggtttggatgagacagccaagaaacatgaatcaagctatgttgagattcctgttcttgtagctctcagagagaagagtagtaagattgacaagcctctgcagagggaaagaaacccatctaatggtgtgaggattaaagaagtttctcaagttgcggagagcgaggccttgacatctgatcaactggttgatggtactgatgatgacagaagatatgctatactcttacaagacgaagagaataggaaatctatgcaacagcccagaaaaaacagcagctcaggttctgcttcaaatatgttctacattaagataaatgaagatgagattgccaatgattatcctctcccatcgtactataagacctccgaagaagaaacagatgaacttatactttatgatgcttcctatgaggttcaatctgaacacctgcctcacaggatgcttcacaactgggctctttataactctgatttacgattcatatcactggaacttctaccgatgaaacaatgtgatgatattgatgtcaacatttttgggtcaggtgtggtgactgatgataatggaagttggatttctttaaacgatcctgacagcggttctcagtcacacgatcctgatgggatgtgcatattcctcagtcaaattaaagaatggatgattgagtttgggagcgatgatattatctccatttctatacgaacagatgtggcctggtaagcttactatcctagtattttgtactcgcatgtttctacgtctgttttttcttctgttgctgatgtataaggtatatacaggtaccgtcttgggaaaccatcaaaactttatgccccttggtggaaacctgttctgaaaacagcaagggttgggataagcattcttacttttcttagggtggaaagtagggttgctaggctttcatttgcagatgtcacaaaaagactgtctgggttacaggcgaatgataaagcttacatttcttctgaccccttggctgttgagagatatttggtcgtccatgggcaaattattttacagctttttgcagtttatccggacgacaatgtcaaaaggtgtccatttgttgttggtcttgcaagcaaattggaggataggcaccacacaaaatggatcatcaagaagaagaaaatttcgctgaaggaactgaatctgaatccaagggcaggcatggcaccagtagcatcgaagaggaaagctatgcaagcaacaacaactcgcctggtcaacagaatttggggagagttttactccaattactctccagaggatccattgcaggcgactgctgcagaaaatggggaggatgaggtggaagaggaaggcggaaatggggaggaagaggttgaagaggaaggtgaaaatggtctcacagaggacactgtaccagaacctgttgaggttcagaagcctcatactcctaagaaaatccgaggcagttctggaaaaagggaaataaaatgggatggtgagagtctaggaaaaacttctgctggcgagcctctctatcaacaagcccttgttggaggggaaatggtggctgtaggtggcgctgtcaccttggaagttgatgatccagatgaaatgccggccatctattttgtggagtacatgttcgaaagtacagatcactgcaaaatgttacatggtagattcttacaaagaggatctatgactgttctggggaatgctgctaacgagagggaactattcctgactaatgaatgcatgactacacagctcaaggacattaaaggagtagccagttttgagattcgatcaaggccatgggggcatcagtataggaaaaagaacatcactgcggataagcttgactgggctagagcattagaaagaaaagtaaaagatttgccaacagagtattactgcaaaagcttgtactcacctgagagagggggattctttagtcttccactaagtgatattggtcgcagttctgggttctgcacttcatgtaagataagggaggatgaagagaagaggtctacaattaaactaaatgtttcaaagacaggctttttcatcaatgggattgagtattctgttgaggattttgtctatgtcaaccctgactctattggtgggttgaaggagggtagtaaaacttcttttaagtctgggcgaaacattgggttaagagcgtatgttgtttgccaattgctggaaattgttccaaaggaatctagaaaggctgatttgggttcctttgatgttaaagtgagaaggttttataggcctgaggatgtttctgcagagaaggcctatgcttcagacatccaagaagtaagaactattttttatatctggtaatgtgttcagtggtgaggtttcttcataagtttatctgacaatcttttttctttctttttgcaatttcttaagttgtatttcagccaggacacagttgttctccctccaggtgctctagagggaaaatgtgaagtaagaaagaaaagtgatatgcccttatcccgtgaatatccaatatcagaccatattttcttctgtgatcttttctttgacacctccaaaggttctctcaagcaggtatatacctctcttcacttcgtatttgtcaattatttgtgtacctagtttcttaaggaattcatatagttgtgtctaggatttatatgttatgattattgttgttctgatacaaagttgaactttttctctatactgtcttgtaacagctgcccgccaatatgaagccaaagttctctactattaaggacgacacacttttaagaaagaaaaagggaaagggagtagagagtgaaattgagtctgagattgtcaagcctgttgagccacctaaagagattcgtctggctactctagatatttttgctggttgtggtggcctgtctcatggactgaaaaaggcgggtatgtattatatccagtcaactcttaatcttccaaaatgcttgaataagttgtattaatattcatgctatatgtaaaaggtgtatctgatgcaaagtgggcgattgagtatgaagagccagctgggcaggcttttaaacaaaaccatcctgagtcaacagtttttgttgacaactgcaatgtgattcttaggtaaatagccaacaagttatcgcttactcttttagtgtggctattttttgcattgtgatcagttgttgtgattaattgcagggctataatggagaaaggtggagatcaagatgattgtgtctctactacagaggcaaatgaattagcagctaaactaactgaggagcagaagagtactctgccactgcctggtcaagtggacttcatcaatggtggacctccatgtcaggtatatatttcagattgtggctatacttgtgtaaatttttcgttgaataagtgaaaagcccttaacctgtgcaatttggcagggattttctggtatgaacaggttcaaccaaagctcttggagtaaagttcagtgtgaaatgatattagcattcttgtcctttgctgactatttccggccaaggtattttcttctggagaacgtgaggacctttgtgtcattcaataaagggcagacatttcagcttactttggcttcccttctcgaaatgggttaccaggtaaagtcctaacgcttttgttaaattgatttctctttagtagaagttggcatgctctgtgaagaatggtttgcgaagtacaaaaattgacttaaatctcttaaatatgatgtttctatgatgtttcccaggtgagatttggaatcctggaggccggtgcatatggagtatcccaatctcgtaaacgagctttcatttgggctgctgcaccagaagaagttctccctgaatggcctgagccgatgcatgtctttggtgttccaaagttgaaaatctcactatctcaaggtttacattatgctgctgttcgtagtactgcacttggtgcccctttccgtccaatcaccgtgagagacacaattggtgatcttccatcagtagaaaacggagactctaggacaaacaaagaggtatgataacacatctggagaaaatatctatacatacatatttgctaaacacaaatgacgtgaacccattaatttattaatttatgtgggggaaattcttgtttcttgcagtataaagaggttgcagtctcgtggttccaaaaggagataagaggaaacacgattgctctcactgatcatatctgcaaggctatgaatgagcttaacctcattcgatgcaaattaatcccaactaggcctggggctgattggcatgacttgccaaagagaaaggtcagtcttatacatcctacctcaggaatacctttgtcaggttgactacggtcaaaagaattgcttttgaaactagaaatcaacccaaatcgctttgttttaatatcacaggttacgttatctgatgggcgcgtagaagaaatgattcctttttgtctcccaaacacagctgagcgccacaacggttggaagggactatatgggagattagattggcaaggaaactttccgacttccgtcacggatcctcagcccatgggtaaggttggaatgtgctttcatcctgaacagcacagaatccttacagtccgtgaatgcgcccgatctcaggtaagaaaaactcttctgttcccagtcagtcctatagcatcagttacagacttagagattgcaaagcactgaatggttttgggagatagagtagtaatgttagctttatcgatatggccttttaagcgaaattgttgttaatgaaaactgcaggggtttccggatagctacgagtttgcagggaacataaatcacaagcacaggcagattgggaatgcagtccctccaccattggcatttgctctaggtcgtaagctcaaagaagccctacatctcaagaagtctcctcaacaccaaccctagataaccacccaaatttggcatttcctttttcaataatattagtcattatgatccttgtcttgaatgaaactcattggtgctgatacttttgataaagaaagcctacgaagagtttttgtatattccgtattcggattgaaaaatctcattatacaagcaagcaatgatgtctatagactatgatttatttgccttgtgaattgggttgaaataatattgcgtcgaaaatttaaagatatgagagacagtttcaatgatattgcgtcgaaataaagtttgtccagaacatgtaaaggtttcagtcatctatcaattttagactcttgaaaaatgcactgtacaacagttaataataatataaacttcaatattataaaaattaggtaaataaaaaacacctaaaacagtttataattatctcgcatcaaccaacggaaagaaacaacaaataacgggagctggttattattaccttaagctacccagtcacacttatgtaatggactcatcatatcctataaaacaattgggcccattaggcccacaaaccaaatctaaacttatcttccacacctcccaaaacaaatcttattaatttctttttccttttttgatcctataaaaggataattctgcaaattgatgtttttattcacgtgaccaagtaaattggaccggacatagaagaagaggtagtgatcctctgctgtcgctccatattaagctcccgtagactcaaatactgaactgccgacgtcgtagtcatcggccggtatggtgtactcgaaccgctccaactctctgtcacgtaaaccggacctgatatcgaaccagctcgaaaatttctagctctagcaaaatgaacatcgctacgatcgtcgaactcattgtctccgtcgttttcgccggagcatcttccaacgacggcagaggagattggccatttccgccacttaaagaagaacaaagcgttcttgcaccataaccaacgcttcttgttcttgttcttgttgtggagagtggttcggatcaaatcgtctttcgagataggtttttgaagtttgaactgaaatgtgtcaatggaggaagacttgtgtttctttgcttcttccaaaaccttaagatatacaaaaacaaaaaaaaacagagttagctttatatcgaaaccctaggaacaatgtggaagaagaagaagaagagaacctgaaagtaatggatctggggatcgaagccataatcgctaaaatgttgagattggagcattgggaaaattggagatatgctcttgttagacattggtgaagtgactttagtttttagtgtttcaagagaaaaggtgttctagtgttagtgttttggttgattcaatgcttcttcactctcttgtctctttctaccttcttttcggttagtctataatctatatcccaaatactttcaagctatttaaaaaaaaaaatggagatccgtatttaaaaataataaaaagttagaattgtattctgtaaccaatcacatgggtatggtttcttattatacaaaacattgtcgtaattttgacgatttttgttttgttttgcttttgtatatatgacccactagaaacggaaaagtaatactatatcttttgttttgaaaatcttaagatccattgaacatttaatactaccaaggaatttgcatgggtccttctcatcatttattcttccacacatttactatgtttatgtaataaccattaagaatttgagatgactttcacaaaaagcatatgacactttactccaaacgagtggttctttaatacaagaactaggttaaaattcaggatgctagaactttgtattaaatggttcttttattcttttaagttaaataatacttttatcaaaaaagtttatattattagtggttccctgaagtaatatagttacattgatttattagtggaagaagaagaagataaaaaaccatgaaactgaaagtagtggatttggatatcgagaaactaggatatttgttgttagacatcggttaggggttccaagagtaaaggtgctttgcttgatttaatactctcttcagtctttactctcttgtcactttccaccttctttttcggttagtccattcccaaatacattcaaactcaatcttaaagaatgcgcacccgaaaaataaatgattaaactagaatctgtactaaaataaaacaaaacaaatcaaaaaattacaagaaacaagaacctaaaaatcaataacatcaagcttgtaattctgctggttcttcacgttgacctcgaggaaccggtaccaattagtaataaaggtacaatgataaggccaatgatcaaccacaaatctatatgagttttactgatcaacttatttgtaccaaaaacatagatccaagcctgaccaattttgtcctaagagcacacgacaagccttttatcttcaatgtagtaacttggctgagagtaagatactagattcggcaagtcaggactttaagacaagacacgcatataaattattcaccttcatttttttttttaaagagcacacagaaagtggaaaattcaccaattggaatctactgaaaattccccatgtaaggcacacgatttggtggaatccacaagttaccacgtaaaaacctagcaggagtaaatcgaagagcttgcttgggcgatagtttcttaattccaggccacttaacacgttgggcttggtttgacccaggcccattattctcatactcagcatagtaaagcgtattaagtgcaaaatcaccattccaaggaagccatcccgctggatcaataacgtcgtctatggttgttcccattataatggttcttgaaaactctttccatggccttccaagatatgctttgtttatagattttacgggaatatacgctggttctccggtaatatggcagttttgtagcacgagtccggtggattcacgtttatcggagcggccttgggctgtgatcatgcaagactgacttttcatgggttttctcacaacaatgttacagttttgtaagactactataccatcgccgaaaatgaagtcaacggtgcccgagactgtgcagtcacggaagaattgacgatgagaatggacgtagagtgtgtcttggtaaccatcgatttggcagttgtagaagacggccaaatccgccgagactcttagggccacagcttgatgtccttcgggacctgcagtgttttcaaacccgatgttcttcgccgtgaagttatcaccattgatcgctgtaacaaagtatgcatgttaaattgggttaactagatcgcacaaaaacaagtagcaaaatagtaattacgggagacatattgaaaaatagcatgttaaaaatgaaaaaagtgtcactgaatgaaaccatgaaatataaagctcgcaattttcatcaacataggggtattttgcaaactaaatgtcttcatatcacttttaccaacttggatataaaatttaagtcctatcaaatttttgataattatgtttgtggttgaaatgtgggaatttttagggattagaaacagaattggactcaccaacagtggcagtaaggtatgtcttgaccttgccaatgtaatagttgagactaccagtgatcttagttttggttggtccatcaccgatgaaagtgacatgagtcattttcttggtgacgtcaactttctcgttatagacaccttgcttaatgtagataacaaatggcttttggttggctttaggcactgcattcaaggcttcattgatagtcttgtactgaccacttccgtcgtgtgcaaccaccacgttagctttcacacctcctttcgttgccatgagccgtctagtgtttggtccaacccaacttggtataccgtcttccgccgacaaaagttttcttgcgtatttaccgagatccccggttactcctgccaccaaaaattgtagtcttgttcattcataattcttgtgtaagacttaaacatgtatataaaatgttttacctgtgacgttgaactctccgagaaggttagagatgttagtaatcatggcaaggccattactagtgagttctctagatgttttaaagattttctgcatgtcttgtgaaagtttcgagttagtttcttcaaacgtatccatacatgtttgttgataagcaatggagccactaagccaaacacgaagatcttcgacaaagtcctcaatctgaggaattgagaacccatcaaagttatcaagacacttcttcagatcatctgtagcatcattcataagcttctcacacaactccaaagcccctttggtatccttgtcattagctgccttggctgtcagctccacggaagctttcttgatgctatcttctatggatcgaatggtgacgttgaagccaagcttaatgagatcaagaggctgagtagagtcaggagaagctttcatgagactattgacacaagtctctttgtaatcagtaggtgcacaaactgcttcaactgccgtggtggctgttttaatctgcacagggacgattttttctgaatgactggtgtttcttgatgttgtgatgccaacagcgacaaccatgagaacgagcaaggctgtgataaccccagcaatgatgcatttcttctttttcagttcaccatcaacccccatttttttgtctggtggattcagtttcaagagaacaaaagaaaagaatttagttggaagggcttaagagccccttgtgactctgttttggttagaagatatgagagagaagagtggacttaacaaaatataatgaagaaacaaagtgctattgttaggatttatgtagaacatgaggctgtgaattataaggcatcatgtcagattttctgtcattagagttttgttttcccaacaagtcaaggttttagctctctgaccaatataacaaggttggtgtctttacctctaaaaatagtaactattgttagatcttagataccaaccagtaaatttatttgttattgatattaagagaacagccaaaacaacattaacacaaataagtccaaaatcaaaccactgaaggaaacaaaacccaacaatttttattcaagataacacaaacaaaagatctaaagaaagtgcaggaaataaaatcctaccctgtcatgatcagttctcatctgttgccagcgggattgaattggcctgcaaaccgaagaaaagaataatgtaagtaaagtagatgtagacatcaaaagaataacagtgggttacactaaccaaatcacgaaatttcaatgagtaaaacatctctaggtaacgtcgtgtttctctcctttcgagcttagacacatgtttccagaatgcatagactccagccagggtaagcagtctctctgagtacttcttccatgtgtacctatacatgcaaaaatccttattaagccatcatcttgttgaagcgatacaagttgtattgttaagcctgtcaaggagaatgggccaacctttcatagattcgcttgagccctccttcagagattttaacccaatgatttggattggtgttacaggtctcaaagaagctgaccaaggtagctgcaacctggtctggatgatatgggtcaatgtggaacccagaaactccgttttcgataatctctgcgggtccaccatgacaggtagcaaacgttgggagtgcacaagtcattgattccacaaccgtaagcccaaatgcttcatagaaagcaggctgtggtggaaaaagagagattagatggtctgctgactcaacaaaaaaaaaatccaaatacaagggaatttatctcatgttacctgaacaaaaacaccttttgtgtctgcgatataacggtaaagctcaccatttcgagcacggttcatttgagcagctatccacctaaactcaccgtgtaaatcatactgctcaatcaggctgtgcatcttttgtatctcagccatttcctctctatccctggactgattctcatcgatgtagccaccgactataacaagatttgcaagctctctaagcttgctattcttggcatagcattcaactagcccagtcaagtttttcaccctgtcaagtcttgccatagagaagatgattggcttcgattggtcgctcagtaaaccactgcatcaacacaagaagattgagacatgcaaaccaatcttaatattatgtggttgtctgagattgtttttttaattgctaaatcagaattgttgtaagaggacttacacatgctcatcattctgttcggcactaaagaggagttcttcaattgactcatgaagggcagtgagtcttctttccttgtcagaatatggaaagtatatggtcatatcagctcctggagagactatattaaacttaggatcaaagacatcaattccatgaacaactcggtaaagaccaggcatagtgaaagctgtgtggctctcgtattgcccaacattgttcttgctgtgacaaaagcaaaatagtttctgttggcatcaaaccacaattccagaggcaataacatgcctttgaatagcggatgaatttttaccttcccgcaatctcttggtatgtgctggtgatgatgaaatcggcattattcatggcaattagatctgcagtgaactgacttgaaaagtgatacttatcttcatggtttctccagtaaatgtcagactcggggtacttggttttctctaaagcatgagcaatattacactgcatccgaaatggtaaaggagagatcagaacaaaagacaacaaaaaagaatttaatattacagagagcataaaacccgtcaacctgtatcacacctagcttactagctaacaaagaagcaacgagatttccatcactgtagttgccaatgatgagatttggtacaccctgcaactccgcagaaatttcatttgatgcatcctagtcacattgatagaagtaaagtgttagccaatacatagggcatgcatacacagctgaagcagattgtcctatgtgatacgaacaagtatattctttaattcaccgtaactttaagctaaccacatctaagtgaagaagcaagaataatctgcagaagttacatagaactctagctactaattaatgctaacctctgcaaaagtctccaggtatggccagacatcaaaccttgagatccacttgcgaagaattcccttttcagtcctaaatggtattcgcagaatgtgtgcgtgttctgtaccactaactctttctaacctctggttgcacgttgttccctttgcttcgggtagcagtcttgttacctatataagccagcatagaagcataaaattttattggaactcgaataacaaatactttcaaacatgaagaacgaagtagatgatagtgagcaagcaaatatacaatgagaatctttggaataacttccagtccttgcttctgtatcctaaggagcatctcattttccaatgcacgtacttgatcaagaatgtagacaacctgcaagtcagaacagtagattgtaagttgaatcaacagaggatcaccaagttctaagatatggaagtttccaactaaatactgtatacctgtccaccagtatcaggcagacccaagacattggcttggccaaagtaaccatgcggagacaaaatcacaacattgaacaccataggaatccttcctagaaacgtctccaagacagaaggatcaggtgcctggagtatgtccagaagaagatgcaccatttctgaaaccttctgtgctgtgtcaccccatcccctttcaaatcccatcccttgtagtcttcaccaaagaacattgccaatataagaaaaaaggcaacataatctgctaactaacaaatacagaaaaaaacagatatgacgcgaatagcaaaagatctttactcaaattcgaattcagagtatggtgttgccagaggaagtttagaaaggaactcctctgctcttgccaaagctccctgaagtatggggatattctgtattcgatcattcagcatcataggctgcacattatacagagagagtacagagtcagtgttatatactaattacgcattgtttatgacataagctacgttcaagtgtagaaaaaactaacacggccatcatgtttgtgagtgcggagaaactcaagcaaaggctccatgctttctttgttacggaacataattgaagagaggtgacgattgaggaactgaaccccattcccaatggatgatgaacgagttgggcgaggcaatgttgcattgaaaggttcaaaatcaagttcaaggagataatctccattggcactaatgaaaaaggttgagactttaagccaagcagaaaagaagtatagacacatatacacaaaaactttgctcgcaggatttacttactggccattaacgagctcttccttaaaccgaagatattcagaaacagttaaatgatctacgctcagctcatacacattcacacggacatattccctaacaccaggtctgggacgtatagccaaagcaacaaatggaggcaaaactatggcttcctgaatgcgaaaacttgagtttattaacaaatcaagatatatgaacacaacgtagccataaaatgatactcggatcctatatgttcacctctgcagactgcagaactttcatgaatggacttttgttaagatcttctaatgttccatcaactttcacagtcttaaggaactcatcaatcagctggtgggactgcaatatcccctttccctgggctacatatctaataaagataacaaccaaaaccattacccatgacttgagaccaatcacaacacacatgcatttataagcaaggctcagggagagagagcgagagggttaagaagaaacctggagaaaagagagaggagctcattgcgttgagcagagatagcgtcataaacccattcacgcatagtctcgaacctaccagtcggcatgattttttctcagaggcaaaaacacaaacacttacaaggcaaacccagaagacccaaaaggagaggaatttgtttaagaaaccaatccagcttatgtatacgagatcaaagaaagacgccatttttaaattcactgtagcttgatgagaagtggcgaagaaagaacgacacttggctgcagagataacaaaaaccatgggcgagtttcttcaacgtcaccaccagagcactttaatcctcacttagagcgtatcgcccgtagtggtgggcctccggtgatagccacgttcaaatcggagatcgcttgctctgaattttacgctatagttcgttaacacatatgaataagagtagaagaagacccgccaaaaatggatcagtttctttgtttgttttttaagcttctccactttcattaaatgatgtgtgaaagagtttgtttatcttaaagtaaaaactctgaaatcgaattaacgagaaaaattacatttggttgatacaaagattgtttattgactgatacacctattacaaaataaaactctcttaacagttaactcaacatataaaccacaaaattaaatcagaattctttagtcgaaaagactaaactttgttgccagcagctaaggtccatacacgcaagttaccactctcgtctccactgaataacaatccttgaggaccaattgtgagtgtggcgatcgtgtgcgtagagaacatccttcctctttcttgaaaagatggtaggtcgaaaatgccaacggttccgttttggtaagagcagaatattatcggtttggcttctgcatcatgcataccagaaagagcatgaacactactctgttcttgtctgcgagtttgaacaactttcaagattccgttttcagaataagcccaaacttttatggtcccatccaaggaagacgatatcaaacatttatcccaacataagagtgaagtgacagtgccggtatgttgcttcagggtcattatacattgcagggtgttgagatcccacatcttgattgttttatcgacagaaccagagtatagcatttgacctccaacagcaaaacaagtgacttcaccactatgtccctcaagagatgtcaagtatttgaatggatcagactcagagtctgtagtagctttccagactaagatactaccagaacttgttccagcaaaaagcattccgtttgcaatagtcattgcattcacctgaccaaccacccctgctgcttgaagatgcaaatcttgactggtttgaacgttaaaagcctttatagcgtttggcaagccaaggaaaacccaagggccttcactgattagagaccctgcttctgcgtcaaggttgatggaatgtacacactgaccagaattgcagtcccaaactcgcaatgtaccatcaatactgactgaaaagagtttatctgaaccctcagggagagcgatcccctttagttccttattgtgcccttcaagagaagctaccatggccaatccagggaaacaagaccaagagtgtaagaactggcactgctcacccctcttgcactttccatctttccaatacttacatacccattttctgagactagaagatctcattggcccacaagcagcattcttcctcgccaaacctaaaactggtggtttcggtgacacatcattggtccttggcatattattgccctcgggtgatttgtactcttttgacgtccaaaccagactccttgaaaacttatttggacggtcgtaagggacataaggtcttcttctcgtaactatatctgttgcgaaatcttgctgtctcgcaacaactccgtgtgagtagtatctccttggcgctttgtaatccatactgagagagagatcaaacgtatgtagaggaatctagatcttcgattagggttaacgatttctccaactcgttcggagagagccaacaaaaaaaggaaattttgagacggagtaaagaacatgtaaagagtagaatgatctggggctgcagaggaatggtgtatatatagatgagcgtggcggttacgctataataatttctattgggcttaactttaggcccatcattcgtgggtccaattaatgttcaattctatcattaggttaggtcattaattataccctaaaatctctgtactagtagaaaaaaagaggtctttattctgtatactaattactaattagagctaaatcaggatgagtccatcgcaacttgtctaattactgttagccaagaccaccctagagtcaatatcatatgttaacaatgatgtaaaccttttagtattgaaggccaaagtagtaattaatccattgactaacttcttttaaaccttgagacagtgaaatactaactcattcaacaaaaatggatcaagaacaaggaaatattctgattaaagccaatgtagtaattaatcgactgaataactaacaattttatgattctgattaaagccaatttattcggttatattcggtttacatatttgatttagaatgtttagttttattggtttggttcgagtagaataaaatattcactgttcgaacaacaacaaaaaaaattccttcatttctctctcagccctaaaaaagcttcacgccggtttgtttcaccgccgttgtgcttcttcttcttcttctacctgggttctctctcaaacaaacaaatctccgacgactcattcgttcctcccaggtaagcttcttcgaccaattttactttcgcatttttctccgattcacagaccctagctgttcccattaatcaggatttagccagaaacttctagggatctaattgtttttgaatctgaatctgtatttgagtttaacgttttgtctccttgtgtagaatcagaagatttagtgaaatggctttttgcaataagctaagccgtttcgtgaggaggcagagtgagaatgcttccatgattggctctctcaggtctttctctgctgatgccactcaccatagattccaccaggagactcacaattttcttgagccagaatactatattggtagctgggaagctccgagtgatccgaaagatgcagagagaaagcttgctcagcttaggagagattatgctaagaaagttcgagtgtatcgtaaagagtacattcatgagattgagatgcttcgtgttgagaaacagcgtaaggatgaggctagattgttggctgaacgagctgctaatgaagagaggcgactcttgaaggctgaggctgctaaggttagagctgaggaacgtaagattgctgacgaagagttcaggcaaactctggtgagttcactttctctcttctccgttctttgtttattgtatagaaaccatggtggatgtttgatcaagtagttggattagtgtgagatgattcttgagtaaataggagaatgggtttgtctggataaggttcatctagcatgtggagaatcaaattgttgttttcctcttgaaaatttggaaccttttcctagttatgcatcagggtgtagtagtattatatagaagagaacttcaaggtatagtattatgtttgtgattggaagagaactttagattagagctgatggagatgtatgactaagagctttgataaacgttgcttagcatcaagtggaggttttgatgaatcctgtagttatcattgtctccttacattagctgttgttgttctggttacagctttagcatcgtacctaacaatcaaaaataagatggattttgatgctggatcttgatgcttttaatgggaattcttttgagggcagtgaaacttgttagttagaagcttcctttgttcgggctgtaggtagatgagacatcgcacacacacacactgaccaaagcagtattcactgattcattaattgatttcacgtacttatgtctgcaaattaattcagaagagtagtaccactcctaggtttctatttctagtttgagttcctcatgtttcttggtcacagcctcagagcagtaatggtcatagtgcttttcttcttaaagttgtaaaactgattcaagcttgattcactgactggtttatgtgtttaataaactgtagataaaagaaagagcagaaaagctagagatgtggaagatgatgggccaaaagagggaagagaagatcaaagagagagagaagctactgcgtgaacagagttcactatggatcgagcaaaaagaactggagaggaagattacagaagccttggttgacaacgttgttctctaaaccaaagcttctcctctgaatctttgtttaagaaacaatcactttagtccttttgttgaagacaagtcttttttttttcttagagaagaaagcgaaggctgttttagcctttttgcatcaagcacataatgagaattgtggtcttgtgaccaatctcttgtttgttgtggttctggtgtcgtaatatcatcattaataagaagttttctcttgttgattgttatcagtagaagattgttttttggtaaatcatcttcctcattggtttcgaatataatgaacctaggcccaatagttaatcgagtaatgggcttagtaggcctatcagcgtgacatgttttgtaaatttatacaatgccatgagggacaatattgtagttttctataggaaccgaatttgtaaatttctagaggcccaatagttaattcgagtaatgggcttagtaagtctcttcaatgtttgatcgacaagtacaagaatctttatcaacggttcgtaaaaattgtctacggtgatagaaaagatgaggctgtaactagggttaaagtagatgatagcccgcaaaaaacagagtcggataagatcaatttggagggaaaaaggaagagaggaatgttgctggaccaacctgagagacctctcaagaaaaggagaaaatttgctataagctaatccataagaaaaaacaaaggccggtctcatcaaaagtactaaacaacacttgtgttgtgtagagttatgatatctagggacataaaaatctaaccgatatcgaggaagatatgtacaaatgcgaagatcagatgttcgaggtagatatattgatgggagctctaacaagtgtagtggagagtgcataagaagttattaagggagagatgaaaccaaaagatcttggagagaagttctacaaatgtgtagaaatgttatatggtggagatatgtttgaaatagtgacagaagatcatcaaagagttttacctatgatcgtgagccagttgaaacagaaactgcgtcatgtcacggctgcaagagagaacttgaaatctgtctggaagcaaactattgaaaagttttctgcaaagcaaagaggttccactccacaagaatctcaagtaaagacaacaacaatctggttttagaatgtaattttcattaggttaatatggtattggtgttggttgtgttttttttgtttagctaaatgtagacaaccgtctttatagattttaaatcgggtatataattgtggttatcagtatctaacttatttttcaactaaattaattttttatttttatgttaatttgacagaattatatccaatcttttaactgactatgtcacgtcaatataaaatcgagaattaatttggccggtagattaatctaaagttttatacagaaattatcaaacaaagtatacatgaaagcaaatcaacatgtccaactttttctgaatacaattcaaccataacaccgtcacatcacactgacggcgacaaaacaatgaaaaagacataataaaaacaaaacattagaaaaaatcaaacactaaaataatgttcttatcaaaataaatttacaaaaactaaaaccaaacacatgcactctcaagtaaaagacaaaaagatcgatttcagacaaccaattttcctttccacaacttttttcttcatgaagaagagagaaaaaaaacgtcgttttctctttctctccggtagtcctgtcggcgataatatacgttacgctcgttcttcaaacaagtttgtagccaaaatgctattaattgctaattagtggaaattaatgataaatattaataacgttatgctttcatttacctttacaagtgaaaagaaagaaaaattaattataaattcttaaattgttaatacgaatataaaaaaggctgtcatttggcgttaattttatttcctttttaatggaattattttatactatatgttaaaaaaacataattcgttttttcctatcatttcatttgtagactgttttctcaatcaatagaaaaaaaggcttctctgtgttgttctctgtggtcattcttctttcttttcacttcttcttcttcttcgctcttcttctcactgtcgggttccatttggcgcgaaaagttcttcactttttccagcttttttttgttctctgacagtttttttttttgtttggttacaaataaagatgccagtaagtgtaagtgtctttttataagtttagttctgaagtctcttgtctttcttttactctcttgtccgaaattgcttgattctcgattttgacgaagcttgaaaaacaaacccagttcgttaatggtttctgggtcttcgtcatttcactggatccgttagaaaaatgattcctttttgttatctattgattcccgatctgaatttgaagctcttagtatgtttttattcaggtggcactagttttgctgttgacattgagcagtgtgattctgattaatgggagaagttacggcgtcggaaacatatgcgatcgtggtcggagaccgagcgagagaccacacagtgtcaaaatcactgattttggtgctgtgggagatgggaaaacgttgaacacacttgcgtttcaaaatgctgtcttttatctaaagtctttcgctgataaaggtggtgctcagctttatgttcctccgggacggtggctcaccggaagtttcaacctcaccagtcatctcactctctttctcgagaaagacgccgtcatacttgcctcacaggtctgtgtgtgtgtctctctctctctctctttgtctaaagtcttgatcattctaaagagtaaagatcagagtttgcagcttaactgtttcatagacttctgattagcttcagagaatcctgtttttgaattgatgtgtagaaacccaaatttggttcagtagttaggcattgtggcttaggatgacctctggctccaattgctagcaagattggggattataaaaggatatatctcattgcgctggttttcagttaaatcaatatatatatctaccaatgttccatggttctgcattgttatcagtcagaacatttgtgtatttgtttctcattttgtcttttatttgttgttcttacctcaaccgtgtgaaggatccatcgcattggcaagtcacggatgccttaccgtcatatgggcggggtattgatctaccagggaagagatacatgagtttgataaacggtgacatgctacatgatgtagtagtaacaggttatatacatattttgttccattcatttcattttgtttgctaatgctaaataaaaactcactgttgtataccatattcattggcttaggtgataacggtaccatagatgggcaaggccttgtttggtgggatcggtttaattctcattctttagagtacagtcgccctcaccttgtcgagtttgtctctgccgaaaatgtcattgtatcaaatcttacattcttgaacgctccggcttatactatccattcagtttattgtcggtaaaaatagtttgaaaattccctcttattattatacctcctttggttttgaaatcatttggtaacctcttgactcgttttgcagcaatttatacattcatagagtaacggctaatacttgtccagaatctccttataccatcggtattgtcccaggttagttgttattatccagatatatgtgtaatttgaaacaatttgttgcagcactaaaatctcaaactgttatttttttcagattcttctgaaaatgtgtgtatccaagaatctagtatcaacatggggtatgatgccatttctcttaaaagtggttgtgatgaatacggtttatcgtatgcaagacctactgctaatgtccagataagaaatgtttaccttagagcagcttctggttcctccatttcctttggtagtgaaatgtctggtggtatatctgatgttgaggtcagtgatgctcacatacacaactcgttatccgggattgcctttagaacaacaaatggaagaggtggttatattaaggagattgatatttccaacatccatatggttaatgttggtactgcatttctagccaacggtagcttcggtactcatccggattctggtttcgatgaaaatgcttacccgcttgtgagtcacatcaggttacatgacattgttggagaaaacataagcactgctggatatttctttggaacgaaagagtctcctttcacttcgattttgttatcgaatatctctctgtcgattaaaaactcggcttcccctgctgattcttggcaatgctcatatgttgacgggtcttcggaattcgtagtccctgaaccgtgccttgagctgaagagttttgatagttactatggtagagctgaggccttatgaaaccaaacttcattaggaatgatgattcatatttgtttaagagagagcaaatggttctgattcttttcttttccccaaaaataaaccacagtgtgtagaattattacctgttccttgttggtgttgttgtccctgttatttgcagcttgtgagattaatatatcttgtacaggttcatttcttcattcatgtgtaaccaaagaaattttgtattagcccagtaaccagatattaatttttttaaatatttgggcctcgttaaaaagcccagcccaataacaaagagctgcttcgtaaaaagagacgtcacgaaaccattcgcttaccaaaccacacagagacacatctcttcattttccaaccatcttcttcttttcgccacacccgtaaatatttactttttctcactatgttcaacttattattattaaattaactaatttagtgtatgccactagaattatttttatataaaatatttttcatcaccttcctgattagataataatataatcaaaaattcacccatttccttcatcttccccaatctctctaaaaccctagaaactcacttcctcagtttctccaactctgtacttcgtatcatcaagcgaaaccctaaaagaagcaatctttagtctcttctcttctttattttttctggggagaaagaaatttcacttttttttatccgatttctgcttcatctgggttttggatttttgcgatcgattttgagaaattagcaaacaatgtcgggttctggaggagtttcaatcgcacgtacagcgatccgtggtgagaatcggttttataatccacctccgatgcgtaggatgcagcaagaggcccaattgcagcaacagattagggagaagcaacgtcgtgatgatgaagatgaggttttgatggataaggaaaggagaaaggctgctactgttgctccgaggactactaggaaaggtcttggtgtgtcggagagtaagagtcgggttgttgtttcgggttcggaagtatgtgccggttcttctgattcttcttccgggtcgggtcgggttcttagtgatgggtctaacttggatcggttcttggagcatactactcctgttgttcctgctcgtttatttcccatggtaagcactgttttcaaatctattgggtcttgatacttattctgtgtctgttgtggctacttgaacttgatactatagtgttcgttgtgtttgtaatctctgtttgatattatagagttgaattggagaagactttgagttttgtcatgtgatttagtgtagaactcagttgattttgtattatggcttatgagcattgctttttgctgcaatttgttttgtgtagaggagcaggtgggaacttaaaacccgtgaatcggattgccatacgtattttgttttggaggatctttgggagtcatttgctgaatggagtgcatacggtgctggtgttcctttagagatgcatcctctagaaatgcatgggaatgactccactgtgcagtattatgtgccttacttatccggtattcagttgtatgttgatccgttgaagaagcctaggttagttgtttgatatgtatatgatttattgcgcggaagaactccaggattttttacatttgacggttttgattatggtcttgttgaatagaaatccagttggagataatgaaggaagtagtgaaggaagcagcaacagtaggactttgccggtggacttgagtgtcggtgaactgaatagaattagtctgaaagatcaatctattactggctcgttgtctagtggagaagctgagatcagcaatccgcagggacgattactattcgagtacttggagtatgaacctccatttggcagggaacctctggctaacaaagtaaatatcctcttaagcaaagacagttagatcattattaactttcaatattttctaataaagttttcatacacaccagatctcggatctcgcgtcaagagttcctgagctaatgacataccggagctgtgatcttcttccttcaagttgggtctctgtgtcatggtatgtttcatgtgaaccttcctgagtcttgactcttgggatcgttacattttggaatatatgtggaaatggatttgaaaatattgagttgtgaatttgttggtgtgtaggtatccaatatacagaataccggttggtccaacactacaaaatcttgatgcctgctttctaacttttcactctctctcaacagcacctcctcaaagtaagcacccgatgacgtaatggaacacaatatcctcttatgtcctcgtacttgtgatctctttctcagtgttgtgtatgtattggagcaggtgctatgggttgtagtgattcacaaccatccacaaagctaccgttgcctacttttggactcgcatcttataagctgaaagtatctgtgtggaaccaaaatagaattcaagagtcccaaaagatgacttctttgctacaagctgcagataaatggctcaagcgtctgcaagttgatcatccagactacagattcttcacctctaacagtccacaaatgaggtgaaaatgaaagatacattcttgaccatggatttggctctggtctgatcaaaagacccattatctgctgctcttacttcacatataaagtctctcttacactgaagaaccaccaaatagtggttagactcttgcgtgtttttcaggcgatttaagagtctctgctgtttcgtttccagaagatgctttgtgaattgtagcctaatcttcctctttcttcttctgaaacttagtcttttgattttccctgaataaggatttgaggagcccatatagtgaaatttgcgaggagtgtttttgtaatgttgagatgcaacactttttgtgatacaatttgattgctgaactgatgaaacacagggttggcttataagttttatactgaaaagttttaagcgttggctaattttacgagtcctgagtagagtgaaatagtacttatatatcttctgattatgcacataaaagataccccacgaacatccgattacaacatactcagcatgccattatgcttgctacaagcctctgctacatacattgagactaatgtatgatttcttgatacattgattacaatataagatatctagataaattagaacttgtcttcaagcatggttgaccaaagcaagccccgcacaaacttgctcttctttgccttctcttgatcttcgtttgagaatgattcttgttgtattttgctgtaaaggaatgataaaaacaggcactgtgagaaaacaaacggaagcgacacatttttttgagaatacagtatggaattataccttttagaggtgtccttaggtgagacttgtgctaccgagtctccttcagtgataggtatagccgaagggggtttaaacataaaggatgagagtagaggatcagaatctatattggaagagggaatgaaagtggaagaccctccaagagactgtaagttagcttctcgaagctcttttttaagagtaagataggtagagctatatccacctttacgcaaccttcttcttcgctgcacgtaaaatctctcacgtcaaggaatacacaaaatgactcttcaaactctactaaaaccgttaaaagagaatatcaaagtttcaaaaggatatcttaaatacgttcccgtgttgcgttgttatatggccaacaatgtccaatcccaccttctttgtgcagacaggacaaacctagtaacaaagcaaaaacatactgttctcacatcaaagatagcacataagagaacctaaataactttctaatccagaagcactgcgagattacaatgctcacttgactaagctaaacactgcgtaaaaaagcaaccttttccattacaagcaagtttcacgatttggaaatcaaacctaagtataaacataatcaatctaagaataacatgtaaatgtaaaatgcggatgatcatttaagcactctgttctcatatcaaagatgacacataagagaccctaaattactgattatataatcttctacaaatggtaattacaatgctcacttgattaagctaaacaatgggttaaaactgaaaagcaactttttctatttcaggaaagcttagagatttggaaatttaaacctaaatataaaacctaagaatcatcatgaaactcttgaaataaaaaaaactcaatgaacattaccccattcttagcttcaacaggatgattcacatcaatatgacaacaaagaccaacaatatcaaactcatctgcacaaaaaggacacataaactcagctttcaaatcgtcttctccttcaacatctcccaaatacaaatctgcgtcaaaaagtgttaatcaccatcaattcagaacaaaggatgaaactttacataatcaatctacctcaagcatttttttaaacaaacctgatcgagattggtaacggcgtgaagaaggcgatgatgaaaacacagggggacaattgatccatgaattcgaatccatttcttcttaaattgttaaagattaggaatacaaaagaacagagaattttaaaggagatgttgaatctaaattagccaaaccctagaagtagaacgatgtgagaggtagagagagagagagtggaaacaaagagctgtgaccagaactactactactggttcggagtttgtttgagtatttacagtcttgaccaaaccgaaactagtggtagttgtgttttgtactgcgttcattatgtttcactttcacacgtgtgactttttctggctcgtgtgctttttgttttttccttcctttttccatctaattttttgtatccaagttttggttttagtagaaaagtggatagcaaatgacattgacatgaaccactatttttttaaaaattctgacaaaaaaaatatattagcaaccttggttttcttgatgttggggaaatatttaagctttttaattatgctactattatttttgataatggttaatctactacaaaatttttatggagaggaatgtgttttttttatataattttttacaatataaaatattaaaatcaattgatcgagcattgtatcttttcttgatcggacatactattataagcttcgtgatttgacgtgttgagtcccaaggtcttttgactttgacttcgaccatatctcatgttagaatctttgaaactataccctagagctcaagacatatatcgaacgaaacttctgatcaaaaaagttttccgatttttcttctaagattgattaaggaagttttatatgaaccgtatttttcctacatttcaagagcttttgatcaatatataagcaaggagaagtgggagaacagtacaaggtttaaaagcaactgaaaaggagagtcacctaaagtgataattaaaaaaagaaagcaactcataaaaattgttaaaccggttgctaacgacgatgtagaaggttttggtttacataagttttacattaatattggtattaaaaaaaaaaaaagttttacattaatatttgaaaaggaagatattgttcaagagaattttatttaaaaaattaataagtaaggctctctaagactttctttttttcataaattaaagtatgatattaccttataagattttaatcctaacaatgtttcttacagttatcatggttaacttcacttttaatttagtcttgttattttttttagagccaatatcatatgagtttttataaagtaaatatattattttaatactaaaatttatgcatgcaaattttgtaaagtaaaaatacttatggtcacgcacaaaaagatccccaatttccttttttttgttaagaacaaaaacaaactggtttttttttcttaacaagtattttggttttttattcataattcgaactgaaattaacataaatgtgatacttcatcgttcattcatttacttatgattttttaaaaactgcaatttgttataaaaattaaaggttgttggagtaattagtgaagaatatctctattaaaattttatagaagtagtttgatgcttaattccaactctttttttttgttgacatatttctcaaaaccatttttctgtcatttgttttcacaattttcaatagctatttccttttgttattgattaaatatctattcatttcgaccaatttagtttcatccgatctcttaaacttttgtttctgtttgatttttctctttatatattttcatatcactaatgttaacttcgaaactccttatgataaatccactaaaatattttaaataaaaattcaaaaaagaaaatacatgaaacaaaattacaaattttgaatttttgaaatcaataaggaaaatttggatagtaatttaattttgacacaagagtcatttctctatatagcaattttatgtttatgagtgttttaaactgactggttgagtttttatagcaaaatgtttagtttgttatatttgatagttagacatacattaattagttgagtttttacctcacaatgtttatagtttttctaaattgtaagaatcttattcctttttttttttttacctttgtttagctttggatctaactatataaattaaataaataaataaaagcttagaggatccattttaattttgaaaaactcaaattatgatcatgaagaagctttgcaaaaagagatgaagatcgtgataacggttttattaaaacgaatagatggtggcgtgttatcttaggagaggattttaattgttttaacacattatagtttttaattgttacgattttaatttttcaaaattctaaatctgttaacaagatgatgattttggggtccacctcctaattttactcttaaaaatgacattaatatttgtataagataatatcaaaatttgatcacaatctttaaaaaaaaaaaaaaaaaaaaaaaaaacagatttcttcagatttccttcgtttaaaaggccggacaccttcacaaaaacacgcagagtgtttatatgcagccattaaatatggctgagatattggatcaccgtggagtcttgaccgacggtgatgatggtccatttagaaatctaacaaacttctatgatatgttttcaagcaactttcctgaaggtttgcgagtgttagtcttcgatgaagatccatcgtatcttctgatattggagagacatctccaaaagtttcaataccaaggtagctatttaaccattttcgaagttgatctagtgtttatttaagtctatattcaaagctggtctaacattttcaaatgtatgaaaaagttttgttccccttttcatatagtcgttgacaaaaaaaaaacctaaaacatttctcccaaattttgacctatatttgaggccatgacatgctttggactagatctctccatattaatggcgatgtgtatttttgcagtgactatatgcaacgaagtgaacaaagctatgcatacactccgcaaccataggaataggttcgacctcgctatgatacaagtaaataatgcagaaggtgatatattccggtttctctcggaaatcggatcggaaatggatcttccaatcatcagtaagatatctaatcacccaagaacagagcacataaagctctaatcctctttactcatcaatcatcacgcaggatgtctttctctctactctctcttactattttataagcgtatcataattttaataaaaatgtcatttcattgaactaagtgtaaattcgatatgcaacaagaaaacacacctttttttataccgcagtaatatctgaagacgattcagtgaagtcggtgaagaaatggatgattaacggtgctgccgactatcttataaaaccgataagacccgaagatctacggatagtattcaaacatttggtaaagaagatgagagaaaggaggagtgtggtgaccggagaggcagagaaagcagcaggtgagaaatcatcctctgtcggagattccaccataagaaaccctaacaagagtaaaagaagtagttgccttgaagcagaagtcaacgaggaggatcgtcatgatcataatgatcgtgcttgtgcttctagtgccaagaaaagacgagtcgtttgggacgaggagcttcaccaaaactttctcaacgccgtggattttcttggactcgaaagtgagtcacaaacactaatattattgtttataattaccattcccaatttattatatatactatacctctctatatttatataataaatgtgtgaataattatattttcatgcaggagctgttcccaaaaaaatattagatgttatgaaggttgattacatcagtcgagaaaacgtagccagtcatcttcaggtaacgtttcttatatacaacataattgttcattttcaacaacatttttgcttttattcttgaatagcatctccattttttttatacttcaaaatggagtaagatttcaaatctatttagttattgattttcagaatgaccctttataatttacttatgaaaattacaaattcaacccatatatttgtaattttaccttagttatgttatactctgatccctcatcattataagtgatgtttaaggtttctacacataaattatgaaaacataaatctttcatttaatatacctcttttacatagaaacaaaactaaataaaatgaattcaaccaatttgaaaacatactctaaaatataattggtcgaaaaaaacaacatttagatattgaattattgcatagaaacatgagagcatcacttaaaatgaaacaaaataaattttcttaaacatcacttaaagttatacatagggagtaggtaatatatgtcattttaatattaaaatattagttaaccacataattaacattattgtttatatgttttaactatgagatagtagcaaataactttatttgagtataaagtaaaaaaaaactataatttaatggattgagttacaaatttttttctataaaactaaaaaaaaaatagtttttaactaaaaggatagattaaaaaacaaaaaacacaccacgaacccttccaaactttttacctcaccttgcatcggtttcaggttgctcttcagatccaatcgaagaaggaaggatgagacattgtgctcttcccttctcccactctttccctgcatctccttggacactcccttcagatctgcttccctttgtaggaaaggctacgaacccctggaacctcaacacaaccacggtcagagtctgccccattttggcatcctgaagtgaacctagggttttccccagtggacctagactcttctgttggcccattacctataataaggtccaagcccacctgctggtttaatcattctaaggcttttaatcttaggtctgaactcattattcttatgcttagcccattactttctttgtgtcgatctcctctgttctatggtcatggactccatgtgaaagagacatcaacattgacggtttgggttttcatttaccttatgcgaaccttggttttagctacctttaaggctttatggtatccttataaagaattgaagattgttgtgctaagttccttgaatcgttcttattgttgtggcatttgtggtattggattattctttttcgttgctcatttgccactaagcagctcacttttcgtcttcaaacactgtaccctctttatcatctccatcttccagaccatatgcttcatagtctttgccgctattgaccggagagatcctcattcgagttggtttctaaagccaccctcacctgactatcgcaccatagtctcccgaatccttggtatcgtgttactgtgggtaatgaagcttgctccggcgagattcatatcattgatccgtttgtcaatgtcactatatccttcgactgtgactaatccgtcgtccttcgaactcttcgaggatgatctctcgatttaccgtgacctctcatggtgcattgcgcttccttgccttttccaaaaatgatattttcacaatttctctttacaatttcctttttttttttgtggtcaaccgattttgcatgtttttaattagatgatattaaaaatgtaacagattagaccatggtgttaccagtatgtttttatcagctgaatatcttagtcatcattacccatatttttgatcactctactaatagagatgttaggagaaataatagagaggtgttcacccaataaaatgcttatagatcatcttttgttagttattttattttaaagttatgtgtattagtgtgattttcagatttcttctgataacagtcacagaggttttccgtttttttaattgatattcatatatagttcatgacctcttacttattgttttaaatcatgatacagaccatactaagacatacttagtagttaaaattttgtatttgctttctagtctttcttttttgggaactttaattcatgggtagattccattcaactattttcttatttagaaataaagtagttctttcttttcttttgttggtaaaatattagcatgatttagctctttctttctttttttggtaaaattttaacatgatttagttcttattgaactgttggggataaataagtaagacaataagacatcatatacataaatcagagtatatggatgttaatatactagttatattatcagaaagctcaactaattaaactacaccaaattaaatatggttgacacaaatttagagtaaaatacatttaaaaatgtcaaaagataatccttatttggttatgttttaatatatatatatatcgtactaattttcttttgtcctgaattgggtgtgtagaaattccggctcatgctgaagaaggagaatgatgaaaagattaagaaagaggagatgaacaaatctttaataaccccacaaaatggaagaatgtatgttggagaagatccatcaaatttctacagaggaagaaatgatcatttcccaacacatcatgtcaacaatattcctcaaccttcttatgtgccgcaacacaccttgaaccctaacaatctcaacacacagctcataccatctctcggacatcattttgatcatcgaggctctattgtggttcccgatacaaacctagagatgaatcaacaattttttcaccaccaacagacctcggacttcacgccagaagagaatcttggtgataacaactttactgaggaagatttaatgatggcatcaacatattatttgagcgagccggatgatgcttcttttgaaaagaagaatgggcatgaagttgtgccatcgcccatatttcattcgccgttttcctctaataagtaccaacgtagttcctttcttgatcaggtgatgaggcttatgtttcttacaagtcttatgtttcttgaataaacattatgtgttattcatatctttgtattttgtgtgtgtgtgcttcttcagcaagaaagtggaggacttagctacaatactgttttttctaatgatgaatccaacattgggatttgcaagaagggatcaagatgggtcaagatcggagccaagcatgaagacggaagatgatgtacgtactacaatttttttttttttttaattttattaatatctagcgtttagggtttaattcatattctaagtactcttctctctcttttctacatgctcgaattatcattgcattgttgcgagtcaaatcaatacattgtttgttttctttcttcatttaaagtaagaatttgcaaaaatagaaaaagttgttttttacatttgtttgggaagtatatcagttgggttttgctttaattggtttacctggtagttagaaatgcaggcggcctgattattgattatattctgacattagtcggaagacattctaaacttggatcaggcagtgtggtggcccaattctatctgaatcaggagaaatccactctgtaacacttcagtgcgttcctaccaaaactaaccggatcaactaataggatatatatatataaaaaaatagaatattttgcaagtgattacaactattcaataaatgagccgtatttcctcctccaacagcaaataatgtggtcgtcgttgtccataacgtttaagttgtacgcccattactagcacaaaatatatgaagagaaaacatccataatgaaaaagtgataataatatgcaaaacatttatgttttaatcaaatacgcttggaaactgatgatatgatgaaaccacccaaactagtttcgaatctaaagagattattgaccaaacgttcaaaaaaaaaaattggttaagaaattaaaatgtcaaataatatttatgaaaattgtttacttacatatttaaaaactgtacaaccaagacatgatcaaaacgactaaagaaatccaacctaccaaaatttttgtgactgatgcacttcctcactcttcaggtaggatctttggagtaatgtgaacaatcaataacggatacacttttactaaaaatagaaccaaaccagaaaagacgtcttgtcccgtacttaattaaactacagctagtaataaaataaatcttcgaataaatcaatcatctatttcatgcaatgttaagtaaaaccaaaactagtattccctcagtttcaaataagaggttgaaggtaaatgcccacattgacaataaaaaaaaaaaaaggtaaatacccacatatttagatcatttatttttctttttaaaacatcattatttttagtttaagaaaaaatcaaccaatcacaacatagtctgcagaatataaatagacataagttgtcaatgcatttaaactatcaaacaatcttataatataaaacaaaataaaattcctaaaacatctaatataatgcaacagaaggagtatgccatacaaaaatattcacatttctcttataagagcaatgtcaaacgtgatctaaaactaaatcaaaacaaagaatacgtttccggattcaatatatcgatcaaatatttcatgtaagctaatcggtcattacactgaatttcagtccattgctttatccgagatgagattgtcgaattttcttatcggaatgcttgctcatctcggcgattaatttggacgtcgcaacaaaaaacccacataaaactaattattaaattcgattgaaaaaagtgaatcggttgatagaagtgttcaaatgggaacaccccgggcagaacctaatcaataccaccacacggcggatgttattataaaattttaatccatcaaaaagaggacctcgtatatccacaagttaaaaaaaataaaaatacaatttgtatgtgtgaatttcttatgaatgaaactaaaaaggttaaaaacaaaaacaaaatgacattgaaattgttatttatatatatattaaaaaatcccatgggaaggcccaaaacgatggacactcgcagaccaaatacaatttttcatgtcaaccacgagccctgcatgttgggactgacccgccatagatcattttattagattgtctttgatccagttggaccaaccaactttaactcatctattcatagataagaaaggaaatatctaaaaaaatggaggaactaaacaaacttgagaaagaaaaaaaacaccttaaaacattcttagagttggaactaaaaaaccccaataaacgtttcttagtgtaaaagccaatataagctaaataattaacgatagttcattgtttgattatcataatcattttgttcgatcatcaacgtcacatagcgatttatattggacgcatccttttctttcattgcgaaatttacatggagattgtaaattccgcagatgagttctagtccgacctatgatctttcataaaaaagaaaggaaaataaaaatgaggtggaactaagtgaaaaaggtgtaaagatcggagagactattgaggccttgagggtttatatataggtctatgaaagaagaacatatatatatatgctcgaagaattcaaattaatgaagatttttaaagattattctcttgatttttaatctttatattgtagatcacgctaacaaatctgactgcgtaaaaacaatattgaataagtaaatattaataattgtactacaatctaaaaaggttaataaactcaggggtgggcaaaaaaaacgaaaaccgaaaaaccgaaacaaatggtttgatttggttatggttttgaataaaaatccatttggttgtaattcttatttaagtttcggtttaggtttggtttggttaaaaaccgcaaaaccgaatgttttttttggtttttgattaaaattaaaattaattgtgtatatataaatataatgttcatttgataatatcatatctattaaactatcaaaaacaaaaccctaaccctaacctaaactaaaattctatataaatcacatgctgtcatttagaatttgggtttacaaactagattttaattttatttatgcatcaaagttataattgttttggtaaaaacatgaaaaattggttttaaatgattttaattgttttggtcaaaaccggaaccgatccgaaccaaaatacatatggcttttaaatggttttaatttttctaaaaccaaaaaacggtattaccgttaaaaccgaaccgtaaccaaaccgaatttcatatggtttttatatggttttactttttttaaaaccgaaaaaccgtaaaaccgaaaaaaccgaaccgaaaccaaaccgaaaaaccgcccagccctataaagtatagaaaaagtaaacatgtaacgaagataattattaacgataaaatttaaatataaaaattcccggtcaaaaggaaaattttcttttctttttgatccaattctatcttaatcccgttataagtatctgaatccctatatagttgagagaaggtagcaagagataaatattttaaaattgtatatagtcgacacgttgctaccaatgcttttatagtatgtatatacaagattctcttgtttacctagctagaacactatcgtccctaaattactacagaaattagaaatgttttaccagtaaacgatcgcgcgttaccaatgaccaaatgagtaatgtgttgactatattttaaattatttcctgtttatgaaaaaaatacctgcaactcagtgtaggaaaatccaaaactagaaggattcaaactgttatagctttattatgatagctagacctagattatatatgtacttttaaggaaatagatcattaatgagctttatatagatgcaaggaaagtaaaagagggaagattactggaagaacactataaccttggtaaataatagattgatatcatacaataagtgggaataaggacagttgttcaaagtggcatcaactccccaagttactacattgatgctcatatcataacagcatgaatctaaacttgttagaaaaagttaattacatggatttgtgaacttctcgtgagataatgtttggcttctatgaatgctctaatacttaattaggtccttcttgactgcaagcttcgacctcgttaccagttgaaaaaaaaggtttggattattgcataacaaacgcaatattcgaacggtaacaactattaatcagtaatacggttttactcgactcgatggtaacgattttttttttgttagagagttccctagtgttcatggcatggtttgctacacagcattgagcatggcgcgagctgattatcttcctctgataaagagaattagatcaaatcacgtatcacctcatgcacttgtcgttgtttatatttcgtcggttgcctccaattgataaaatcagtcttttcaagccacacaaacatatggttttctgcttttcgtctgccaagtaagtgcatagaaaaacttgaaagtttattctctacatttttgtgttcaaaattttgtggtattaaaagacaaaacaaaaatctagaatattgcatggttttacaaacaactgcagagtaaagatcaattttattttacaaaacaaattaatcaatcaacaaaacagagtataataaaaccctagtaaaaagcttataatagaaccataaacgccgcaacataaaacgttataaaggacaaaaccgtgatagccccatttcgtctgccaccactagccatcggaagcagatcaggaagcaaacattcctcaccgttaaatatcactttcgccggaaacccgtcacgttccgccacattaatccccggcgtgagtttcttgctgaactgtatcacggattgttgtttaccaggaatcctaatattcttcttctttggatctttttcatcagcctccgccacaagataatctagacccggaagaccttccatgaagatggtgttgtttacacctccgtccacgctaaggagactcgcgttaaacgagtaggctttctcgaaccctagaagcgccggtttcttcatctgaaccgcaaggaaccagttgggaaaatctatctctccccagttgaaaatcgtgatcctcactgtccaaccacctctataatccgacgccatgtgccagttaatcgatacaccgcaattgtccccacacggcattggattaggtagggttttgtgtttgagtgcgttccaagcaagcgttagagcggttctgttttcgaaaggtaagagaagagcgtctggagggatgagaagagacggagtttctgcactgcatgtgcgtcgcgtttcggaaacgcaaccacaagcgcaagtgttacaagggatgatagagtcgttgaagaaagcagagaaggagacacaacattttggtatctcggttttggcttgcgtgatgttgcatacgatctgccaactggcgaaagatgatttgttggtcggcataccactcggatccggataaaaagtcggggttacccgaacgggtggcccgcacgagtaatccgggtttagcgtccctttaatcctccagttctgcggtgggaaaagcgcggatcggttgaaatcaggaggcattttggcaacttgcatcgtgaagacggagactgatttggaagggtccatgatacgtggtaagatggtaccgtttctgcagcaagaaggaatatttcctaaagtagagtcatcttttttggttggaggcaagtctatgatgattggtcttctttcacatgtgagaacgtcagcgaaatctagaccagtgtagattagggactgaggaccaaagatgcattttgtggcgtccacgaccgttggatatgcgccttgcattttttgtatgaactcgtctcgcatccaatcgaaactaagctcccaatggtcaagcctgcctagcgggttgtggttttccatggttacttcagttaggtagttctggtcgtaggctcggatcacgtcgtacattatggtcaagtctccgggttgtcgtgggaggaatttggtggtgattgttgtgttgactataatgctcgcgtctcgtatgcagcacgtcgttagttctcttttgcctaatggacacaaaattagttaagactaacattaatattttcacttcaaattttactgcatctccgtaaaaaataaagttacatgtatgtgtattttgtttcctaaaatattgtattcatataatatcagaattaggaaaaatatctacaaagtatttataaactttgttatttgaaagtccactttttgtttacactagttaacacttttgattaactagtaaagatcttcaaaaaaacgagtttttaaatcagttaaatccgtaaacctataaaagcaattagagtgtctgacctctaatcaagttttgaacattagcaattaccatataaaatgtttttaaaaaataaaaataaaaaagtaaaaaattgattggaatgattactttgaagagtaggcacaggacagagccaaccctcgttaacaagcgatatgttggatggcaaaggaaccgccggaggagccaccatgaactgagtcccgacaagctcaatctcagccgtcatttgcttcaagtctccggccgtttgaatagccgttttgaggtcggagacaggatagccaccgaagatggtaccatttcctaccaaagcaggaagctctgtcccgttgactattaacgcatctgtggcggaaataaggatttcgttgtgttggaatccaacaaacactctccattcttttaactcttcacggccattgtttagaaccgtaagaactgactcgaaccgataaggctgatcggctgtgtcgttcggagggatcttgcgaccgagtatgaaatcataagagagaaatattccgttgcaaagatctgatggagaaatcggggccggtgccggtgccggaaccatgattgtcggaggaagctgagacatagacggtggagtaacggtgaataagagtaacactccgaagaatatcggaaggagaacgcccattgtgtctttctccagagaaagttaagtttacttggagaaagaacccaaatggtttttgttttgtttatttgaaacaaatagtgtaacgcgagtctataatcataggaggttatggtaaaacgttgtatgatactaggatgcacgtcgagaggttttgagtttagaactcgtgccacgcacgttggtgggtcgattatgaagtagggaatgtaataatagagtcgtggacgcaaattaaaattattagttttcacatcatcggcatgacacgatcattccaacaatatgccaacatatatatttctaagagatttaagatattatggtcagtcccggcccaaactcgtaaaacctgtatatttttgaatttggtttgatcatgctcgattttcttggacttatattttaaagtatgatccagccgataacagctacaaggtaagcctgtattgtttcagtttttttttttttttaattaacaaaaactgtttttaagattcaacaatgatatatatcttttacttttaaaaatccacattagtctaaacgtaaatttgaatgtaaagaaattgaatacaaattcaacctatacttcctattttcattaatgatatatattttcatacgctttgaagttatcctaaaagccaaccaaaatttaacaatatataaataacaaaatggttaagttaagattgaaaacatgtagtcttgcatcaaacaaaactaaatgtttcatagtatgagaaggccgaatcgaatccgatcagattaagaaaaaaaaaaaaaaactataacgtttcatagtattttgaacacgtttaacttggaaagcgccactttttcagatctgaatgtagttggactttggccctatatgacatgtagctatgttgtacagcatggagaataacagtgattgatctagtgaccttatatttgatcacagcggtgcaatgagcatatgtagtcggccaacttttctcactaagctcatgttaattttagaaggtctagagatgcaatttttttttggcaatgcacatcttgcactaggtcaacgacagcactgtttagaaagagatggatgggtatgagatctcaaagatatctttctttgattcaccatacatatcgtttttaagaacctttccgtactatatatatcctagaaggatcataatttgatgtccatctcattttttagttgaaggtaataaagaaggtatctatagggaacaaaacgtgacccaagtccgaagaccgggttttcaatagagggccggatatgcttagtcgtatagtatatcttagaaaactgactatgatcctgaataatttttccttcaaaaaattcaataatgaatggcccgaatctttttaatgctgatagccttcaaattctcaggccgttgtagtcccatgtttcagcttgatcaaataaactaaccctctaaccgaaacagagtgtcagcaacattttaccattatcgtctcctaaactaaagaccaacattcaacaatacactgtatactatatagtaaatgtaatcaattattgtagagagtggtagagacagaccattgatcttttgtcccactccctcaacaacttttttgggttaattgccactacctcaataatatactatctatattttgggtattcgtattttaatactctctaggtatttacggcttatcttaaggtcaacaataaagttcacgtatttataaatttccaccgtatcagctaaacaaaggcgaatttttttttcttagctatacataatttagcgtgttgggaaaacagagagatatgtgttggagcaaagctggcgataaaattgtcttgcatgtgtattttgaattttccaacggtgcgaattcataataattgaagaaaagaaagatattctgctttaacgacaatcacatgttaattataaactaatactatggattaagaagagtaaaatatactactagccgtgaatttagctgattaatagattacataactaattatttactgtattgtttgaccaatttccattagtcgtgacacgacatgcagaattagttgattaacgaataatgagataagaaattgtagtttcagcgcaaattaaacccaaccgacaaaatagtgttaaattgaactaattgagtgtaaaccactaaaagagtacatagaaagtaacaattctttatttttgaaatctgaataacgagtaattaatatgttaataatcaagaacaattaaatacaaattgtcaacaacaaaagaaaaagttaaaacagatcgaagaaagtaaaagatccaacatcatttagtttccatgatcaaagaaatctaaagatttatagatctacggatctgccacattatttcgactttttcttcgtcattttcccggcgaattttccgactattttccgtcacactaaacagagaaagacagcaaaaagagcaaaaataatagagtaagaactcataaaccgatctgagccagaacctggtggtggagtatgatagtaaaacgggaaataagggacgatcggattcggcggaggcggcgtaggatagtttcctgaatacggcggaggatagtaataaccttgaccaccgccaccgtatggtggagggtatttactgcctccaccggactgagaaggaggagggtaatagtaagagctaccgccaccggagcttggaggagaaggagggggaggacatgcggttgtgggggttgacggtggtggaggagaaggtggcggaggagatgattggacaggactacatggattgtcgcatgaagaacacattgtacaagaaacaacctcgtcttttgatgtcactgtcggtgtcactgacactagcagcataacaacaagtgtagacaaagtgtataaatggtttgtttccattgtcagaaactggatttagaaacttaattttgtgcgaagaatatacagaggaagtagatgagagagcagaggagggagaaagagtaggagtgggaaagaagaagaagaagaagaagaagaagcacgttcagaggaggagtgttcttctttttatcgatggcttttacaaataatttataaataaatattttcagcataaaaaaggtgttttaataaagaaacaattagtaaaagttcggtggagtgtattaagaatttatctgattcttataaaatagagtttactggagattaattattggagattcttgggatattatatttatcaatagttttgtgtgtgaaaattataattatccattgcagatacaaaattattgtaatttttgtggtgcatgattttatttattcaaagcatgattttagtagtcgaggacgtagaattttttggtaaataattttaatttagaaatcacagtgttttaagaaaagaaatgaatagaatgcaagaaaaagttgacgcggacacgttaacctttttaaccaaaggtcttgtaataaagcaccggaaatacgcggatgtcgggggcaaagacgtcacgtaatctcttgaaatgtagaaattacgatgatacctctagtcccgtggcgacctcgtggcggctgcgtcgacgagccaagtagggttggggaaataaaagagaatcttcaacaaaagtcattatagtggggcttgactcttttgcaagctttcacacgtggacgtaattcattggttttttgttttatgacgtggtagctttagaagagtagacgtgaagatgacggaagtcccctacttaagcgattagtgtgaagtagcgttttttctcatcaacaacttctttcgtttcgacaataaaaacatatgagaaatttcgttgagtagcaaacaaaagcaaaaacattcctccatatataagacaaacaagaaaagttcaaagctctactaattagcgttgtgacttcaaatgtataacatcaagtttaaattagctctaggtttaaccatggtatgatcagttttatccagtctagacaatatgcaagtagaatatcaagttatgtggtatttttttccaaacaaatttcattattaacattaaaaagtatttatttaaaaaaaaaaaaagaacattaaaaagtaggcaattttacgaagcatttaaaacatcggatcgtcatgattataaatggcgtaaaattgggttacgtttttcttatttcataatcaaattaataaaattgggtcactgtatcagcagtgagagacttggaacataccacatgttcggatgttatgtcccgtattgagatgtcatattttcatagcaaaagaatatgtgaacattgtggaagagaaactaagtcacgaaacctagtggataggtgttgagcacatattttttgcattctataagaactcattttatcaaaaatatcataatcgaagtaaaatgataccgctaaaacgactgatttagttaaaaaagaacaagaaaaaaaaaaaaaaaatgtttcctgtttgtcttaatcttttaggtacttaaaataagatgataccaatcacaaaatctgagcaagcttagactcttagtttataatcaaactgaacaggcgattgaagatgatcacaccatgcttatggtgatctcatgattaaagttactctgctttttaaaagataaatattttgcttgcttttctgactcaaatcaattgttaatgctaaaacattttcatgttaacaaagaagaaaaaaaaaactggaaagtcatacaaaatcttaaactaatctctaaagtttgcaaagtatgtgaattttgcaatggctaaagagaagatgcgttgcagcgttgggttgagaattgaactctggcttaattagattcaaaatagcaattcaccatcctactagttattcgtttcgtttaaagacaacttttatatttcatttgattgttgaggaacaaaagttggttatataagtgagaactttttgctttttgggtttcaattgaataaaaacaaaaagttgtcgtcgatctgtgaaattcaatttatatctatagagagcatttcttctatttattgggccagttcttagtggcccaataacaaaaagcccaataaccctattggagaactgtattactctacagtcatgagaaacaccgctcaattcatcaccggaattaacaaaaagagtttgaaattcagaattgtcatcttttgtttcgatcggattccttattcgtgtatcttctccgattcgatgggaattggctctcatggcaatggtaatcaagaggtttcgcgttaatcaaaaggagtgaaacgatggcgttttgtatttggtgtttaagcaacttcagttcttaccgttttgagtgttgatcatttgtttggcagagaacttaaaaggttagatctttcttctgaaatgatttcattattaattgtctgcttgtacttgaatcatgttaattatgactgagcttttcttcttgaggatgaggaaatcgtaatggctaatgcatacaatttgtctactaaagattagttgaagttgataatgctaagcacgccacaagtatatgtcattatcatatgaatgttttgtcacagaagatattgacttcgtataatatatattttctaatgcaacttggtaatattcaatgtcaaccagtagtcgtagtccttgtatatatctggacaacatcaaacttttgcaatgtttttgaatctctgattgctatttatcttttgggctcaaaccaatggaaggaaaggtgttctctggtcaaaaactgatcttggtgatgttactgttgggacatctacatggtttcagcagctgtattgagaaagaaaggaaagctttgttggagctcaagaaattcgtcatgtcaaggtgcgaagaatgcgagtatgactctgttctccctacttggactaatgacacaaagagcgattgctgtcagtgggagaatattaagtgcaatcgtacaagcaggcgtcttacgggactttccctttacacatcgtactacttagagatttctcttctaaacctttctttgctgcatccttttgaagaggttcgaagtctggacttatcaaactccagattaaacggattggttgatgacgtggaaggtataacatcatgcttttcccaatgtctctttcttacctattatggtctccatttggaaacatttttccctgcaataaaaaaggtttgaattatagattcgtgtaagttgataccgtttagaactatgccatgaagaacaaaattactgaattctgaagtgtctgtacagttttaaattctcataattctatattgacatgtagattagactcagactgtaatggaacttatcatagttattagagttttcgtatactttgttaacaagaatttattttcttgcaggttataaaagcctaaggagattaagaaacctgcagattctgaatttctcttcaaatgaattcaacaacagcatctttccctttcttaatgctgctacatcacttacaactctttctcttcggcgtaacaatatgtatggccctattccccttaaaggtatgtttctccttctagtacacctacttattgctgatgtatcattggttagattgtttgatttttatgtagtatatatacgctacaatttgctgtctctttattttcttatcagtctactattctcttggactccctttcagaacttaaaaacttgacaaacttggaactgctggatctaagtggaaacagaattgatggttccatgcctgtaagaggtatcatttacgtcactggtgactgtccatataaaatatgtctgtttcttttctagagtagaactttaacacatttaaccctctacatagttattgaaattatttatgccatctttaagaacatcatatccatattaattgtagtaggtgcctaatttgcttttggtttctttgttttgtggcagagtttccttacttaaagaagctgaaagctttagatctaagttctaatggaatttatagctcaatggaatggcaaggcaagtttgctcaagtttaacgttattttttattttactaagaatggatgtgaatcccttttcccaagatcatttttcaaggtatatcctttatgtctttacgttatttcaggattaaagaatttgactaacttggaagtcctgagtcttggttataattatttcgacgggcctataccaatagaaggtgatctgtctttgcttcacctccaagattatcaatatgggcatcataacttttactctgaaaagtgtctcatgaattctcgagaggaatacaactactcttattattctcatcatcttgttgttctccaaactttctttttcgcagtgttttgtgaaatgaagaatttgcaggagcttgatctgagaggaattaattttgtaggtcagcttcctctttgttttggtaacttgaacaagctacggtttcttgacctctcatcaaaccaattaactggaaatataccacccagtttcagtagcctcgagtccctcgaatatctatcattgtcagataatagctttgaaggctttttctcgctcaatccacttaccaacctcacaaagctcaaggtgttcatattttcatcaaaagatgatatggtacaagtaaagattgaaagtacttggcagccattatttcaactaagtgttcttgtactacgactttgcagcttggagaaaatccctaactttctcatgtaccagaagaacttgcatgtcgttgatctatctggcaatagaatatctggaatcattcctacatggcttttggagaataatccagaacttgaagtcctacagttgaagaataactcattcaccatctttcagatgcctacatcagtgcataatttgcaggttttggatttttcagaaaataatattggtggactgttccctgataattttggtcgtgtgcttccgaatctggtacatatgaatggctccaataatgggttccaagggaatttcccatcctccatgggtgaaatgtataatatttcattcctggacctgtcttataacaatttatcaggggagttacctcaaagttttgtctcaagttgtttttcattaagcatcctgcagctgtctcacaacaaatttagcggccattttcttccaagacaaacaaacttcacttcattgatcgtgctgagaatcaataacaacttatttactgggaagatcggagttggtttgcttaccttggttgatttgtgtatacttgacatgtccaacaatttcttagaaggtgagctaccacctttgcttctggtatttgaatatcttaattttctggacctctctggaaatctattatctggagccttaccatcacatgttagtttggataatgttttgttcctacacaacaacaacttcacagggccaattccggacacatttttgggaagcatccagatacttgatctacggaacaataaactctctgggaatataccgcagtttgtagatacccaagacatcagttttcttttgttgagggggaacagtttaacgggatatattccaagtacgctttgtgaattcagcaagatgagacttttagatctttctgataacaagctcaatggcttcataccttcatgtttcaataatttatcatttggactggcgagaaaagaggagattactaactactatgttgcagttgcattggagagcttttacttgggattctacaaatccacatttgtggttgagaatttcaggttagactacagtaactattttgaaattgatgtaaaattcgcaaccaagcaaaggtatgattcttatataggagcatttcagttcagcgaaggaacacttaattctatgtatggcttggatctgtcaagcaatgaattaagtggtgttatcccagcagagcttggagatctcttcaaactaagagccctgaatttgtctcacaatttcttgtcgagtcatataccggatagcttctctaaattgcaggacattgagagccttgatctttcttataacatgttacaaggaagcattcctcaccagttaaccaacctcacttctcttgctatcttcaacgtctcttacaacaatttatcaggcatcattccccaaggaaagcaatttaacaccttcgacgagaacagctacttaggaaatcctcttctctgtggaccgccaaccgatacaagctgtgaaactaagaagaactcagaggaaaatgccaatggaggagaagaagatgacaaagaagttgctattgacatgttggtcttctattggagtactgctggaacttatgtgactgcattgataggtattcttgtacttatgtgtgttgattgttcttggcgtcgagcatggctccgccttgtcgatgctttcattgcctctgcgaaaagtaagttggcttaaaaccatttcagcacagttcttacgtcttccttatcaagcaaaacaggcttcaatcctctgtctttttttgtaagtatatatgtgctttggattttacttgctgtgacagaggaatgtaagttgatgcaggttctctgtttcaaaagattcgtctatgtatggttaatgatcaaatcattgataataaggttaaaaaatctggtttagttagttaagtgatattggtataaatggcaattggacttgatttaaaggaaaaaagataaacatttttcatgcgggcagagaccaagatctgtgttacctaactaaaggacatgtattattaatgactatggttttaatgttgacataattataatgctagtctcattgtgtacaaaaatgattattccctacttctagaattgtttgatgcccacggaactaatgaattttttttaaaaaaactccactgttaaattaccaaatacgattgaagagtcaatcaatccttaaaatggcagcagaattaaagtagaacattacaatctgatgttgaaaaagaaaactaaaaaataacaatttgacgaaatttaaaccatttttcaatttaaagttaagttatataattatttttttgacttgacaaagattgtgcttaacagataggcaagtcacattcctgtcgcaataaagacaaaatctcagcacagaacaattatttaaaaattaaataaaaaactagtaataaccaccgattttttttttttttttcattcatcttcttacaatttccaaaacgtttttgattaccaccaaatctcacatcatcgagatacccaaaattcataggtgtaaaaaaagagtagaaaatgattgaaagaacacaaaaaccaaacaattaccaaaaagtacacatttagtttgttgttgttgttagtcatcatcattgctctccaaaccctaatcatggtaagatccagaagaaaaaaaagcactaagcgtaaacagagccataagaaagagccatgagtaacacagcggcttgttcttcttcaccaagcttctgtcgttgcttctccaccgttgatctcttccttatccccaaatccatcaaactctgttttaacgattcaccaaatttacggtttccgccgccagaactcgatttctttaatttcttattatcttctgttcctcctcttctcttctttctgtttctgatcccacacgcgttacacaacgactacacagaaccaaaaccaaaacatatcagaatcagagatcagagacaagatcaaatgatcaacctcgattttttccccaaaatcagagtgaaattagggtttatgtatgaacctttggaccaacaggaccaccacgccaaagaggagttttactggttccacaatcagcacaagtcttcttcttgtcgttaacactagtgttgttctgttcgatcatatcttcagctcttgttttcatggtttctgaatcaaccaataagacctgaaacaaacacagaagagcgatcagcttattattagatcatcgtcgtcagaatcaaaaaatagagatcagaagagaagcaaatcatttttaccttttcactgtgatctagcattctgttagatcgtcaattgaaatggacttttgaggatgtggttgaagtttggcgccgcgatcgggaaaacagagatcaaggaaaggatcagaatcaatctggttactagggtttagagaagatcacgtttcttcgcaaattcacatgcagaggacttggaaagagtgaagaagagtgtcagcgaggaagagagggttttcaaagggtcgaaccgacagagacaatgatccaaagaaaaaccaaacgcgattataaattggttcagaattaaaccctaggatttggtctttaaatgacgaaactgcccttttattcgtccccattatcagaagaagccacccgccaaaatatggaatttttgaggaaaatgtgtattttcgcttattgtctgatttggtgaaaagaaaaagggcgccactttgaccattgtttgatcagatacggtaaagagtaaggtttcttcgaatggtcaatgatgatgattcacatgtatttgatcgtagccgttcgttaacgatctctacaaatttaacggttcttttcttccgtgtggatttaaggattttttttttttttttttttttggagtgtacagcactagacaatcatataaatctcacagataaaaaatgtcataattcaattctttttgtgtagatcagattgcaaagtaagcaaaatcacaaattttttttatgttgggtgtatgtaaattttaaatatagatgcattttggttatatcctaagtagaagatccactgggaaaccaaaattagtgaaattttagatactaaagatagatggattataaagaggaagaaacaaacaaagagagtggtaggggttaagccatgtagactactactagatagaattcagaccatatattattggtttattctgcatagttccaaaataagagagtgtgcttgtgtgtaatgttgactcaacaatttcctggtcaaagtgacaatactcgaaataagttttaatattaaaggcatatcttttaatgtagaaaaacataagattttgctctctttttttggacagcgtaaatttattttgtaattgattgagtagaaagaaagggacttcttggtctcccatggaaccacattgagtttgacccttcatagcaagcttttggttacatgtcggaggcttttttttactttatagtctctattctctaatatcagattgtgtagttttgagtttacttttcaactgaagttgaatccctccaacaggaactgcaacttagttctctcacagctgcaaaaccagatcaaagccagatctcaacatcctctacacgccagtttgtctccagaatcttcaaagccttcttgtagatctccacgctttcgtgttcttgcaggttctcaatctttttgactcctttcgcatcttcaatcagttggcgataacagttgacgtctcctgtgttatttgccgcctctccggcttttaaaatgttttccaacccatcaagacacactgagatgatcattacatctggacataccaagagatcacatagaagttttgtgcaaccctgctccaccaagtatctgaaccacaccagtatatggagattgtgatttagtgatcaataaaaagctatatcaaatagagagaagacagggatgtacttgatttgattaggagaactacccacggtggcatttcaaaatgcccatgcagcttctttctttacgtcaaattaagcatgttgagccagattgaccaacggtggaatcaaatttgcatcaataaccgactgttatcatcggtacaagaaagacaactagaaaacaattagtgatagcaacataagggtaaatttgtatatgttctgcaacaaaagcttctcacctgaagttgttctgtaaagcctgcagtgatgcttgaaattgttgagaaaatttctatctttatgtatttctcatagtctcgagtaaacaggttggcaagaatgggtaaaacaccacaattgatcacaatctaaagaatatgttcaaagaggtttattcagagcacttcgttgtttggttacaaaatctaatcgcaacattgtaaacaaggaacatataacaaagcaagcactccatcctctctactaaaagcggtatagtgatataaacattatgataaacatagattttgacagtttttttaacttgataaaggataactccacaaggtggcaacgtaggtggaatatgattacatacttggctctggtgattatattgtctagctatagtcccaatgttatgaagtacaggagcaagcacatctggggaagggcgtctgcaaaagaagaaaattgtcagtcttcagtatctaaaccaaacttgcacaaagggttaaatatgtgtatatattatgagaagtactaactggagaacttcaactaattttgggtcaaaaccagcttcaatcacactttggataacagcttctgaaccatcacacagataggaaattgccaagcaaacatatctcaagacttcttcaagtatgtttgcagaatcttcaaagccttcttgtctacttcatagcttccgtgttgttgcaggttctgaatcttttctatccctttgatcagagaactttacacgagtggccagtctccatttctcaaaacatccaagaaagaaagattgtaagttacagaaagaagcacgtttctcaaaacatccaagaaagaagcatgttgctctttttgaacctaaacggtagccatttctttcaatgaaacacaactgcatgattaggacaaattcctcagataactagcaagaagctggaccggagacaagatcttaatctttaatacatgtgattaagactcacgattggtcctaatctcttgattaacatttacgttcaggtacatagcctattgctagctgccgattccttaagtgtatgcagctgagttttttgaatacaagacatatattacaacttactacgtctaatgatcaagacatttctaaaacctagtcacaaatatgccaaatctcgagatcaaacttcatctatatgagagtgaataaacaaacatatacccaaatgtcctagagagattatattatcaacttggaaagatgaatagtaatcaaaagtttcatccatgtcaagaataccgatgcccctactgtgtaatccatcacttgtgctagctttaggttgaatacatgtgaaggtggcaaaaaaatcctactctaagtctcaaaacttcacaaaacaaaactgtagttgaatcctccaacaggaactggaactgaaagacaagatcatcatcaccttggaggcttttgtgtcttctcatcatcctctacatcccagtatgtctccagaatattcaaagccttatcgtagatctcattcctttcgtgttttagcaggttcttaatctttttcaccccttccgcggcatcaatcagttggcgataatagttcacgtctcctctgttcttttccgactctccggccttcaaaatgtttttcaacccatacagacacagtttgatgatcattatatctggacataccaggagatcacatagaagttttgtgcaaccctgctgcaccaagtatctgaatcacaccaatatatggagattgttacttgatgatcaatcaaaacgcatgaaaaaagtgataaagagagaagacagggatgtacttgatttgattaggcgaaccacctacggtggcccttaaaattacccgtacagcttctctctttatgtccaattcagcatttagagccagattgaccgacgatggaatcaaatttgcatcaataagcaactgttatcatcattgcaagaaatacaaatagaaaacaataagtgataccacaattgattacagcctaaagaatatgttcaaaaaggtttattcagagtctacgtactttgttgtttggttacaaaatctaatcataacattgtaaacaagggacatataacaaagtaagcactgcatcccttctactaaacattctatagacattgtgataaacataagctttcgacagatttatcgtttttgataaacgattactccacaagatggacaacataagtggaacatgaattacatacttggctctggtgattatttccagtaactagagtcccaatggtacgaagttcaggagcagataaaactggggaagggcgtctgaaaaaagaaaaaactgtcagccttcagtatccaaacatgtcagatgtcacaaaggattttgagaaatactaaccggagaacgctaactagttttgggacaaaaccagcttgaatcacacgttggattccatctactgaaccataacacagatgcgaaattgccaagcaaacatatctcaagatttctttatcacttgaattaagatgtatttcaagtgcaggcttcacctgttaatcaatgcttcatatgttgaaagtattggacgcatacaaatagaggaaacagagagagagagaattaagaagacctcgttgaaggtagacggaggcatgccacgacacaagaaagccaaagtccgaatggcagctctgagcatcggcaagttagtatccttgtacagcctaatcagcagtggcgtcaatgccccacattgaagaacatagtcacggtgtattggatgataagcaacattacccagtgccaatatagcctgcaagaataatgtcaaaactcatatcattcatacttatctactacataggtacaatctttacctgtccacggacattatctgtcgaagaagcaagaagcgtgactaagattggaacaaccttgtgatcaactaccacatccggtttaaaagcagcaatgattgctagaccgcgagctgcttcaaactagaaaagaccattgaatatatcacaatcaaagattacactgatcatcgtaaaaaacaatttgatgggttcttttttttcttctaacttgaagcttagggaattcttcattgtgaagaaggaaaacgaaacgagcaacaattccagatcgtattagatcttttgtaccaagaggcaagtttctttgcattcctggacagatataagagcacaaaacttaaagaaatgttaaaagatgaaatctttcagatcgaaacagaggaagttttatttaccatctgatagaatcctgttgatcttgatagctgaatcaagctgtatcaaaggatcttttgaataaaggccattggctaaactcatagctgctgaaactttgtgtgagatcgtttagaggaagcttgggtcttaagcaacgtgggttttctctcttctttgacctatccagagaaatttgcaaaacttgaagagaaatctgagctgaaatgtgaaagaggcaaagaaattttgcaattcagtgcaagaatgcaaacaagaatggagcgaaaataacagatgaatttactacgacaatatcgttatcagaaccggcttgtttggtttgatttaatttcgactgaaaccggttcagttcaaccaaattgattcagtttggttttgggtttaaatccggtttaataaaacccaaatttcaacatgttaggcgtgttggttaggatcatcggatcattgccaatctcgaattaccccccaaatcggagtgaaattagggtttatatgtctaatcaccttagcaccaccatgacgaagaccacgatcagcacaattcttcttgtggtttctctgttcgatcataacttgagctcttgctttcatggtttctgaattgaccaagaagatctgaaacaaacacagaagcagatcatcatcatttccaacagttcatcttcgatcacccgaatcagaatcagatcattttatcttctcactgtggtctagcattctctattttcaatccagatgaattgtttagggtttttgatcgaagcttaagaaaaaatagcagagacgagaatgaagaagagttaacaacgagcgaagaaataataaagcatctctgcaccttcttacttgagcttgttatcgaattcatctaaattctcaaagtggcgaccaaattcgatgattcaatttctccatggaaacgaaacacaaagtggtttcggaatatatgggccttttacgttataccaaagcccatagcataagagcccatccatttcgaaagaaaaaaaaaaaaacaaatccgtcccgcgtcaaaaaaactgaatccatctttaaagtttgaccgttagttcggtaaacaaataatttaaccctttcttaattttgaccgttagttcggtaaatttgagtaaaattttttcctaaaagacaaaacaatgtggattccaacaggaagtggaacttggttctctaacaggaagtggaacttgattccaatatgatgagtagctgttagagaaccaagttccacttcctgttggaatccacattgttttgtcttttaggaccatcatattatgtgcatgcttttggttcaatatgacagctatttctttacatcaaaatctaatatcagattatgtgggatcttaacgagaaaaatcaaactggaattccggatgagaacaaccatcaccaccttcatcttcctcttcaactaaccttccatcttcctctacaagcccgtatgtttgcagaatcttcacagccttctcgtagatctcattgttgccatggtgctgcaagttctcaatcttttctagcccttctgcatcttcaatcatttgagagtaacagttcacgtctcttaggttcttgtccacctctccagcaatcaaaatcatttccagtccacctagagacactaagatgattcttagatctggacaaaccaggatgtcacataaagcttttatgcaattctgctccaccaagtatctgatacacaccaatggatattgtgaatatagatgatcaataagcatgaaaaaagtgataaagaaagaagacagggatgtacttgatttgattaggagaaccacccacggaagcatttgaaattgcccatatagcttctttctttatgtcaaattcagcatgttgtgccagattgaccaacgatggaatcaaatttgcatcaataaccgactgttatcatcatcaatgcaagaaagacaaatagaaaatatttagtgatagcaacgtaaattgttcaagttctgcaacagtaacaatcacaaactcatgctcacctgaatttgttcttctaaaccggcagtgatgtttgaaatcgtccagcaagcttccctccttatgcctctcatatggttttgagtaagcaggtcagcaagaacgggtaaaacaccacaattgatcacacactgaaaaataagttcaaagagttatttggttacaaaatctaatctcaacacagtactcaagcaacatataaatgaagtgttctccaggatataatcatccaagatacaggattacaaattaagcttttgatagtgctattgctttgaaaaacaataaattcacacggtgtacaagagacgtgttcttgaaggctccatcaaaggaatatgaattacatacgtgagtctgctgactatttccagaaactatattcccaatgcaacgaagtgcaggaacaagtacaactggagaagcgtgtctgcaaaagaaaaaaatggcgagccttcattatccaaacatgtatcaaacggttaaattttttaatatttggagagaagtactaactggagaagttcaactagtcttgggacaacacccgcctcgatcacactttggatattttcatttgaagcatcagacagattcgaaagcgcccagcaagcatctatcaagacttgttcatcatccgaataaacaagtcttttaagtacagggagaacatgtttcacctataaatcatgtttcataagtttaagtattgcacctataaaactgaggaaatagagaagtaagaataccaggtcaaagggtggtgaaggcttgccacggaagaagtttgataaagtccaagtcgcatttctaagtatcgacaatgtagcatggttattcagctgatgcaacagtggaataaatgccccagagttaagaacaaagtcacggcactgtattgaatcaccagcaacattacccagtccccatatagcctgcaaattaagtgtaacatcaaactcttcaaaatttgaactcacatatttaaccattcatactcagaagaagcactatacctgctcacggacatcatcatcaggggaagcaagaagctgaacaaagagtggcacaacaccgtgatcaatcactaccttggtatgctcagatgcgccagaagcaatgtttgttaaagcccaagcagcctcaaactataaaaaagatcaaagaattcagaaccaaagattacactaatcatcaaagatgggaactttaagtctaacctgaagcttagggttatcatccttcttaagaaactctacaaaacgtggcacaactccagattttatcacattatcagtaggtggacttctatctgaacaatatataaaaccacaagactttaagaaaccattcaagtaaatataagttcgtatctttttcaactcaagatcaaagaaaagtaaagagttttaccgaatgatagaaccaccctgaaccgagttgtgtactcaagctgcaatgaaggatcatccgagaaaaccccagtgatcatattcgctatctccaactacaaccatcaccagagaggatctaatttaattacccaattcgaaagcattcgagtataatgataaaggtcgtatctttcaaaacctaggtttcactaatccaaaaccaaagatcaaacttttaccaaactctcaaaggggtcgttggaaatcaacttgtaatcaggaggcaaaacttttacacgacgtttcttcatcaaattttcgttgcgtttactcttgcgaatctcgactaaaaagtcttctcttcttctgcgtccttcttccgcatctacagagactttgtaacggattcgacggatctctgtcttcgtgctcggtcgcaaggacatagctttctcgattcttcgacctctctaaatcaattcacaaaatcgaagcgaaaccctagaaatttgaactgaatgggatttgcaaagtgaagaagagaatgcaagagtggtgaagatgaagaagaagcgacaacagtttcaatttgaagaagcgggagggttttctaattatcgtttttaattgttaaccgtatttatacagtagattgaatcataaatcattgataatctaaatttaagataaagtttacaatcatattattaagagctccaaattgaaataattagtcaataattattataagctaaaatacttgaatctaaaccgaactaaaccgtgaagttggtttagttactcgttaccgacgataaaaagaaccatatttgcagagtttactcgttagatgtgtagtgttttctccggcgaaggaaaacctacttttccggtaaagttcatgtattgattggaaaaagtaggttttggtttgtgattttgaattgcttatgtaagaagtaaaaacattgttttttctcatatgattatgttaactactatacattgtacactatactatatgtgcaagttgctttaaagaaacaagatattccaaagacgtcgattcatctctaacagtagcaagaccttctcgagcaaccgtagccatccgatttgtaggcgatcttggaggagatgcataaagaactgatgcctcgatgatctctctatgtgtgttttcaagatccttagagattcgatgtgcttgaagagcggttaggtaaagtcccgtggctagaaagacggttataagtgagaacactccggccgctgaaaacaagccttgccggattactagacaactaggttttggtttagaccagttctttagatgtcctgattccacactaagtgcaaccaacagtagaacctctccaacaccaaagcaaacccttataggaacaaaaaagaataatataatcacaaaattatcattaacttaagctatggtcagtaacataaatatgtcatttcacgattgcttatagttaggatttttttatttttattttattttttataactacatgacattaattcgttgcgttagaataagtctacgtaccatgttgagacgaagaagaaggcagcttgaaaagtgagcctcttcgcaggaacagagtcaggatcccactcaaccagaaccagagacggcgatgtggtgactgcgataagtaagtacatgtggaagcccaccatcgccaccgctagtcccacaaacgcaatcgcaccacacaacaacggcgttttcccgctaccattatacacgcatgttttgcttccccatgtcgcctattgcaaatgattgacaacatattaatggcaatgatataacttatactaaatactattataatcgaacgatatggtaattaatataaaacatgaatcaatatagatttctgatttattttgaaaatataaatgatgaaaacatatgagagaaagtttatatacatccctgtatagtaatgtacctgagatcttgtggcttcggcatagaggcagagaacaaagcaggagaggccaaagattattgtcaaaacagcgatgaaaataccggttttgctgctgagatctgtggttttagggtttggaacaagatcttgatgggtcacagctcgcactcttgttctcgacatgtctctcgtcaatttctaatagataggaatcgaagttacatgttttgagagttattatactttgatttgttttacatatatgagaggcattgaaagtgggaagaaaagaataaactggagtatatttgataaataaatgaaaaaggagaggaggatagaagaattgcttcagccaaaggttgcttaaaggccaagattcgcaggttctctttcggatgtctttttagaaatactatactgttttcgtatagtgtctattaaacgatgatgtgtaaaatatataatgtgacgagagttcgttaatggagttagttggatgattcttttcatatattacacgtgtataagaacattcttttcttctttttattttgtgttcatacaaagaacatcgtaccttttattatcttgaaagtaaataaagataaagataaaaagataaggtgatgaactttgttcgtgagtcgtgagtgactgagtgttgtcttatttctatatactatttattagcataatcatgtgagggcgtgtaatttttaataggaagccaaaagccttccacaccccaccataaataaccaatagagaagcggtttctgatactccatttcaaaagcaaagacatatagtgacagaaaaaacgagctcgtgtcactgatatctttagcttcgaattggatcaacactacttgtcaagttgtcatcaccttaatgttagtgtctcgccgatgttgtgtttgccgttgtgatagtatatatttttattgttgccgacactggtcgcatcggttttgaaaagaacatggttgtgtattaagtactcatcactcatgtggtattttcatgacaaagtttgtgatgtcgtcactcgtcgtaagaattttgaatttaatgtacctaaattgtgctatatgagttatgaaagttgaggttaccatcgccaaagctcgaaattatgatgtgaaaatattgggtttaaaattttacttatactcaaagtccatggtataagcaccttaaggcatatatagattaggatctttgacaaaaaaaaaaaaaaaaaaaaaaaaaaagccatgaactaggatccaaaatttgtatggacattgaaattttgattttttaaaacaaaattgatatatataaaaaaaaattaaatagagtaaaaactgttgatctcccccaatagatttgcattagttagttttttttattttgaacttttaactcctaccagattattaaagtagtattttatttagataattttttatagttatgatatatgttttttggttgtttatgatttatttatgatatatgagtttcaataactttttttttaatcaaagtttcaataacattaaaaagaggggaaacgttataacatgaatagagccttcaataacgttggatcgtccatggtgctattgaagttctttggtccgaatatctatatatattttttttcttagagacaattctcgaggatgacagaaaaaaaaaagaaaaaagaaaaaaaaaaaaaatctctcggatccatcacgcaagtatcaaagtgaatctataaaataggtttatctttatatatttcattctgtctatttttgttcctatttattcatatttatatttttaatgatatttttttttcttctttaactcgttaaatctaatatataaagcctctaaaaaaaatagtttcttcaaaaaaaaaagggaaagcaaaaagaattgaaaaatatgatcaaaaagttctagaatttttttgcattattaataaacttttaattttctctctttattcgaactttgtgaaaaataaccaaacattagcattatatttcattgactggtctctggaccataaataaggttgagagttcaaactattatttggacgaaaccaatattagggcatctccatcagtgagataccttcttggtttatcaaaaaaaaaaaaagttgtattttaataaatattagttatataattaaattttaacaataaaataatatttgaccaatagatgatatacaagtatttttatgggtttctcaaagtttctcacttgagagactaattctactctctttcatactttttgattatattttatttttatattgaacagtttctcaatgagaaaccattgatggaaatggtcttatggtctccttgagaagaattgtcgtttgaagacctacatataccatatcaagatattgactccttgttatatatatatatattagttgtgtaattatagacaaatattctatagtattttggttagttttatttgaattttgaactcttcgagagtaaattaaaatttcacaagagagagcaaaaaaaaaacaagagtgtgtgaaagtactataagagggtaaaatctaatttgagtaaaatactagctgggtcaaatacttgatcctattaaaatgtaaaatttatcagccatttttttacaaaaaataaccaagaaagttatttacatcaactggaaaaaaaaaaaaaagacaaacacttaataatttaggatttatagttaggcggttcgttgaaacttgagaattttaacacatgaagtaaaaacatatacttcgaagactaaaatgatcccattctattcatcattatttcagaacattgacaaggaaacataaaaaaagtacaaacaaacattataactagcaacaaaaagagaacgaaagagtcacaaagaagaaaaggcataacatgcttcaaactagtctaaactagaaactacatttatcttaactttcttaaaacactccaacaagctactacaaaaccacaagatccactataaccaaacaaaacactagactttacaatcaaaacatcgatgttttattggatttctacgcgcgccttctaatgtacaatccacttgctcggtagtatcactccaatgttatctctccaatatctgagagatcccatagatcatcactttgacaagtgacattaccttgaaactcccaatcaagcaactcctcatcaaccccaaacccaacttctgaagaattacatagaccaacccaccaatctttatcattattttcatttgaattcgaacttaaaaaacttccctctctttctctttccaccgtcatatcatgatcaacctctgtgattcctacgtgaccaatctttgtctcgcttccttgttcttcttcaaacaaattaacacaacaactactattgtccccactctcacacaccttttcatcatttactccaatcacagcctcttcactagtgcattcccagacacaactactcaagagccgttctaactcaccatccaaccactcataaggccccaaagactctccttcaaaattaccattttgccctccctcactgaaatcactctctagctccttaggttgtgagaaacattgtgaggccgtcaccatttgcttgtgtttcttcatggatgacctactagtccttcccttcttcttcttcttggtcttgttattgttcttggctccagaagacgatgaacaagatttcttcaagactacatcgttgacgagtagattgtgtccatctccggaaacggcagtgaaggcatagattttgcggctgagatgtgagttccaatagtttttaatttcgttgtctgttcttcctggtagatgtgttgcaataagtgaccatctataagaaaatagtcacatgcacacacgtgagacaacataaatttagacaaatcaattaattatgtgtacacactctttacaagttggcttctcattaattcaataccaatactacaacaaaatgtatgacgtcagaaaaattgcatggtttagttatgtgtaactaatttttctttaaaaatggttggactgttcctcatttttttataagagttagcactgaatatattcagatttcgtagaaacaccttaattctagaaatgagttgatttattggtaaataagtttctaaattttattgcaactaaaaataccgaaactcaatgaagaagattagaagtttaggcacagtaaaattcaaatttggagctttaacaatgcattaactctatagactcatgaccactttgccactcattgttacagtgaccaactggcaatagagccagtaacaatcagggccgtacacaaaacacacatgagacaagactaattagagaggtcaattcgcttagatatatagcaacataatgccaaagcttcttattgacaaaaagtcaaattggatattctcgtatatatatatatatatatatattttttcaaaggctggaccattccaacagtgatcaaccgctgaaatgttacatggcaatacatttgataaattttgtttcttatttatttttggacggttggaacggagtctgaccatttctatatgtttcttaagttgacaagacatgcatataattgtactgtgtacgtgaccccagcattaacagtcactattcacatagtggcaaaattgtaaatataaaaacgaaattctgaatcacatataaatgaacgattgggaaattgattaattttggtttaatacctgttgccgagaagggaatgcaacttgacgattatttcttcttcgtcggaagtaatatttcctctttttaagtctcttcttaagtagtttatccaccttagtctacagctctttccacatctcaacaatcctacacattttttaagtaactattaaaacatgtataactacaacgcttttttctattaatataacatcacaagttttggttttagatatattggcacatttttttgttttcatgcatcaacaacttgaagaaattagtacttttttgaatgttaaaatcgaatcgattactaaactgagagatgtatcgacaattaggaaaggtaattttttttatataaagatgtatataccagctttcttaggcaaagatcgccaagaaccttcaccattggtctgaatatacttggtgaggatctcatcttcctcggctgtccatctccctctcttcaacccgattttctcacaacacggagcccttcccattgcttctcggtctcttctgtcaaaaagagaaagagaaactgaaaaagagaaaacacttttggacccttgagtgagagagtgagttagtgagaataggagaaaccatccaggtgattaatataggagaggacaaaagggagaaagatagtaaggtttgaaaatgacttcgtataggtgaaggaatgaaccacgttgcggtggaattaaaagttatgtattgtccatcctaaaaaccatcggcacataagacactccacgtacctctccttctaacctttggtccctccctctcgaccctttttccgtgattacaagatatttattactatgtatacttttatacctaaatacgtacttcatgcatatacatgtacatgtaatgtagctatacgcatatacctacttgtatatgcattcaatgagcgtgtctacaacattcttttcttcacttggttcacctcttcagtaggtggtaaaaattatttaatagttgaagtggtaagaaactgcaataaaacctcgatcatattttttttttaaaagggggttaatttaaccttgacgtaaacaatgtcgttaaggttgtgattggaaacgattgtggtttccgttctctccaacaagttacgattgttagattcttagattaagggtttaaaaaaaaaaaataggatcattgtttgatttgcaattttcttagatcgtacgagattgatcttggatattttgtcacttggaggatttttgcatgtcttctctaagttgaatggtgcttaagttagttttcaaaactcaaaatgtatatatatatatatatatactagttgtacatattaattaatttgggagtataattaataaattaggtgtatactatttacattataagatatctgattgaagcctaagagtacaattatgaggccgtttatgtatccggattcgaatcagaaattgctaagacaaaaaacattaatactacagcgtataaaatcagaacactagtctatgaaacgaacacgtctaatgagtattagagtcggtcacaatggctatgttaatacatagacgttaatgtggaagatcatggtccatattcgtaagtggacatgttttgtcttgtggtaggccataagaagttgttgatttctttgacaaaaaaaagaagaagttgatttaattattgagtaatagttacatacttacatacttacatacatgggtcggttaattcgggtatcatccagaatgtagtaggaatattccaacgactctctttttgttttttcttgtttttttcgtctcttcatgtaaattgattcgactatttctatattatatatactattatttgatttaaattaaataacgaatacaaataatcgagataaaaagtatctaagccaccgcgggtgagttacatttttggaatagaaaaaggagtgaatacaactaaatttagcaagattatgagctacattatggtccaaacttttgtgaaactaatacatatggatgaaaacttaaacttaaacttagtcgataagtaaatttgctatttcgcaattttttacgaactattaatattgttgatgagaatctcaatatctccttcaaaacagccagtgtaaattaaatcctcgtatccaacagggctctcttgttcagcttacaaaaggggaagaagcgttgtttaatgttggattcagtgttttagtaactcagaaatatattttcatcttatctgtgatatttaaattagtggtaaagttgaagggaatcttgaatttcttccactgttttatttgcatttgtttactaatgatgaagtgtagaaaattgtcaagacaatactgaaaattaagaagaaaaaggattttagtgtagtatgctcatgaaattcatttcttttattcttaaaggcaaatggcttatactggtcgagccttaaagcacaggggttttaatccaaagtcgattattatatttatttttaggctttcagctaattttttggttacatgttcttcctttttacaactaaccttcgtttatttgtcttttcttttgacaactaacatatattgttattttaatcaattttcaatatttctttacaaatttttttctttaagttacaatttttttttatacagccactcacgatgcaactctcccacattgcaagtgcatgtattattgtgtttcacttaactattttttaaaccataactaataatgataatagtttaaatctaaaatttatactaaacaaatatataatcagaattaatagtgtaggtttcctaatacttattattgtacatgttttcaaataagaaattagttaggaagataagtaatatataagccctcaagagtcaggtttcaaagtcacattttggttgcttttgggactacatgttttcaaataagaaattaattaggactttgcctcttctaatcttagaacgttcttctgatcaaggcagtccattttcttcaaattaatgcaacctaaattatgcaaaaccctacgctctagtcctaactactaattaggtaaaatctacccaacaacatctaatccgattgttgagctaggtcttgtacgtaagagtactataattttcgttttgatagctatatatgacaattactaaaaatactctcttcacatttccactagaagattctgaagaaggtggatccggtttgatgaagctataagcaaacgaggatgctctccgctttcaccgtagaaaatccggtttttacttgaatgttggagagtcctcagcgtgatcatggtaaggtctaacaaaaatttcaagcactcataggagttgaaatgtaatctctagtgtggtagcaaatcaagctgagtgggagttgaggcaacacatgattacgtgctttgaaactagtaaaagtatttgacaaatcatgtttgtgaaagtagtaaacgatgaagatatagatgggccaccgaaattggtaaatggaaacataaatggataggtgaagtatcaagttgattatgagttctacaaaaagacaatgagagttagcctaacatattgggtatagatagtgtgagtaagactccgtctaatatattggttataagatcttgagttaatgtagttacacatctcatttcctaatttgaaacacatcccattttctttcctttttttgtcaattcataataattatatgcgtttataaccatgaacaaataaaataagagggctttttcctaagcatcattaagaagaattaaagtaaaattgaccctaatatattgaggtatatgtataaaatgaatattgaacgtagaaagagtgaagggaaaaaggatgatgatattacatatgaaccagtcacgttaacatcacgagtcactttagtaacaacgagcaaaagctttgccattaaaggcattgctctaaattctttttgtcctttgtctcttcctctacctctccctatcccccattcttcgtaaaattcatacaacaatccaatctattgaatgtacaccgattctaactcactcaaataaatttattactttgctgcattgtatatatgcatacgctatacgtaattacgtatatatatgtattactttgtattcctacaaaaatcccgaataatacagatattcaaattagatatttaacaaaaaaaaattacaaacaacatgtactatgcggatatgaattcatgtgataatacaacgatggcattagtatataaaccattaagttacaatttaaatcatatgtacatatatttctttcaataaaagaagagtttatttttcgttttataactttatgaagccatatattttttagatctctttctatattcttagaaattggtaatatcacacttgtacatatatagaaattaggtctatattaaaatgctttatttgggtccacgcgtaaggagacgttggtataaatacggagattataatggccatgcaggtccataaggatcctgcgatcctctcaccaacttacataaatctgacctttgatataaatacgctttgttttgcatatgagcacttgagtaataattacccaaccgatctctttgacatgtcctgcatgtaaccatatacatatacacttgtagcccgtagctctagaaaccataattatatttcttcaaaatgaaacttcttttagttgaaattatattcttaaaatgaattttttcaataatagtagccaaagatcaagtgtttatgctttctagacctcaaatctaacttttctttttatgttacagataattgctgccaacaattcttttatggatgaattaggtcaaaaaaactatgatcatattgagtatggttgttatacatttatacatgtataaacttgctacgctagctctgttttttgtcttcaatttgatgacaaaatccaaacagttcgtcccctaaagaaattagtaacctgccaattaaacagaaaaatgtaacatgttataacattcacgagacaagacacaaaaataaagtctatgtaattaagtcaccggtatttatttttctttcttttgaatgagacaggtatatagcttgattcgtcatagatttttttttttattattattgtttgtactagatattttaaaatcattattatttcttttatatgttttaaagtgttgatatttgttagatactcaaatttctatcatatttgttgatacttattcataaattgaatcgtaagcaagatgtgtgtattttttggacagagtgagttgtttgatgtgtaattgggtacacaaattaagaatagcaaatatcacattttcccttctagcgacaggaatcgccctgcaaaggccaaagctatagagcggttcacataaactctgattaattgacaaacctcttattaaacatgattagccttatttataactcacggtgtctttcaggacatttctacatctaaatatcaatttgaccttttgatttcaaattttgatcctgcaaaaactagtaccctttaacaacaacaacaacaacaacaacaacaaacaaacaaaaaaatcctggaagcctaatgtttatgcaaatcaatttagctaaaaaaacattcgaaataagagaatagagaagattttagatataaatagagagagagtatgtcggtaatcagtatggctgtgattgtgaagccacatcacgatcatatgaaaattgaaaaccatacacaagttggatcttttacccatagccaataaattggggttttaaattacgaatatgcgttcgacatattatactaagaaaacggtatattcttagtcttgcacacacacacacaaaaaaaaacatctacaagactgcaactattctttcactatgtaaaaaacttataatcacacaaatttaactaatagagttttcttaacagaaaataattacatcatcaacaaagtttactagttacatgtgaggataatccttttttatacatcgaccgattaagttatctaataagcttttatttaccaaggttatttatctaaggaaaactgtaaaccccataattaaattatctaaaaaaacgttttttattttcttctttaagaattgattgatttatttaataaaatttttagttttgaacatgtcctataataatattatgtatgtgcggttggtttgctatattgcattactttagtcgtaataaacttgaaatttcaaaataatctactaattgaaatatcaacatactagcagtggaacaatatagctgtccgtgtagaaaatgtagtaaaatctttttcttttgttttgtcaaaatcttaaatacgagaagtttataagaggtatttttttttttttagtttataagagggttctaaaatggtacacctcccgaactatattacttggacctattctattttaaatttcttagaagaacaatggaaaagaaagcttacttaatatcaacaaaaaagtggctaatttacagagaaagaaagtaaaacacaattttacaagagacttccaagtgacttgtcaggcaaggaaccatgtgaaactagcagagtagcgtagagaagctggttccatgaatcaggaactccaggtaagcaccaatgactacaatcttggtacattcccgctgcaggagaagttcctcgggggtcggcgggctgtctgtaaaccgacggatgaccatctgttcggtaccaagtcatcttcgtaatgttcatgtaaaacacaggcgttttcatttccgagatcacagattctacaactttcatcatccatggatacactcctgtgtacgtttcgttctgtatcggtcttgtttctccatcgcattgtcctccgctattccacgccccttttctgcagttaaaactcagaatcaaaactaaccctaagccgttcaacacattgcttggattgaaagaaagcagttcatacctaaaatgtgaagaggaataaccaacgaagaagactctggttttagtactgttgatattggaatcaacccagtcagcccatgtatgaatagcttttgtataagctt

SEQ ID NO: 862 - DNA, 56963 bp, Arabidopsis thaliana
ctttcacttctaatctttcgtaaaccctatttccttcctggtaataacctttcctgcaaatcgaaaaatcggttgaagtgatacgaatcaaaaacaaagaagaaggtttttctcatagttcacatacccttcgtaggttttctggtgagtccaccagtgaccagtgttaaatataacaatgtctgcgtttttgtatatcttcgtcatcgatctttgaatcatatcgagtctcagtgtctctcttctcttcccgtatacatctacaacttctgattcttgaacgaggaatggtgatttgatgaagtcaatagagcattcaaagtcctaacagcaaatatcaaaattcatcaccaaaactaaaataaaccaacggaggattctgttctgtgagacacttacattgaacctgaaaccgtaaaagccttcgttaggaagattactctgttttccaataatcttagaaactctgtttttgtcttccaatgttgacctaagtgaacaaaccagagactcccacatgtttctattcaatgaatcaccaacaaaaacaactcttttccctctcagcatcttcaacatcttcttcccatcgaatctaaaagacgcaagacagaaacaatctcatgaaaacagagtcgcaaagggtaatggcagaatcgtaattaacacgaaaacaagaactaaccttggaatcgagcatccatgaggttgccatcgatgacggagaaaccccgaatcaggtcgaccattcttgaagcagttgaatttatcttcaacgaaaggacaataaccaggaagataaaccggttcagaatcgtcaaagacccaagttccatcaaaaatgtcgcaagaagcgagttctttggtctccgaatcaatctttggctcgttgattcttctgggagaaacagaagagagaaacatagttgtatctgaagcagaggaagtataagaagaaggagaagagaagaagtttgctgctgtgagaagacgagaggtgaagctagagacgatgagtgatggagagaaatctgagagagaagaagaggagaggaggaagagagaaaggaagaagagagacgttaggaagatctgtgttgttgatggatgtttcgtgatgaggaagagattctttagatccgccattgatacgtcgacaatcttgttcttcgtcttcttcttctctgttttcgggaaaaagaaaaagaaaacaattatgatctgatatctttggagggaaagggaaaatccaacggttagaaattaaattgctttgttagataatcagagtcctagtgaaaatataaaattaattaagttgtactttgtttgttcaaaaaaagaatatttaagttgtattacagaatttaagggtatatataaattttaaattcctaaatacagaattgaattacggtgaattgttctgagttgattgacataatctagttttatagatttattttgcttagaaatcagttttgtagttaaagccagcctccccaatagtgaacaacactagcacataatcttcctcttgtcttagaacacaacttgatgaagcatgtctgctttgagtgaccttccaactagaatatggaaagaaacaaaacctgatatgcaacttgtgaactcaatattgaatgtaaaagtctcctctttgtctttgaagacagatttgatcaccaacaaataaaagcttccccatctattgatatgtaaacgatgaagcaacgtcagaaaaaacttccaatctgacctcagtttctcatcggtttggctcttcttttgaagaacacatgagcctctgaatataatggaagtgaaaagattccaccataaaaagtattcaaatagttcggtttatatttattgtattaactagataagcaacatatatgtatatcagataatggctaagattaaaaattaagagaggtcttagagaagcaaggcaataatgaatagcaacggcccaaatcttgactttatcttctcacttgcattttcttcttcatcttcaatatgctccaagacgttgaaaacacctgcatacaattatataaactaacattaaacaaggaagcgaataaccggtataaaccagaacaagaaccagtctttaaaaatcgtaaacctcgttcaggtccgtagctgcagccagacttgagggtttcacggatgtcgtgaatggtggctctgttaaagaatctgtagtggtgaataatttcttcaatgcaattcaaagccaaatgtgtttctgagaagcatggtccttcacagaactcttctgtcctccccagcggaatatttaggtctccgtttaacgttagcctccatgattcatcacactctctgtatatctgcattttatttgggagttttgagtgaaaattgtaatcaatcgaaagtaatagccaaggatgaaaactgaaaagttaagttataaataaataatattagagtgggtgttggttttttaatttttgaactagttcgcgctttcttgtgttgcaagtaactggctttaaatttgattacgtgtttctcatttaagcattccaaagctttggcaactatctccggtggatcttccccacctaatcccccgccgcctaatcctcctcctccgaaacctccattacccccacccccacctaatcctcctgctccgcctccaccagtacccaaccctcctccgccaaaaggcccaaaacctgtccctccgccgttaaatccagtaccaccacctgtccctccgcctcccacaccagtcccaccaccgcctaatcctcctgctcctcctccaccactgccaccagcacccaatcctcctccgcctcccacaccagtcccaccactgcctaatcctcctgctcctcctccaccactgccaccagcacccaatcctcctccgccaaaacctgtccctccgcctcccacaccagtcccaccaccgccaaatcctgtgccgccacctccaattcctccaccttcacctcctacctctgaatcgtcttcttcactataagtgttccctgtaatattgacattcttaaatgaagcaacccaaagcctgcagtacaagtaacatacatgcgtgtgtattaaatgaacaacagacctggaaaggaaactaagaggaagaaaaaagtgacaatggtgactgagatccggagctctctgttgaatgaaaacgccattgctaagagtttacaagaattagtaaatccttcttatataattcttgttaggtgtttctggaaaatttcaagacgtgtgatgcaagtaagtagaatttaggttttttgtatatatacagagaagtttgtagcagttgagtaaaagtcatcaccaaccaccttctgtgtttttactttgcctatatattgtaatccatttattgactgccatgaaactaaaccatattaggaagaaaggttaaatcaaacctaaaagtgatctcaagacccgacacgaaagaaggtgttctttttttgttttatagccaaagaaggatagtgaaagcatttacaaatctaacttaaagacatatttcaaaccaaaaaaaaactaaaatacataatcaaacctaaccaaaaagtgacctcagaggctcagatacaaatcaatgtactttaaaaataaatctcatctaccagaacaacatcttcacaccattccatgaacctataaagttgcagtgagtcatttgcgactttatgcccaatggtccaaccaaaaactcctcctctcacaacatcgaaaatacttaaagacactaattatacaaagacaaaaacagaaaagaacaacacacacacccttaattttaaggcattagtatttgacaaataataacattttccaaacttatcaatatgggacatgttacatatttttttctttccataaacagagtgttttgttcttcgtttttcaaatacatgtgaaggaattatttttcttctaatttcgcgatgtatactctaaaaatccagtatatatcaaatttatcatttatctttagtttcagcattttacaagggctccttgtatttcttatgttgggagccacaagttacaatacctttggtccaaaaaaaaattaaaggaaaaaagacacaaccaagaagcaaccctttggtggttctttacaaattcatactttcttgagtaataatttcataagaaaataaacctatctctctatattatataaataagaggaaacactccactttgttaaaatgctttccttatttgttggtttttttatgcgtccgtcaaagttgcggttggaccaaaatagtatgtttaaggtcaccaatgtgcagcttatgctcacccattgggattctcctctttccatactcatccactacaccaagatgcttgcaagcatcaacatcaacttgaacggtctgttttgcccctgccatgacatgaaccttctcgaacgctatcaattgtttgttcacacccaatccttttattccgtttatcggcggctcagcaaatacaaacaccgtgtgtgttccatcgaattcacctgtgtttgatacttcgacgtgaaggggcattttcggaaatgaattgcagttggtgtgagacactttgatggagtgtgatgaagagttgagaatggtattggcagagttgagattggagagtgaaactgatagttgggccaatgggcttttggccaaactatgagtgaaggtagtgtaacttaaaccgaacccaaatggaaatactactggacctttgtagaatctgtatgtccttcctggataattaccggatgctctcatggccattaccgtcattggcactttggccacgtaatcttgtggataccatgtcattggtagttttcctcctatcataagatatataatgttgaatgttactaaaagctaaattaaataaatttaatttttactttgatctaaatgaaaaccaacaacgtaccgggattagcagcaccaaagatgatattggcgatggcagctccacccgcttgacccggatacccagcccaaatgatggcagcaacacgaggatcattcttagcgaaggttacatcgattggtccaccactcataaggaccaaaatgactggacctctagaagcttgagctacacgggtcactaggtcttgttgataacccggtaagagaagcccggttcgatctcgtgtctctgcctctatcgactgatctaatcccatcacaagaaccgtcgcgtcggcttcacgcgccgctgcctccgctgcaccaaatccttggttccctttgcaagccacgccggcacagccagcttggtgaagtgtcctcgcgtatcttgaaatcccttgcaacggcgacgtataggcgcatgctttccctgcatagttgccgatcatagtctcagtgacgtcggagtttggaccaatcacggcgacggtgcggtggcgtctgggggagagtggaagagagcgagcagagtttttgagaagaacaatcccttgatgggctgcttcaagagctaaatgtttatgggccggagtacaaacatctcttggcccaagattagcgtacggcccaaggttaccatcaaacataccaagtctcatttggactgttaatgtattagcaagtgctaaattgatgtcattctccgttaacaatcctttcttcactgcaccttccgtgaaaatcgccaaaaacggcccgcagtccaagtccaaacctgaaaaacgacacgatgtttttcgtatcaaaattgatgcaacggtccatatgcattagatttaacatcaacggtggaggaaaacaactcaccggctttaatggatctggcggcggcttcttccggagtgctagtgtaatgttgttggttgaagaaaacatcaacagagtcacaatctgagacaatgtacctacatacgtatgcattgatgatattattagtctttatgtaaaatcgatatgaaccattgattatgttgatttttaataacttacccattgagacgccattgaccacgaatagtgttctttaagagattttcatcagcacatgtgggctttccattgacttggttgtacgaacacattacactcgctacttttccttcgtaaacacatgatttgaatggcacgttgtatgtgtcctctaaatcttgttgggtgacctaaacccatcagaacttttataaataacccattcttaggaaaatttcgaatgattcaccactttagtaaatgatataattagcttgaagatcctaaacttgtattagttttaaatggttagttctttgaaagttttgtttaaaaaatcactacttcaatttattgtgtttttatttgtttaatcttaactaaatggatataatattcttttaggtttgaggtcccaaagtcttaggaccaacccatgcacctattagctatctgtaataaaacatactactattatcttgaattatacatatcaataatgaattttcgtttttttttttttttgccggctaaagaattttcgtttagattgttatgttttgaattatttatgcatgagaaacgaatctttttaaaatataatttaatgttaaagtatatgttttggatgaacaagatagaatgcaatgagcttgggccaagttggtccacatgaaccaataaggataagattctccaccaatattacttaagactatgcatatgacacatcacaaagtcacgctgtctattgtcttaaaattagctgttttatattaggcaaatgttttgtttgtatctgactgtgacatgcatacaaatctatacatattttatttatttgataatgaatttaaattgagtcgtatgaaaaaagtgttttgcaatattacgaagtgacgcatattctacggaactccaaaaataactaatgactaacgattgggatatatctagatttaagctatcttctgaatttaacgaaactagtcatgaaacaagataaaagacgatgggccttaacaagaaaacgcatatttagtcacatccaattggttacgtggagctataaataacagaaaacgacataaagtagagctttctaattcgagcaagtatatttatatgtttaagcagaaaattcaatacgtattttgttttatatttcttgataacgaaatgaaatttgaaatttttattgaaatgaaaaaccacttaaattgtaagaaaatagagactcacgggttctcttttatttccacacaaattacaaatatataacaatgtctaatatctaaatttcaaagatttttggcatttttcgaccaaacaataagaagttagcctcaaaatgaattgcaaaaatataattttgaaatgaaacatgcatacaaactttgaaacaaaacatgcaaaattggttatataaatttgataataaattgcaaaatattttcttactatatacgatattagatatatataatatgtgaagaagatttaccttagcgttgaagtggaaacggtcgacgccattccaattatcaagatcataagcagtgtaatgtttgcaacatgcggcgactttaaggcggttaccggcagcagtaccctgaagtccccggacgtagctggcggcatattttgcggcaacgataggatcttctccgggagtttcttggcctcggccccaccgcgggtccctcaagatattcacattcggactccaatatgtcagaccggccacgccaccattgtacatagctcttgcctcatcagacaccaccttttattcattttaaatcatgtcaatattaagatattctccacacacctttgcttttgttgaaagaaataaatatacttgatatataaaccatatgttaaaaagtattctcttatattcactggttatagctagcttgcccatcatcatattaactatggaagtatcgtggatatcagtacagcatatatacacactaagtaatttatcaaaaacattacaaaataaaagtttggtagtacccatataaatttatatattggttttgcatttgatgtctaaaggaaaatattatcggtttttggattttttctaacttacgtttcggacttatttgatagactcatgtcgtagtcagatataattcaaatgaaaatcataatattcaagatttataattttataaaaaaaaaaaatatagagcgtcccactacaaactctactgtatgacttctagtcttctacaatgtccatttcaatgtcgttttttcacgtagaaaaatcataaattttatattctcttcctttttttaaaaatgtattttaaagcataatattcttaaattattctcacccgtccgatctcttcccatagagactggttgaaagaagctgcggtggtgatgacctgagggaagctggtggcaccgggaaaagcaccaccgaacttagcgcctggaccaacgtcggaaatgccgtggagagcctcggaccaccactcatagcctccaataccgagacgtggtacggcggcagcattgttgacgaggttgcggatcttctcctgcaacgtgagccttccgagcaaatcttgaactctcacatggatcggtacattggcccgacagaaccggagcgtccgggttaacccgtttgctggatcacatgcaaacagtggtcgaagtgactctgacgagtgaaccaaacataagaggaatacaagtataacgacgactttgttgccgatcaatagtgctttattataacaagacatttttatatatctgtgttttgtgtatgtgtgtttgtaactatatgtgtgtatacatgtgatgtttgtgttttttagttttcatgtgatagaaagtgaatgatggtatttatagagatcttttcggcgaaaattgatgacaaaggataagagactcttgttatgaacataaaataagatagagataaaacgatctagctggacaggttacgaaaatgagatatctcaaaagaaaaagaaaaaactttttttgttgaaaacatttaaaaaattaatagtttgttttccctttttcaaaagcgtcagtttgtttttcctttcttcaacattatttttacgttttctcagtacgatcacatttgtcaatataaagactcaagcaacaccagtgatgatgattatttgaagcgcacaacgtctaattataattttatcgtaacttatatataaatatgctggttatgcaaagaatcgttcattataatatttttaaaatggtcttcgataaaatgaaaaattcggtagcaactatgttcgatagatctattacagagaaaaaacaatggctaattttaagataaatgtgagtgaaataaatatttttttttatttataaagaaaatacatataactgttgtgactatttatcatgaaggttttaatgtgtttcctcaattttaatgtgctacaaataacataaatatatcagtaatattaactaatcaacacatcaatcaacctgttaaactttttcaacgttaaagactcatttgtcgttaattttttttcaacgttaaagactcatttgttgttaattatatatcgttgaaaccacctaccgtagcctccagtcatgtccatgcttggactcgtgccccaccgccgccactacatccgcataatccctaacgctagttaaaaaatgttataatcttagctcttttgttttaatggacttactattacatttaattaaaccataactcactctttgcatgccattatacagctaacaaactacttcaattttgtaagttctgacattttatactaatttactaattccttgttcaaacattttaacaattttatattaatatgtttgcagatatattattgatcagattatacaacaattttttcatacaaaacatttggggccttggggagtacacttttgtaatcaaaagtttcttataatctagacaaaaatatttagttggtggaattttaaaattaagtttggtggcatgtaagagtatttacacatgaaccacttcatgtccgtttagtatagttgaaagatttattatggacttagacattggatccctccaactgtatttttagtcatgaatgagaattataaacgtttgatatggcaaaaatacacgttttatgcaaattttgaagactattcttgatttcagtcctctttattagcatacatatattttgtaagtaattttatgcacatatggttagatcaatgtataggcatgggaaaaaaccacgcgaacaaggtcgtggtcagacgaggcaatgacactatgagcaaataaataacccataaataaacagagagaagtatatttagtttatcaattagaatatctatatagaaacatttacagatttagttataaagaaattcaaaaatgaaacgtaagacctaataaagctgtgagacagacagagaaggttgtcacgggtctcgagcatcgatcgactctttaccaaattggccaataataagcatctagtcatgttgcccatacttctttatttattttcctaattgttatttgatttattggtcttctttattataagtttctaacagatcagcttattgttagagatattcatcaattattaaataattgacccatcaacataacgacgctcgttttcttttgtttcgggtatagatacttgtggtctaatacaaccaaatattgcttctgtaatgaaaacactagaacgaattattattattattataagtataaacctgcttgtaattacttttctcgttcgagttatactggatacgaaagtttatgtaaatagaaagatttcaattccttctaacaacttctcatatattcgttgacaacgaatgactatataccattctgtcattgacaaagttttgaccgttaacggtaaactgatggatagttataaccaaagttctcgttttacctaattaaagacaaaagaacaaattgcacaaggtaaggttgatgcaaacaaaagccaaaacataaagctacgggagaaaaaaaagaagacttgtgaatatataacgtaaaataggaatctgaaatgggattggtggaatgattataagtttataactgtacggttcacaagtggtctgagcaaccaaaacaagttttacagacacgtgaggcccaacgaaaacactcactcgtgacccttacatttttacttttgttccagaagtagcagttaatactttttgtctatctatatacaaattagggattttattatttattgttttttaaaaagtaaaacaagttattattttcgtttttgaaacataacaactaaaaattcgaatttgaatggccacaacaaataatccggatttgaaaattctaaagaaattatagtttaactttcaacgtctctagcaaacaaaacccataaaattaagtatatactaattctttttcagtgtctttctaatcaaacgtcgtgcaaagtattggggatatcttatttacatagcagcctcagatcaattatagttatatcaaatatgttaccaattattcaaacataatttcaagttatgtgaaatagtacatataaactacatagtagttagtagaaattaatttggatagtacaaggtcgtacagtattttacgttttcacttttatattcaccctagattagataaattacttatttttttgtcaaagttgataaaatacccttttatttatgtttttttctgttgaaatttatctggcaagcggatacttttacatgttcgatgagtgatacgaatttgaaactataaactataggttgatgtttagattttataattaaagaattacgagattcaaaaattaatatacaaacaacggttaagatttataatgtttggattgaaaatttggattttactatttaggatttagatatataaaaattaaccattcaaatgaagaaaatgaactgtgtttatttataatgcacacataaaaattcctaaaacaagtgaaagtttccgtgaaaattttcaaaaattataatctttgttgtatattacttttttatggcctttttattacttgaaacatgcatatcccacctatgcttaaatctctgaaataatgtattttattttataaacaattacatgccaaagtttctagaactaattttttttgaaatcataaatgttttgttgcatcacaaacgaaattgtaataaacaaaacccaaaaataatagtttttttttgtcatttgtgaacagtacctttggtcaactcattaacattttcatgaaaatactaattactgaacggactatcaaaaaactttcggtggataaatcatgttattttacaagtgttactttaatttgtgtatatatatatatatatatatatatatatatatatatatatatatacaagtgaattacttatccgcttatttctttacattttaggaaatttttatttcgggagaaaatatttgctcatcctacgaatacgccgttagagaaatcgtacgttaaaaatcaaaaagaaataaacgtacatttccaccaatcattgaataaagattataacatagcagaaaatttgtatgcgtgtacgtataaatgagtacacctatatgagtatatgtaagtaattagttggttattgggtgatgtgatcgagaggccagaattatatgcttttctcacttataaatgtttttggaaaaaacttacaaaaaattaaaaaaatataacagacattcatatgaatatgattcgatatgtccgtttccgttaactttcttctatgaaattgattacgacattactgtgccacgtcagcctcgcaatccaggtcaattcgtgtcaatccacacaaacaaataatttcttacaaaaatagtaatgaaaaggacgtaatcatgcatatctaatttatctacatcttatggtgattaatgatcgtatgtgtttctctgtttttttaattagactgaagaaatagaaagaaaaatatttgaaaaagtatactaacaagtccaattgtgttgaatagatctgaacaaccgataaagatgtagtcaaatataaaatcattacaaattttatatgaagagatcgcatctaatcatcctcgaaaccgacaattcaatcggttattaattataacaaaaataattacttcgaatctcaatccgaataattgatgcatcttatatattgatattgtggtggataaaataaacaaacaatcgcattaatgatgaacggctatacctctagacaaacttatacaagttggaagaaattgaagataattttggatcaaaaaaagtttgtggttttgcttggaggcattgccaactaacaatatctgtctccatgtatctctctattcatatcctcatatgcaattatgcatgtacatgtacgtatacattcatagatatgcagcatatgctctatattgtatagatctttagcccataagtttcctccacatgagactaaacgttgattttgataataaaagcgtaattcatctttcagaaaattattgaagcaataatactaattgaatttttgaaaatctagttagctatcaccacttatagagttatagtatatacttcaatattgtaattattatgacataaaattgtgttcattaaattggcaacgtaacgtgactttgatggaagaatgcgtcttcttgtttccaaccttccaatgatattagacagctctatctctatcttaacgactcattttctttctttggattgtatcaccctctatccacacaactcatctcatctaatcattttttatatatctgcatgaatcaaaatttcgaaaaacaatttcataacatttgcaaaaaaggaataataaaagaaatcacgtacatgtgttagtttatgtaacaaatatacaactttggtctccataaacaggaccattaattacaattgtttaacaaatcaagggaaaaaaaaactgtactgcgatcccttctaaatttactttcaaatgtgtaaaaatttatcacattgatgatcatcaaaatgcaatacttactataccaaacaagttaaatagtatgaatcttctgcttaacccgcttgtcttttaatcaggcatatctataaagtaatgtctttttctcactttaaattctatattagcaagctggaagttataatttaatacaattgtgtaagacaaaaaaatgatcaacagaagagataaggcaaaggatgggcccgaaacaagcctaatttgataacaaatctaaatttgatccatttcataagacttctaaacttttagccatctgggtaacatcatcagttgcagtgtcatactatcactcaaatccgatccgaagttatattcttctacacgatatgtcacaagtttgaaattaatgctccatatgatatttcaggactattataagttatcaagaacaattaagagaaagcgaaaagtagttagttaaccaataaaaaaataaaattaaagtagattgtaaaagtttaaaaaaaaaagagaggatcaaaacatgacgaggttattcaatcaagagcattcgagtaaaatattctagcaataatttgaaatcacattattattattgttatttttaaatccttagtcatattatttatgtgcctttttgccaattaagaaaataggtaaaaattgtcaaaaaaaatttttattgatatacggttaaaaacaggttaaaattccaaaaaaaaaaaacacaccacaaaactaattgaaatgagaaaacaactacaactaagaaagcaaaaactatagaagcaagtttaccacaatttcagcatactttcgaacggtatacaaacttcaaaagtgtgcagattgttgttggttctcctttgaagatttttatcaatcttcaaaagagagaaagaaaagcttggtgtttctagagatctcttcaagttcttgtgagaaaaggctcgaaaaattgtgacaaatgcatccaacaatttggttttagtccatgtaattattctcatattctccaaaggaaacagtcagtgcacacttgtgcacttccccttctctttgcaaacaacacaagaactggccaacagaagtgtaggctaacattctcctacacataaacaatacgggcaaaagcccaaacaaaaagaaagcccaataacttaaatgaaaagcccaatatgtaaacttggaatttttttgacatcagacttcatcaagtgacgaaaaaaacaaaattctaatttataaattttaaaccatttctgtagcaattaaataattaacgaaggttcacccaaacaaatcatattttaactaatttataataaggttttcttgaattaatattccttagttgcgccgacaaatacacgaaatgaaaatataagtttgttataaatttgacggattttaaattaattcgatgcataaaattttcctttttttttgcttaattttgtttttgttttcttctccagtcaaagaaaagctctttgcgcaacaaaataacagaaaacacagagacaagtgagagaaactactagagagaagaatgtcaagctttcttggttctacgttaatggaggtttcgagtttctgttgatttcttttcaacctcaagtaaacttcaaatctcctccgtctacttctgtatctcttcttcttcctccaaaaaccctgaatttcgctccctctgaccaccgtactgactttaccggctccattcggtgatctacggaggtgatagctagctatggccactcggggaaacaccaattcaatgcaggtctgtctcttagctctatctttgcattgttgcttatcttcttgttcgttagtctgcgcgaagatgtcactgagagttcgagtgctcgcggatcataactagtaatgtattgatctttcttggttcaattgcgaatcaattcactagtgatggtgtttttagaggatctcaaagatgggattcactggatttgcgttttgttggtagtgtaggagaggagataactgatactatttgataaaatctttgagattcatgagtttatttccaattggatctttacatgtattcagaaaccacaagaaaatgattatacttgccattgttactattgttgttcagagagtgaaggtttatcgtttgaatgaagatggtcaatgggatgataaaggaactggacacattactatggattatatggaggtttgttctcattcctggatccctcctgcgggccagcactgcgcattctggaaaattacttgtagctaaatggaaacgctaaaacatgcagcgatcggaagtattcaatctttatgtaattgatgaagatgataatgcgacattgcttgcacaccgcatcagcattgataatatctacaagcagcaagacggtaacctttgtgtgttatggttttattaactattatgtcttcggtccacggtttgtttacataagtggtgtcaatgtacagactcaattatctcatggattgacccacaacactcagcacaattggctttgagctttcaagagactgcaggatgcacgatcgtatggtgagtgacaaaaaatatcttccattctacggatcattctactgactacaaaaatggtgcttcatcctatgcaggaatcaaatatccagtatgcaacggattctacatttcgattctctgaacagtaagagatttttcctgatcaaatatatagtatttgtcaaactttcatatcagtctgatattctgctttttcattttcttattatatatatatggtctgttcaatgtgtcataggactgaccgactgagtttgaggtttgcatatattagttcatagagttttcagatttctgtggccaattgctcatttccatctgtgaacagttggactttagaatatctgaaaagaaataatttgttttagaacttttatgaagatgaaacttttgatctactagcattttttctattatagtagtcatgattgttgtatttgaatataatcatataatgactgtacctttttgttttaggactttcatggtgattaaaccttttgatcgctttccaagtattgttttctatgtaacggtcacaaattttgtatttgacaacataatcatctttgcttgaacaggcgaagcgtttcacaatgtgatcagtgagttgaaggagcttcctgatgtcaacatttctaatcttcccctaatactcaaggttcaaagataataatgatcttgtgatttctctgctcgtggttagcttagagctccgttgtgttgataattgcaacttaccagccttaactgtaatatctatcgtaagggttcgactataagtttatatttttctcttgattgcttttggatgcctacttttttattactctcattgtcttttcatcgtccagagtgctaccgatttttcaaagtttcttttcatagtttgtatctcccagaactgcgattgtttgttctcatctttatttacgctctcaatgcatttacgtgaatacgtagaaattttcttgtgttaaacggtgccctttattgtcctgatttttcattataggtctctattttgtcgaggacttaatgtatttgtttcactcttccctgcaggttgttgctgactatggcaacacagatcagatgcgattaaccgaacttatgctgaagaatgtaagtattaagtgcattccaaagttctaatgtttctttttgtaagaaataattgagttttcattctttctctctctctgtgaaaacttttaccaagcacaccctccttaacctacttttttcacacttacagcagggtgctttctttcagaaattgatcgatgtatttgatgactgtgagaatcggaaagatattgatggccttcatatgatgttcaatattgtcaaagaaatcagttagtaattacatctcaacatcattttttcttacctaagcttctggattttatgtaatgagcagcatttcttgtttttactgcagtttcggtcaacaattatcagatcctggagattatcttaggggatcaactgttcatgaaaattttcgggtgccttgagtgtaagcttcaagactctggtagaatgttgatcattataagtttcagtgacgacgaagggcatgaccagtaggatgtagctgttttgtatctagggatagtgtgagcgtttaattatctcatgtggacttgtactgagaacttctcacctgtggagagtaaaaaatttacgtgcatttggaaccgcaaatattataggccaatgtatgcattttgtttcttgccctattcgtaatctttgatgctaaagaatgctgtgtgttttgtttttccacacagatgatcccgatgttccccaatctaaagatcaccggacttctctgagaaagaatgttgtttttgtggaggtaatataatgttctcgtatgttcatgattccatgtacttatggaccagttagcacaaactgagcttagggaacacattatttcaataagaattactggtgacacattctgtaggatatttgtagaaaaagttctaacttgaaaacattgttattaaaaccccacaattgtttgcaggatataccaattaagaatcccctggttctgtcgaagatacaccaaacatacagaattgattttctgaaggttcaatcccatgaactctcctgaaaacattttactgatttatttttctgtggtttttggtctcaccttttcctcaaatctttgcaggatgttgttttgacggatgtactagatgttgctacatccgcattcctagattcagtaatcaatgcaaacaaagctactgtaagtcatccaaataaacaatctcaaacttaacgcattgaatgcaacatttatgcatcccatatgttgctttattaatgactatgttctgcaggttcttacactactgaaggatgacatccaagagtcatttgcaaggttacggtcaccttctacatctgacgaatcaaggaataatttggtatttccgcttcatgaggcatccatcattttcttgagattatggtctttttgtaattcatggagtaatgtatggaaatggttattttagttgaaatccatgtagacgttctttgattttgggcagggtcctgtcatttaggttcttagatgaaagagttccaaacatttgtgtctgcacgcgtattcagatattgaggcattggtcatagtcaaaattcattgaagggattgcagtttaattcaggcatttggttgaagaaactagagctaatcttgtatagacgcatacaatatatctttgccaaaaccatagtgtttcctgggtgagttagactgatgtgtttttaattcttcaaaaaataggtgtacttcttgctcgaattttgtagtttatgcacgaaagagaagaatgtatcagtcttgaggtacttacttttcagaaactaattctattgttagtactgagaaatagtcttttgaaatggatatgtagcagctattgaattatcatttgtggattatcaattcagtgcagttgagaatgttgtcaatttctgtatcttacgtggggtgcttgtctatttacttatcgtgtagggaacttatcagagtcggtctttttgacatcattgcagaagtcttgatgagttcagataagaaactcgtattaatggggtatattatattacctttagccacttatatatgatagattggtcgtcaattttttgttattattgtcttatgccctcagtacatgatactcactataattattgtttgatggatgcagggcaaaaatccttagtgttttgttggctcaagattccatccgcttatgctcttatgttgttcgaccagaaacttacctccttggtctcttggtatattttctttagctattgttctcttttggattgtttgtcttttcagctacgaggccgttcctgtttctttctatattagaatggagtgataattggttttcgtgatgtgcaataggttaagggaatgatggaagattttggtgatgagatggaatcgctgtttgtggacattattcaaaatgtattgggatgtggtggagctcaggtctctgataagaagacgaatatggtattttcccctttttatatgtaccattgtaagaaaatgtcatagtcaaataaggtctgatggttatagttgcacgtaacaattagcagaagaaaaataataaaaaatgtttctcacagagtaagtttttcttgccttgtattgatagttcttcgatacatatctgctagaatggttggtataagatccgtaattcttctttttattgaactacaatacatcttgatttctattaagagttctttgataaatttttcaatttcgcagcaaaggatcatttgggatattttctgtgagaagcatctacctgaattagttgatttcataatggcctcatgtcctgaaagacctggcgatacatctgaaggtgcattcgtaagagttggcagccatcgtggaacaaagccgggaatcctattgcgcatttgtgaattgctgtgctcttgcgttcagctggatccatccaggacaaagtaacctttatgatgattatcacattatttctgttttagtgtatcactacagtagccatctaatattcttgtgcatttacttctcttgtctgctacgtgcagttttctccataacagtgtgatagaaaaggttttgcttctcactcgaagaaaggaaaaaaccctagtggctgcagctgttcgatttgtccgcactctcctctctgtccatgtaagtaaagtagtcttcgatcagcattttttcttataggctcatctgtgcattctctcttgagaatgaattagacaattgattctataatggctagaaaatgttctcggatgacaataagtctttaggtaagttatgcaatttctaaaatattgttctatttcagaatgataatgtccagagttacattgttgagaacaacacgctgaaaccgattatcgaagtttttgttgctaatcgtcatcgggacaacctgatgactgctgctgtgttggagcttcttgagcacatacgcaaggttcctattatttcatccttttcttcactgtttctttggggtgttcctctgtacataatacatattactgttttgtgtgcaggaatatgcagtgttggtcaaatacgtaggtgatacattttgggaccagctagctccatttgagaacctgcgttccatcaaggatttgaaaacgaaatatgagaaggtatcattcttcgatctaacttctactttgaaaagttttcctaaactattctttgtttaacaatgtgtcaatgttgtcttagggaccaaagagcaccactgatgatgaatctgatatgagacaagatgggcgtgctctggatgaaaaaaagccagcttctgcttccagtacacagatggaagaagctgatccccataattccaatgccacagctgcaagttctgcttctagcacacagatggaagatgctgagccctataatcctgatgtcacagctgcaagttctacttgtagcacacagatggaagtagctgagccctataatcctggtgtcaccgctgcaagttctacttctagcacacagatggaagaagctgatccctataatcctgatgtcacagctgcaagttctacttctatcacaccgatggaagtagctgagccctataatcctgatgtcacagctgcaagttctacttctatcacaccgatggaagtagctgagccctataatcctggtgtcacagctgcaagttctgtttctccgaggtatttgtttctggtttctctcgatagaaattcattagaagcaacaaatatagttaatagatttgctttctgttttctattaatcatatagcaagaggtctggaggtttggttgattatgaggatgacgaagatgagctagagaagagtaaaagacagaagctcagttcaacaagtgaaggaaataagaacaccccagaacaaggtggtgaagctaaggaacctggagaactctaaggagctaatgacgatagcaatagtttagatgaagaaattgacagcaagcagatgtaaagagatgttgagattaacattcttgacaatagataggatttttgaagaatagaagaaactgtgtatagagggttaaaatgatgcttttgaagacaactcgatgatccgtgtaaatgactatgcaattgcattttgtaaatgaatcttgtgtgaaaatgaaattacaatttcttaaagagagacttggaggatttcatcatacacccgaggatttaagataatttcaggcaggtgtttctgtgtatatatatcagatttttttgaaacaggtaatgggttgtttttgtttgtagatgtcttgataatttccgtttctcttgatgtccacatttaccatttacctctaattgatatcatcaactcaagcgtttttacaaacaccaaaaagcgcctatttgcatcatacagtataattaaataattcaaagttcaaacgatgaaatttcacacatattcatattatttaattcaatttgatatatcttcatagagaaacaatttgtaattttaggaaaaaaaggaaataaaaaaggagtgaaggacttgagagaaaataagaaaagagtttgtgaataatcttttgtctttctctttcgtcttcctcgctctaacgccgccttctcacactctcaaattggctcatccattccaagcacgctccttcgatcttcctcttggtacgctcgtttctaattgtaagttttcttcaactcctattccaacgtttgtgtagatcttgtattcgagcaattagatcgataaaccctagtttctccgtggatattctagcaacttcccctagatttctccgtatataatcgtaaggatttagaaatcgaattatattgtgatgtttagttaacgaaaacccagtttattgaatcgtctccatcaagtagaatccctaatcttagatcccctgcttagggtttcgaaatttgtctattttgttcagctttatactgattctatttgtccaattttgaagatttgattctaagtctctagtatattctttgttatgcaatgcagaaacatgtctaattcaaaggacgagaaatcacaagatgcagctgatagaatcaaggctgcaacactcactgctgctaaaggtctaagccgtacacaagcggagagagcagcggctgcagcagcgagaaacgttaacgcttatggccagaaagaagaaggtccgagtagatggcaggagaaaagagaattaaagaggcagatgtatttgatgagtactgagaaagctgtcaggcttggtgaaaggaaagataaaacaatgtcagcttcagccgtgggaagcagtgcttcggcggcttcacagtgtcagaaatgtttccaagctgggcattggacttatgagtgtaagaatgaaagggtttatatctcgaggccttcgagaactcagcagcttaagaatcctaaactgagaacgaagccttctgttgatgatcttgatggtagtgatgatgatgatgaagaagaaaggcctgatgcaactaatgggaaagcagaagttgagaagcgatctaagaagagtaagcgaaagcataggtcaaagtctgattctgaaagtgatagtgaagcctctgtgtttgaaacagatagtgatggctcatctggagagagtagttcagaatacagttcatcgtcggactcagaggacgaaaggaggaggagaagaaaggccaagaagagcaagaagaagcaaaagcagaggaaagaaaggcgaagaaggtacagctcttcttcatcggagtcatctgagtcagaatcagcttcggactcagattctgatgaagatagaagcagaagaaagaagaagagcaagaggcacagcaacaagcgtcgttgaattggttttaggaaatcgataagtggatgaaaattttcatgccttagaatcattttaagcttcttaaaggaaactcactgctatgttacttctttttcttcaagttcgattttttctttttgtcagccatttatggctttatgttgtaacaaactgataaatctttagaatctcctcaagttttcatagctcaatagctccttggagaatgttgtaaacctaaacgaaatacctttgtgttgttatgatagagagattttagtgactgttggttatagcatgcatatattcgaaggatggaggaggttttttggcattcaatggaaattatctatgtactagatactctgtaacaaaaaaataataaccacatcaatccaatactaattggaaagtaatcagttcaaacaaaattaaaatcatcccctgaaacatacaaatatgtgtaataaagtcaagggcttcttttgtaaatatccgtaatttatcttccagaaatagttgcattaattatctctgtgactctgtccccagtctccttcctcacagactgatccctctctctcccaaagttgcattaagttttaaactagtacaaagtctaagcttggagcttccactttgtgttctccttgaaaagtttttaccttttttcaatctctgttgttgatacacctgtaaagctcatattgcacacaaagtgttcgataaaatgcctagccgaaacaaaaattgcatataactggtttgtttctcactctctatccctcaacttcttgaattttttttcgtaggaattctctagaggtgttatttaggaacataacggtttaatcgtctccatttcgttggtactttaatcataacagttttggttttgtgatcttcatttatagcttctgagaaaacaagtgaaagtatgttacggaacatgatgatgccttggaacagtagcgatcacaatgtagttggaatgttaacaaggcatttcgccacaaaaccaaaacccaagatgaaaccgattgagctgaacacaccaccggagcaaactcagacgataacccgagtgatctttgatattttgaaggatcatggacctctaaccattgctgaaacttgggatcgtgtcaaggtatagactttttacattaccatatgcatttttcatttcttttgttagaggttttagattgactttgacaagtagaatgattgtttctcaaatctgttccaaaggtagagagagtgatatctcaaaatcgattttgatataatactcttcttctacattactagatggtttcactttctttgttagaggttttggacctgaaattttataactataggtagagaatgttaaggttcatagacactgtctcaaaaccaattggtgatgtgttaagtaacgataactcttagagaagtggaatcgttgttggttagctttcaaacagagattatgcaagtatcatcaccattgatagtcagcacaaaactgtagttttcaatttgataataattggtataaatgtttttgaacaggaagtgggattaagagggctgacgagcaagcgtcacatgaagataatactaaggtggatgagagagagacagaagctgaagctgatatgtaaccatgttggtcctcacaagcaattcttgtacactacttggttcactaaacacaacccttcttctaaattccccaagttaccaccggaaaatctcacaggaaaatcctctggccaccctcctaaacttccctgagccgactctgttaagttttaaggctttgtttcttgaatcttcctcttacagttattaatgatcaccttagtaaaatcaatagcacatatatgtagcctgcatctgaagattccttgtctagattctcgtgacaattgaatatgaaaagacatgagatgaaagttgatgttgttacagttgaagaatgtgtaaatgatacaactgcataccagttggttaactttatgtatataatcgaaatttcacctgattctgttgtcatattaaaaagacatgatgatacactcctggaagtggatctatactccaaggactcactttgttggttttgaattggaaatgatgtagttgatagtgaataatggattgatcttaatcaaagcggtggaaagacgatgaatggggatggcgacgagatcgagtggatgcagcggaatgaaaggggaacgaattgtacttccaagagtgatgaaagactcttagactacgagcttggatccaacttagatattacacactaagaagaaaacaagttgaaaagatactacacacttttcagatcaaacaagtgaaagagaaagtttttgattaaaatgtttgatgattacaaatgagaactacaatgagtttatataggagaggaggaagaaggggaagaggtgagagaagaaagacatgcaagagcatgcacaagtacacactcatgcaaagagttttggaaataacaaaaacaataaatgcaaagtttgaagagaaaatagaaaatgggccacggcattgtgagtgggccttggaccacgaattgagctgataaagggaggcttgaaagtgttccttaggcctcattaaaaaccttgtcaagaaaacccattgggacaaaacttgataagggaaaaagaatgcataagcaacacttaaccctttaccgagcctcttgagccgtgatcactatgaaggaggattgagtcacgtcttcttgattcttctttagctccttgagtagtccattgatagcttggttgaacttcttagattttgatcttgttagaggacccgccagaacgattaatgcttcctccggtacaagctgcttctcgtctttttgtggttcaagtggtttggttgccttggtcatgttctcatcgcatgagtttggacttgaaactacaaatacaaaacatagaaacagaagacaaatattatcattaaaccaaactgatgaagcagagaaccagtttgatttcgatcaatttccctcatacatatatgtatggaaaactgatcgaggtcaaaccagaccctttcattcattacattgctaaaacatatctgtaaccaaaattagcagaatcaatacatacatataataaagaagtaactagaagttagtttgaaaactgcagagaaattatcttcaaagtgctgaaatagtgtttgcaaagtctttgaaacaatcagagaatcgtagattatctccatccaaacatctctgaaaataagaaaacggagttagatccaccgagacttgatcatcaacaacagcgttcaaaatacttgcactaatctcctgatgagtagtgttgtccgaaaaccaatcatttagcgcgctctcaaaaggcgtgtcgaagccaatgtcttgatcgtaatccaggttcatttcaggtaaagcagcgttgttatccataacacaaaaagtttcacaaatcgagcgaatctgatcttgttcttcagtgatctcattgaaattttcaggtgaattatcagggacgcaacaaattgcagaagtactcgactgaatatttagggtttgatttggctcttgagtaatctcgttgagattttctgggatgcaacaaattggagaagcggactgaagaattagggtttgatcatgagtttcgtggtctgaaacaaaatcgcacttgtcgttgttcttcaggtcctcgcgatcattaacgaaagcttgattacaggctaaagcttcatccgcacgcaattccttgagattcctcaacagcgtccgcatagagtcgatcgcttcactaatctcttgaggattctccgatctggcaaggctctcgtcgttccaccaaaaacctaaccctagattattgcgagtcaaacagataccaacgtcctccctcgtctctttgttatccttcggaacaggacgttgtccggagagaaaagcagagacaacggcatcaacagaggagtgaccgaaagagtagaaggatacgttggattcagaagaaggaggagtcgctaagatagcgatctgtgcgtctgagagaagacaaagctgagaggctttgctatagagaccttcacggcgtttggtgcaggtaaccctaagggaatctctcttctgtatcgtctcaatcgcaatcttcctcttcgtgccaccttttttcaccattctgattgatttttctcaattttgttgagtgtggagaaagataattgaaaagtgaaggcttcttctatctctcagtctcatatatataagggaaatatcgaaaccccatatcaatatcatccacctaaaccgattaaaccacatggaccgtaatcttgtatgggctaagcccaactatccaccagaatccttttttagtgcagtcttatttatttttattttgataatttttagttattgtattatgattcagatttatttggagatatttttatttttcaaaaaatattattttgctagattctacaaaaaaaattttgtcagattattatgagagagacaaacaaatatatagctggttcttcacattatcgtgttcattctttctggttcttcactccttaaaatgtggctatggagttgacaaaggtgacctggtagcagaagaaaactttgttaaagacctactgaaaaacaatagtccatcaaataaaactaacaaaaaagcctatcagctatcctaaacacacaaaactcaaaatatcaataccaagaagaaacaattgtaattggtgactatagaacaaaccttgagagagggtcatcaacatataatcactgactgatttcattggagcttaaccttgacagtgtttcaaaaacacctagcaatatctatcactcagtttactaccactgtctagagcaaccaaatcgtccagactttctataaaaacgttgtttcttagtattcatcaattttttgtcaaaaatatttgcaattatactgtttttgtcttgatcatctattgtagactggatatttgcacatgtaatgtcaacaatttcatctgttgttgtaccattagcagaaaaagaaatgattctcaaatttggggttggtcagtcaacagaagatgattccaaagcatcaaacgtttttgacctctcctccaatttctctttacatacaatttcaaaaagaaaaagattatctccaactaaaccctaaacctaaaattttctaactgaaggaaaaaaaatcccctaaaattctcttctgccattagaaccagagtttttaaagaattgcaggaaacctaactaaataatttggaaacatgagaaaaaaaaacatcagtttatctacataggcgcgatgataagctacgaagaaggtagcgtccggtcgaaccagttagagagatttgagattttggctgctacacttttatttcgaccaaagaaagtctctgcattggacaacataactgatacgtcgtgtcgtaatgcttccacacttcggtaatagttgttctcaagccttgatctgattacttcaagagacaaaggaactgggaacctgcagaatgaatccatagaacaaaaccatgtcagctttggctccaccaaagactcttccagggttgtagaaatttacctgttggagtagctggaatttcccacggtctggttcagttttcggaggccaaaagaatcctgaaacaaattagcccacattatatcaatattgttagttcttgggataatgttgtgtcttaatccactaagctttagaatgtgatctataaaccaactaagctaatgtaaacatgggcctaagctctttgggtgaagtctgaatttggtggggaggataggctagatttaacaccatgagatattatattcattaggatcacatacctgggttctcttgtctgaagtctctaactttgttaaggccgagagcaaacggtttcgttgctcatcatcaatgtgaggctgctcccacttggtatctgcatcaaaaagctcccagggactgtgaagatgtgtctcggcagggtcactcttgtacttaactgtgtacctctcccacggactatcaggaaaatcaggtgatttgggtttcacagctagaatccgtccttcccaccaactaccatcttcttcgccttcgtctctccaccaaactttacacttgtccctgcaagtccagttcctctgtattgctgcttcataccgacttctttccacaagaaaatctggaaacgtcaccacttcaggcaacgtaagtttgaaagctttgttgaacacttcggagtttggatcgatgaccttaagtatcattttgcagcagctatccccagaaccaggcagagttgcatattcaagactttccactttacaaatttctacagcctttatatttcctccttttattgatgtccaaggagccacttccctcagggagctaaagtttaagtattcttgatgcccctgaaagataagagtaacagccgcagataagagaactgataccaaaggtcgactaaacgaaacaacagataagattaccctcaaaacttacctgtcgcaaatacgcaacttcatcccccatttgtggaatataacgagaaccctcttcatgtatcgataatgtcaaccaggatacattttctattaactgctgaggcttctttgtttcaataggtttagtttcactaaagggataagtagactttctatttcttgtggatctcaaccgaagtgttgctccagaagcggatctcaattcttcctgagagttttggtttccacgtgaatcacttattttatcttggatgtgggtcaaactgccttccgacttctctaatccattcaactcagtcccatggaacccattagaggcaccttcatgggacttagagccactaccatgatcctgactacaagaacctggactgacttctttagtaagagcagcatccctgtctaagttgttcttatgcttccgtgactttcgtctatagacaaaatcaaacatccgtttaggatgtgagtgtgacacaggaacatcattagcaattgagagcgcatcacagatctgaggatttaattccagaacacaatcatttcgcagagatatctctgtcccaaccacaccatccttttgacagtccaatgtcaaatcacatttagcatcttcaaaaccatcatttaatgcatcagagccaccagtctcttgatctattgataaggattttccttcttgcctcaaagatgtatccggagcccttgaaactctcttggagcgtatcttcaatgtcgttgagattggtggaaggctatctattagatcgtgccggtgggttacattttgagaactattagaggccttgtcatcagccactcgacttggtgacccatccagttctggatatcgcttcccaccatttggcaaaccattagagatcaccgtgtcagtgtcaactgccatgtcatctatatctgttttcaattccaaacaactaggtgctgtaacaccatttccacggtgatttgagtcttccttaacattattttcctttccctccgggtcagagcccataagttcatgcgatgatattgcttcacctcttattcgctttgttgtacgagccttaaccattccccatttgactttacttacatctagcccttcaaattggttcccaggaatcctcgagtcttcagtacagccgttccctaaagttggacttggaacatcacaagatgatccaggtaggttctccagtaaggtaagcttatctgaattcctaacaggaaatctaagaaccaatctcctcctttcagcagtatgagtttctctgatatcacattgttgagccccatcatcagaatcacatacgaggatagttttccccttcgattgcttcccatgcccatttaacaaagctacttcaagttcactatccccagtacctgagtcttgtgttgtcgattcactttctgatgaatcactcaattcagagacttcctcctcttctgcatctttagatgtacctgtaatcttagaaaaccaagagagagcatttcgtgcagctgctcgcctaggtctagacgatttagattttgaagatttcctcttcgattctttacgaccactcctagattttctggtacgttttttgttgcttggagctccctcaagctcatcaaagttcctctttttgacacgcctacccgaagaagtcatgatcccagcctggtaaagaggttaaaagggattagaagcctatttaggcacaagatcaaagcaatattacaaaatactcacttctttcttatgttttttccttttggatcttctaaggctattctgatgatcatcatcctcatagctttcaccagaactggaacctgactcaccagaggttgaagaatttaaacattcttgctcttttccagacgaatactcctctggcacattgtattcagagtcgttttcatcacttaagatatcaacttctggttcccactccattacatctataaactctggcaacggttcggctaagtctagatctgccagaggtggcatttggtaatctcgatctaaagtgatatctggcccgacagcaagcttcaaagaagatggtcgccattctttgcctaaggcgccgagtcgccgtttctgaaacgtggtctgatatggctcttcatatggaatcatccctaaaatgcagaacaatagagagtgaataaaatatgcttatcctaagtggaaggatccacaaagcatttagaatcatagtaaaagaaattaaaacctgaatcacaaagaggatcctccatatttcggcgataaggttgaagctgagattcctgaatcaaagttttccaatgccaattagtgattacattataagtagaaccactcgaaggggaagaaaagatgagctccttacctggtcaaggacattaccatatgtgtcctgaattaatggacgataatcccccaggaagaactgcaagatgcacagagcagatataagaaaattctatttttgcatatgatattgatgaagccagctagcttagaggaggtaactggggcaagtagaactaaaatatttctataatgtttagtaggaatgtatggatgtgaatgtttcctatatcttctctacggttttattggtttaaaccctatacacagagatctttaatgtttattgaatgttttgatagaaaggagatattgtcctctccgattaacggaattagttgaagtacagtaatgaagctttctccacaattgaagttatattggtacctgatcatatttagcgtctttttgagaatccccttggccagtacttaatatgtacaattggcccacatcatctgaaagtataattgaagttccatccctacattatgaagatacagattagcaatctgatggagtaggagcataaggagtacagcccaaaacctatttgcttacggtgaaaacttcccatcaaccaacttgtagtgtgaaatgtcgtatatttgtataggtatgccttcccatatctagaggaagagaacaagtgctttagtaatatagatgctgaagaagaagggtttagacagtgaggaaggtaaaacttacatcccacactattgtttttccatcatagccagcactcatagctatacgaggattgaatggatggacgtccataacatatgtctacaatcaaaaagtaacatgttgataacggtaatacaaggaacaaagaggaaatcatatctggaacactaaaacagaaaccagactaactttactagtcatactttacagactataacaaggcataaatgacattaagtagagttgggacttgggagtgtttccagaaaacgaaaagaaattaacttatggttgaaataatgcagagcattatggtcttcttaacagaattatgatttttcattattttaggcatgggcagaaatttcttgctttttcttctttaacgtacacaggtcaaaagtttttgcaattcccaaacctgccttaagagagaaagagaaatatacagaagggatcaagcactcacagatgctgtatgaccagtcaaagaatgtaccaagctaccatcagaggcattccacacgcatattctacaatctttaacatacaaattgattctagttagaaagagtgcagcgttctagaaatcgacctggataaactcatagccattaagagtgtcaaaatagtattacccataatagcggcaaggacaaaacgattatccagactccaagcaatcatgttaaccccacggggtgtaggtaggatcctttgacgtggcccccctctaggaggttgagggggcatgggcggaggtggaaccttgagatgatatgctcgtgtccatcggcagctttttccctgaaaggcacaagtaaagatctgattttctgctcctatgaaaatatacaatatgtaaataaactattaaagtcgcagttatcttagcaaaactgaatgttacatgagatctccgtaatcttgggatccaaatgattgcactaccatcacgagagcatgtaactatgttatcatgacaaaacctagaaaagacaccatgtcaaaaacaaaaaaaaacattagaaaaaggtgaaaagttaatagtagttgcatgattatctagttgcagcagagaacacacaccaggaattcttaaattttggaacattctcgtcttttgagtagtcagttacagaaaatttagaccccgcagcacaaccactggaaagcacaacagcaaatgaataggatcaagacaattaggatctcatgagaaaagtaatttcaaaagtgaatagccaacctgaactgaacataattaacatcattctcatgtccagccagaacatccatctcatgatttggctgctctggatcatcagtattggtcttattagcactccaaacctgtaaccaaagaaaacaccttttgtaaattaagtgaatcctaatttggcaaaaaccttatgtggatttgcaatatttgactcaaaccaagatgcagtcagaaaacatttttcagtaccgagtatactctagcaagagtgtcagaactgccagtgacaaagacagatccactagcattgaatgcacagcaaaagatttggtgactctgctgagcattactagaagaagggccactgttctttcctggaataggattcccaagtcagtcctacagcttccaataagtcaacgcaaaataatttaactatgaacgtaaagcaatcaccatcaggactaggaggcctagggacatatatccggggagcaaattgggctccccgggcatcccatatcctacatgtaccatcatcagacgatctgcagagatataacaaaggctcagcttataaagataccaatgaaataaagcaccttttccaaacacacaaatagaatctccagacaacataaagacacgagttatgaaatagcagagatagaatccacagcttaaataataaattccatctgagggtgtatgaatcagagtgcatttaactttgcagcttgtgaccacaaggttagttgattcaaaatcacaaaacaataacataggcaaacaccaaaccaatagtgtgaaaacaagtgacaaaacataatgatttattaagagggaaaataatgcaacatttagcgtacatgatgccaaaaaagaaggaagaattcttacgagagaagctggtacggggatccaggtctgggactaaaggcaatagcagtaacagctccagtatgtccacggagaacagaaactggtaagccatctggcaatcgccactacaaaaatccagatgggtgaagtcatcaagaggctaatatgtggaagtcaatcatatacagaggacgatacaagaaacttacaacgcggatcacacaatcatttgatgcggatgctatgaaaatgttgttcgaactcacagcaagatcagttatgtcacccttacaaatgcaccaaaaacaattttaagcaccacttaaagatacagtaacaaaatgatagcattctcacaaagtacttggaactcacttcatgccctcgacagctggccaggcagtatgcagtatccatcgaccatacttttacaaggcggtcatctgaaccagtgattacataccttcctgagcgatctaatatagctgcagcatttaaagatagcttcaggtatccagttcatctaaatgattagtctattatttagtaatggaacttgacactaaaaatttcatccctaaacaattaaatatcataccacagtacacagcatttctgtgtccacgtagcctcttgatgttctgcatcttttgtaccattgacgatggttttgcaatgacgtaacatgctgctcgaattgatggggcacgatgatgtctggcaaaaccaccaccaatttccctcaaactaataccacgaacctgatcagcatgcatatgaggccaacgcatgccaataggtggtggtttgagatcacttccaactatttccttgtcagctgaaaaaccaaacgaagtagcttaatagcaaatcaagattttcaaagagaatttagtaaatgctaaagaatccccaaataatttataagagaccttagtagtattaatatgttattatagacatatgcaagcatatgtatgtatgagtctatgtatgtgcatgtgagtgagttaaacgtgccaataaaataacaaattctagaaatcacctacagctcaaaagggagaacgagccagtgcctaaaagtgttggaaccccagctccaatcattttatttccatcaccgatccctcgtgagggattaggcctatttgaaacaaagaccaattgctttagaagctccaccaggtgatctttttttacatgagaatacctggaagtgcacatacaatgccatgaaacaagttaaatatttctggtgagaagaaccctaaacccagtcattaacaaattagaaaatacagaattaggagaaatgaatgacatattaacttcttcacttgaaaaataatttaaaattcacactagtactacaaacggtgagagtaacactgttagttacctcttagccaactcagtatagttcaaaggaaaggaattgccatcatcattctcatccccactaggcaatccactcctcgagtaccaagcatgatatcttctaggaagaagctcatgttcaagaagttcatgccgcaacagtgcataagttttctggcacggcccagatgaaagtaagtggagcatcaaaaagtaaacttcccggaggtctagatcaatgttaggcgcaacactttgaacaatatcagggtctggaatctgcacatttcctggcaattttctggagaaattcaaaggcttcataggtagtgaaactgaatcgccttttggagtatttttcctaagagccataagaccctgtcaatttgccagacactgacgttaatcatcaacgcaaatccaacagctagaacatgaatagaaaaataaaaaaacatcatgaagatattatactttcaaccaacaagagaagtgaaaataagatcctgggagatttttcagttagttctactctctggaaaattacagtgagacaactgtggaaatctagagggattgcaaataacgtcaaaacctatgcatctcataagcttcaagcatactaaaacctacaccaagtagttcctattaattcttcgacggaaactatctaaaacactataggataaatgaaaaactgaacaaattggcggaatataatccttgtactaaagcttaaaccagtctactccatccttacactaatgttaaaaaatacaatctttgacaattacaaggataatttctagcaccagaagggaacttaaaactacataactcaagtaaccaagattaagaactccattgaatacacttcaaaagttaactaaaatatcctaaacccacaacacatacatatacatgccaaaacattccacgaacaacagtacaaaacattctaattaactttcaaataaaataagagatcttaggaagtgtacctcggtgatgccgcgtgagctaaggagaactacgatcacagagcaaacgattgtttcgaaagaagtccaaaaccataacacattgtctctgcaacaatcaaaaaaacaaaaaccctaaattagaattgccccatctctaatcaccaaagaatccaaacgcaaattaaatcaaaacatttcaatacagaatcaggattgaacaaagcacatgcacaatgccagcatcagttcctctatacaataaaaaaaaaatcccaattaaaaagagaaaactttctcgaacctcttgaagtcttctctgtttaagaaaaagcggcggctagagagtcgtcgaaacctctaaagcttggtttggatttgaagatggaagacaaataatctctagaaaccgagagagtcaaaaggagaaattgatactagggtattgtgaaagagagatgattagaatcaatagaagcagaaagtttcaatcttgttgaagctttttagtagtttgcgttattcggttttttagtgttttttgggcaagacaaaatttcggcagaagaaggcgaaaggattgtggagaaacgcactggatagagagagaagggaagaaacagagcacaacgcaaaaaaacgaactcgaacctaaaacgctgcgttttgctgatttcattcaatgggtcacgtgccatggcccattatcatcagatagtttttgttttgtatttgtttcttgatgcttcaaaccaacaaagtggctgtagtttagtggtaagaattccacgttgtggccgtggagacctgggctcgaatcccagcagccacattttttttctatttattcttttatcaaaaagaggcttggacttatagattagaattctactaagcccatggtttttgccatctaactaatgggccgacatttaataaacaaaatctaaccaaccaaaaaccaaccagttgcactgaaataagagttcaaaccaaccttgaaagtaaatttacaagagacatatatgggttgtttaaaaaccaaagtcagaaagagtttcatactaccttttattgtctaaaagagtttcatactacctaattacatatatttcaaaataaactagatgatgtcccaatgtcacatacacattcaaattgattttataaaaaaaattaatagatttaaataaattttatcttatgtacattatgttgaacacataataatcatatcgcgtctttacttttatccaaaaaattatatcgcgtatcatcatgctttaaatatgatattattaaaaataaaagattatattacctaattgaatataaatcgataaaatttataccatgtaaagtaatgaacaaaaattatataaaatgatatattgagaaaataaggatttatgtagtgaactttatgttgagctatatttttttgggggggggggggaatttgagctatatatttgaattggtattctatgtagtgaaatgataaattcttaccatttttgactggtatcctgcaaaataaaagattatggaactttcaaatttttatcaatattttactctgtttaattagtactttgaaaagtaacaaaatgtaaattgatttctgcatttttaatctcatagcttgtaatgttattaaaataacaagataaaatataagaaaaaaaaattataaaacttgtacactccaataacatataaaatattttaaataagtcaaaatttaatcgatttgttgttacgcgttgcaactttattacatattttagaaaatttgtcacgtgtcggactctaaatagactctttcaactatataataaaatactttgcctaactaaatatgagcgatgatgttatcttctatccatctatagacatgaacgttgtcgtttgcatcccaattatgtagagtggctttgtaataataaactaagaagagtttgagatggagagatttacgcaatgttctctattctttgtaacatgatctctctcttttaaagttagtagagaaagaattaacacagacttaactcttttctctttttttcgaaaaaaaaaaaattaacaccagaaaagaaaataatttggagtatgtatttctatatggcatatatactacatattgctaagttttattagtttggaaaaaaaagatccaacattattaattaacaaaaatatgataaataacaattaaagaaaatgtaactacaaaagcttgtaatcataaatcatccacgtagatacgtcatatgtaagcgttaagcaaactttttttttttttggtaaaaagttaaattttataccattttaagatttttgacagaagttacagaaaatacaagaacggattaaagcacactacagaaaattaaaaacaacattactactcaaaaaacttcggattgcagctgagtaattatgactaagttgcgaagggaaacaccgatttcaagtccgcgaaacttggaaatttgcgtgattgccacaataccgaagtattggaatcctcatcgttgttgccacgagctcaactatctgagatccgtccacaaacctcgagataggtgcctacagattctcaaagaactaacgcaaaaacgtaaagacaaccgcggacttctacactaactcgttgagttagtgatgccacttagacctatccgccgcctctattcaaccctcggtgaacatagccataacacccaaaggctcaccttcaccaaatgaaccaacaccgacaacaccatgaacaacaaaactccacctgaaagcaaaccagagatgaagcaaaagggacgaaacccaatggacacagagaatccatacccatggccgaagaggctaccaccctcaactgcccaccaatggaggagagacgtcgaccaccaaacaaaacccacaacgccactaaccaccacgaacaatccacaagagccaaacgactccttggattgcctccacaagagaagcccgtcggatcaatcacaccatcaccagagctggagaaaaaacaggtagagagacccgagaagagaagatctgccacaccgaaaactcaccgttgtgcccaaatcaaagaagaacgacgatgtctgaagaaacatggcgatgcaccaccaatttatcagatctggaagatggtcccgtcgataggagccgcacaaccgctacagtcgtctcatcaaagccactgccttaaacggagagagacacgccgcacgtcctttgctccgtgcgtgaccactcgccgcataccaccaacaagagacgaagagcaagccagatttgaacaccaccggagcttcaaaggagaggcagaggagataagagagaggaaaggagaagagggagaagccctctccggccaccggtgagaagcaccgtgaccggagaggcacagatctagatttggttttggtttactgtagcgtcgttctcgcttaatcaatcgccgcgcgtgatcttctttaaatacttgagtgtatatatgttccgcgttaagcaaacttctcactctgtttatcagatgtcatccatagaaattgtctaacaaattggatgatgtaatcatcatcatcatcatcatcatgaatcgtgataactacgagaatatactaattgtcggatcagcaattatctatattgaacccattaaaagattataaatgtctgtatacaaagaagtcgaagacgataaatcatatatatatattctgtacacataggtatttgctataacgttagaaggattataaaattctatatttgaaacacttgattgactttctagagcacacacaaaactactgttaaaacaaagaaaacaaaaataagaatgcaaactttcttaatacgataaacaggagcaaatgtttttatttgttaaacttgatttagttcacgttcttagataaatgtgttagaatttgagaagttttatttctgttttgtacttgtcttcttaaaattagatatagggttcaaaaaaaaaacttgcatgtttattctatcatttagtttatacacatacattttaaactataaattaggattctaatatgacaacaacacttttaaaacaaaccactaagtttcaaccacaatttggaactaataattaaaaaaataattaagaaagttgatagagaaatatcaatggcaaaaaaaagagaaactacaacactccctaaaacccaaaacattaaatttcaatatatcatgtatatgattacaaatttaacaaatttcataaaaaaaacaaagaaatatgtaaccagtagtttaaacaataatggtggtaatagtcaattggttaaacctatttaactccacattttctactggagtttgactttattaaatcacgttatttggataatagttagggattatctatagatcagatcttattaatgaaaatatgtcaaacaaaaataataataaatttgttatctaaataaaacttttaatatactttaccacgttataaacacttaaaataaaataacaattaacagcaatttacatgtagatttctgcattagttttttcatttttttctagtttgttcaaaacctcaaatatcaagattgactcagacccgaacaaaaggtccgtagaacctaaacaaatttctaaaactagccaaccaatgaagtgcatctactttttttttatgaaaaataattatattgaagtattttatttatctgataaataaataatgatatatagtttatcggtgagcagataaggatcgtgtattttcaagtattatattaattaataaattatcgcccatcttctattgttttgtattttcatttgaaaagaaagcagggctggcttatcaatatatacagtctctttcttttagtttactaaaatcatttcagataagacccacacaaaagtaatatcaaatggaattttgctttcaacatggataattttctttaataataaaattgtcaaccatgttaagcgtaatctctaaatccccaaaattaaaaacactaaaaatagtcggtcattgctccacgtttaacctgtccaattccaaaagaacttcgtgtttcattgacgatatagtttacgtacgtatgattctttctaaatgaggtatttttgtcccattagcaatttaaaatttaaaatggttgtgtaactttttgaaatgcttagtagttaaaaccgaactaagaagaaataatgatcggaacgtgtttatgtcagctaatgcattacccactgacattaactgatccagtttactgattttagacaatcatactctatttttactggagttgcagaaaaagggacttacaaaacgatgaattaaatttggacaagtatatatacataattagaaggttatagaatctagttttcgtaggatatttcttgaattatcctacgagtgtgacaactaaatgcacaacaaaacaacaatttaaatgctaaaaagcaaaaatagtaattactggtcacctattaaggaacaacaccaacacctatttagctgttatgtcctaataaaaataaaataaaataaaaacaataaaccaaaaaagtaaaaaataaaaatgtttgactaaaattctctttcttttccgattcgtcattcgatgaatcttcctttcttatacaatttggataatcttttctaatgtaaaaattcgagatttttttttataatgttaaatctataaataagagcaacctaaaacgaacaacttctcccactttccttattttcgatcttatccttatcttcttccttgttctatttctcttctaactaatctcttctcttctcttaaaatcaaacgtaatcataaataaagatcttcttgtttaatttctcttgatcctcgcaaaatcacagattcttgaaattcttttttcttgtcttgaaattcttgagttcttgagttatgaaaagacaatggacagagttatgaaatgataaatctcaaccaattccttgtttatcattctatatcagttgtgattcttcattggttttacgttatctcttgaacaaaaaaacatggcaaacgcagagaagacaagttcaggttccgacatagatgagaagaaaagaaaacgcaagttatcaaaccgcgaatctgcaaggaggtcgcgtttgaagaaacagaagttaatggaagacacgattcatgagatctccagtcttgaacgacgaatcaaagagaacagtgagagatgtcgagctgtaaaacagaggcttgactcggtcgaaacggagaacgcgggtcttagatcggagaagatttggctctcgagttacgttagcgatttagagaatatgattgctacgacgagtttaacgctgacgcagagtggtggtggcgattgtgtcgacgatcagaacgcaaacgcgggaatagcggttggagattgtagacgtacaccgtggaaattgagttgtggttctctacaaccaatggcgtcctttaagacatgagatttgtgtattagtgtgtgttttactttggtcattttatagtttttgtaatctttttatatcgaattgtttcttctcattactttctgaattctgatacaattgcatatcttattgttttcaacattttcatttaacgttatatgattttcggtggttaacccgaaagaaaaaaaaaaagtttttttggtaccttgcatgtaaatggcagaactgatgaagtaatcaaaattgaagcaaaaagtggggaagtagtatatgttctggtcataattgagtattaccgataaaaattgctttggtaacacgataacaattttttgtgtcaaatttttcaattttatgaataattcaaaataatatagggcttgaatggtatgtgtcttatttgcatgttcatgtgtttcaaaacgtgattttgccgagtgtataccattcacaataataaccacggagtgataaaccgtgaaaattaataagctattttccaatctatttcgcatgtgttaaatgtataactaactagtttagacaaagtcatttattaagtagctttttggcgtgttaagtttattccgttttgaattttgtcgtcctggtgattccgctattgtattgttcagttattcaactaatgtaccagtcaagtctttaccccttagtttagagttttctcgttttgatgggtttgattggtatgtgagatggatagctgaacaatagaataactaaataatggttagctgaatgaaatgaactaaagaaagtttatgtagaatgattataaattgctaaaaaaaactagttattgtagattaatcacgtttcttagttataatttttaatacgctagtgctatataatggaatcatttttttaaacatgaaaacgttaaaacttgataaaattttgaaaggtaaaaatagcggaatcacgttttaaaaacgtgaccacgtgaactggtatacggtaaaccattcaagcccatagattaatgaaaatgtgataattataagatttttctatctttttcaacatggagtattctaaacgcgtaggagtttaattgattttaagtgatttatttgtctataaatgttatatatatattcgatgtatagaacaatagatgaactatcataaaccataaaattcaatgatttcaaatatgatcgaggtgattttttagctctagtgatatgtctatcaatttcaagaaaaatcgcctccttaaactgaaacaattcgtagagcatatccgttctttgtaggagtatgaaatatgcaaccacaagtccacagcaatggtcaggaatgaaatatgcgaccacaagtccacagcaatggtcaggaaacctcacaacggcataagtttatcttcccgataattcttttcgctcagaaaatagaccatatgacaagtcacaaaacaaaaagtccgtaagacatagtcttagtatgataacgttctagatcaagcaagagaaagtgacataagtatgcatatattcgtgtagagctcatctatatatgcacaataaatctttatcactttacttcaatatatacgaacataagttttattgcacaattgattaaccactttcacttccataagaaagtataagccaaaaaaagagtcctcctctctttctatcattctctccaagtattcattagtcatgtttctttacatttatttatgtttgtgattaggaagaaattataacacgttctaacttttaaaatacttcaaaaacacattaaacaatgttttgatgaatgcgtgattcacaatcttcaaaaaatattgctgaatcttgaagacaaaacagcctattcattaacaccaccagcaaggacgacatgttaacgaccaaaattgcaataaaataaaacaaaagatgttacaaaaacaaatttgtaataaaaaaaaactgttaggtgtttctctttgtcaatgtaagatagagaaatcaattttgggtagaaagaagttgtgaactaactacctaccaataagccacatgactgtgagaagcttttgtttccctcccatttctctatattaatggtgcttcctctctaaaccattcctctctctttctctctaccaccatttattctctccttaatcactgactcgactcgggtcgtgaccaggtctgttctcttctaacaattcgtaactttttttcttagatctgtcttgattccgattcgtgtttttgataccaaagtttcgatatttacgaggagggttgcgtaaaaatcggaactttttttctttctcaatcccagattcgttaatggagtaatgagatctgtttgttagtgattatcgaattagtgtaatgttgcctaatttcgaattcgacattgagataggaacaatttatagcttgtggatctgatcattgtctctcttttgtttgttgtgattctcagttttttctatctgagctatggcaacgggacagcttttttctcgtaccacacaagctttgttctacaactataagcagcttcctgttcaacgaatgctcgatttcgactttctctgtggtaacataacaatttacattgtctagttttcagttggtttggatcaagttttgatgttaaagatgatttgcttttacaggacgtgaaacgccttctgttgctggaatcataaatcctggttctgaaggttttcaaaagctctttttcgggcaggaggaaatcgctatccctgttcatgccgcgtaagttttgagaatgtcatgtgagttcttgagaggaactaactatgtgaaaattttgttttaacttgttttctgttatacagcattgaggcagcttgtgctgcgcatccaacagcggatgtattcatcaactttgcatcttttaggaggtttgttatgagaatttcatggaataaacttagcattgcctctttgtgatagttttgttgatgttttcattctttcttctgttttatagtgctgctgcttcatccatggctgctttgaagcagccgactattaaagttgtggcaattatagctgaaggtgttccagaatcagacactaagcagctgattgcgtatgctcgtgcaaacaataaggtgtgttttgtgtgatgattagcttcagttaaccgtatggtgaacttaatttgtgagactgattgaattggttcaggttgttattggaccggctactgttggaggtattcaagctggagcctttaagattggtgatactgcaggaacaattgataacattatccagtgcaagctatacagacctggatctgttggttttgtctccaaatctgtatgtgctgattttgcaaaatttcataatctgcctaaagctcactttgatgtctgagagttttattcgttactcttcttttcccgcagggtggaatgtctaatgaaatgtacaatactgttgcccgtgtgactgatgggatctacgaaggtgagttttaatgtaagataatctactaatgacgtattaagctgaagattgttaacactgttttatatttgggggattgttataggcattgctattggtggagacgtgttcccaggatcgactttatctgaccacatccttcggtttaacaacatcccacaggtatataccaatcttcaattgtttaacctgctgctcgctggaacgcgcctctggtggtggagttttgatgttacaaattgaacttatattcactctttcaattcattatgccttaattcaagagctatgttgcagataaaaatgatggttgtacttggagagcttggaggaagagatgaatactctcttgttgaagctttgaaagagggaaaagtcaataaacctgtggttgcttgggtcagtggaacttgtgcacgactcttcaagtctgaagtacagtttggtcatgcagtaagtggcgcggaagaactttcaaagcaatgccttttttttatctcttgtacaaatcaaaatagttcttgaacatgttatatatgaatagggtgccaaaagtggcggcgagatggagtctgcacaagccaagaatcaagctctcatagatgctggagctattgttcccacttcatttgaagctctagaatctgcaatcaaagagacttttgagaaactggttagttttcccgtgttattcgctagctggcattgacttctgttgcaatcttatgtgttcttttcaattactcttaaaaggttgaagaaggaaaggtctctcctatcaaggaagtcattcctccacaaatccctgaggatctcaattctgcaattaagagtgggaaagtccgggctcctactcacatcatctccaccatatctgatgacagaggtattgttatggacactaaaccatattctaaggagttgaaacacagagaaattggcaaatgagttacacagaacatagattcatatgcctctttaagcccattttctgacactaaactacaaaatttgtcttctcatattaatctgcaggggaggaaccatgctatgctggtgttccaatgtcttccatcatcgaacaaggctatggagtgggtgatgtcatttcccttctatggttcaaacgtagtctacctcgttactgtacaaaattcattgaggtatcagtttctctctttgcctttttaacctattctttctcactacatacatactgttacgtagtgaaatttgactctggtctgcaacttttgataattcttctgaattagatatgcataatgctgtgtgctgatcacggtccatgcgtctccggcgctcacaacaccattgtaacagcaagagcaggcaaagacctcgtctcaagtcttgtctcaggtcagtcaacattttttttcccccacaaaacacataagttctctttaccgtccaacaatctctaagaatgttaaaccataaaacaggtttattgaccattggtccccgatttggtggtgccattgatgacgctgctcgatacttcaaagacgcgtgtgacagggtaaaaggctatatcattttccccaatataaatttctgaatctgaattgtaattggtattaataacattggttgcttgtttcagaatctcacaccttatgaatttgttgagggaatgaagaaaaagggaatccgagtccccgggattggacacaggtagaaaacagaacattgtaccaaagaaacaggcaaatccacacagcttgtcttgtctgaaaactgttttcttctttatggtaggatcaagagcagagacaacagagacaaaagagtggagcttcttcagaaatttgctcggtccaacttcccatcagtgaagtacatggagtacgcagtgacagtggagacatacacgctctcaaaggcaaacaacctcgtactcaacgttgatggagccattggatctctcttcttggaccttctagctggaagtgggatgttcactaaacaagagattgacgagattgttcagatcggttatctcaacggtctgtttgttcttgctcgctccatcggtttgatcgggcacacgtttgatcagaagagattgaagcagccactgtatcgtcacccatgggaagatgtgttgtacaccaagtaaaactcatttcaatcctatttttgttattattccaattaattagccttttaaaattcttctgagagatgtttacttaaaaaatgcatatctatatgctcttcttctgtctcttttgttgtcatgtatgtttgttcacttcttcttcttttttcaattatttaaactttctttgtctctctttctctgttacatccaaatcaccattttttgggattctatgagtcatgctcatgcatgtctatatcttaatcgtgatttgtccttcgaaatgttggtgatctaccaagtacaactaccaaattgtagtccaaccatatcaaagcaaatatatatctatattaccaactcatagaatctataacctctcctctgtttatggatatagatgcgtcgacgacgttctttatttcatcattaaacaatatgtgatgttttgtattctgatttttcaagtgattaggtttttattttgcatgtccaaactctttttttgttaaattcatgtctaaacttatatgaataaaacaaaacttcccacctattccttcattaggttaagaattcggttaagtttctattttcagacacgtaatttgtttggtgccatacttctttttttaccaactactctaatatcttatatgaggaaaacatatatgtatatatatatatatatatggtcaaatatctatatagatatagatatatatttggtcagtaacttaaatatcttagatgagctagggatcttgttgtccactcgctacagaaattaattttgattaggatgggtgtcgaactgtcgaatcttctaagtatccgtgacttgatttttaaaagtttggttataaatgaatgtatacatgtagattttacaatgacattattgcgagttttaatacatgtaacaagaatggtcactggattatccatttcaaacttcttattttttgattacctccacaaaagaataatgatgagatggagaaaaacaagagagagggggaaagagttgacatttggagccaataagagcttggacgcacgcgatcacaagatttaattaaattattaagtgtattcttaattaagcaccttcatttcagtgatgacgacgttaatttgcatattatcaaagctatatcgatggagaactaatatttttcattacaaacaacgaaaaatttacatatatatcaaagctaaatcgttggggaactaatatcttcattagaaacaacgaaaaatttgcatactaaagctatatcgattgaaacatatatcttcaaggattattttcttgagaagatagaacatgtccatcttcaaaacaaaaccctgtattatcatgtacccgtttagattattttgttttcagtacccgttttgtcaaatatgtgtatataattcattttactttgtaactatattaatgtaggagacttggaattatttctgtaaaaaaaaattttagtaagagcatgcatgtatctactttatcttgaaagtcaaaattttctattataaaaaacttgtttattatcgtcaattcttcaaaatagcatacttctcaaaaacggaagtgataattggaaataactcaagagaaaaaaaaacgtaagtaatgaaataactcattggtgattcccgtctctgatttgatccagactttactctcttcctccacgttagctccaaaggtgatactggacttgttaaaattgattctttgccttgtagcattactgtaaatcttgaagatattcttaatcacagccacctcatttctatccgctttacacataaatagactgtcatctgcgaatagaaggtgatggatagctggtccatttggagagaacctgatactactgatgaggcattgacattcagcccgattcataaggtgagtgagatcttctgagcacaagacgaacagaaacggtgaaagaatatctaattgattagaagtgagaaggagaccgaagtgatcataaacatgatccattgcacccatttctgatggaatctcagcgcctctagcaaagctttaacataattccactccactttgtcaaaagcttttgacatgtctgatttgatggctatgaactcttttgacacagttcgatgagtatgcaacccgtgaacaacctcatgagctatgagaatgttatctgaaatcaacctatcagtcacaaaggcggattgattaggagaaaccagatcagagagaaagggttggagacgtctaaccataatcattgagatgatcttgtacagaactgaacacaaacttataggtctcaaatcagacatcttgacaggatttttcttttttggcagcaaacataactgagtgaagttccattctttaggaaaggtaccttgaagaaagaaactctgcacctccaaaataacttgagatcctatgatactccaatatttctggaagaaaaaaccagtaaaaccatcagctcccggagcactagagcttcttatcccaaaaactgcctctctcacttcattcttagagactgaagctgtaagcactgtattcattccatcagtgacccgagaaggataatctgcaaaaagatcctcaaagctgcgagggtccgaagatgtgaacagttctttaaaataagcttcagcaataatcccttttgtcgcctcatctttgtggagattgccattaacatcacatagctgattaatattctgcttccctctgttgtcttttacagaagcgtggaagaaagaggtattcttgtcaccactatgcatccactttgctctgcttttttgactccaaaaggtttcttcatcttgatttgctttacagagatcatttttgagagtccaaaccacctcagtactcgggaaagcagaggactgttccaccttaagcgcagctctagcctgagtaattcttgtcaaagagttggagttgttctcccttttccacctactcaaggctgaccgacaattcttcagtttctccagcactaaaggcctattctgactatgaatcccattccaagcttgagaaatgacttctttcacattcggttggttgaaaagtcttttatcaaacctgaaatttcccctatactcctccgtgatcttaaacagtctaacaagaactggccgatggtcagaacctctcttatccaaaaattcttgaaaagaagctggaaaagtcctgaaccaattcttgttaccaaaacaacggtctagacgactttgaatccacatgtcacttctcttaccaccccacgtaaagggattacctttacttgacagctccagcatttcacaactctccaacatatctttgaagggtaagaaagcagaatctccccttctaggaccacctctcttctctccattatgcagaatggcattgaagtcccctagcatacacaaaagtttttaaacaaaagttttcactaccttttctctctctaaaagctctcttttctctctaaaagtaaatctagatctcagtttgcgttggttggctccggtggcttccatagcgccggagctatgcctctcttgctctcctgtaaactttatggttcttttgtttggtttatgtgcgttttagtgtagtgatttaaggtggttcttagatggctcatgttgtttttgtgggttggtcgtctctgttgcttgtagcgcctcttgatccgatttggtttaaccttcttctcgtttagcctattaccaggtatggtggttgctttcgcttctgtccggttcgatctcctaccgtttatcttcttcggtgtggttcagattgatttggttctctccttgtctctactctaaagatcttatcgagatctcatatgttcattggctggtttcctttgaggcgctaaacaatcatattctttgattttgccgctccgggagtgtaggtgtgacttgtcgtctttggcctagttcttctcgccggtatggattccttggaactcttctatgtaaggtagtcttcatcgtaataggtggcaccgctgtccgtttggttgggagttccttatcccctacggagtggcttgatgtaaagctctgcctttcctttgtctggtaatgtggttgacgagatattgtgtttaaacattgggttgttttggttgcttctttgtttcagttttaaaattttttctttgtatgtaaggtttgttttgccttgtttgcttccctttcctttaggctttgtttccgagattatcttttaatcgtcggcttatatttctagggttagttgttaatcgccggctttgtaatttatcgaaatctctataataaattttcagacgataaaaaaaaaaaacaagaaaataaataaataaataacatgaacgacaaaaaaagtttcacatcgatgatgattttgtactgtagttttgtacggtcataatagaaacaaacaaagaagtccaaccaatgggagactttaaatttgagagcttgccaaaaaaagataactttttttttcttgagtaattaatggaaatgggttgcatgcaaaattaattgcgtggggtcttgtatttaaggatagctccttaaagtatatcactacactaaatcacatatgagatttctaatttattgagcgtaatatgtgtttggagttatttttaattcgattagagaattttgttagtctcctagtagtataaaatacattttttttaataaatagtttgttgaaatttttgtgtttgtttatcaccattttttacaatttatcttctttataaatattttaataatttattatactgaattatctaaaaattaaggcattattttgggtcaaaatataggctgcctaaatgactaaaataaagcaatttatatttccatcttatctgttttttaaaaatttatttataaagtcttcactttttcttttttaatggtctttcagaggaaaaaaaccaaaaaataaaaaattgcttataccaaacaagcagccaaacttaagtaatttgaaacaaaccatttatcacaccactaatccaaaacacttttgtttgaaattagaaaaaatctagattatttagttacataatctccccactataataaacaactttaatcgttattcatgaattaggaagaagaaaaagaaaaactctataagaagcaaaaaacagaaattgaaaaattaaagaaaaaagtaaggacaaactgagaaacctaaaaccagaaaaaaaggaatcaaaacaaagaaagataagcaaattagttttccttctttgttgactctctccagattctgtttcttcttccttaatccatctctcaagcttctccaccattttcaccttgattcagcttctccgattcaaactcagatttgatctccgttgatttgatttgactgcgtttttctggcaatggagaagacgactccaccagcggaggagcttctaaagaagatacgagagttagaagaaagccaagagcatctaaaacgagagatgtcgagacttaaagtatcggcggagatgaagcagcgttcgcattcagcatcgccgcaacgtcctgtgaggagaaacagtaacgacggaactccgatgtggagaaaaaccggtgcggcttcgtttcgtcacgcttctccgttgcgtaaggagagccatgcgaaagttgccggcggcggaggcgaggggcaatcggcaggcaagttcaccgataaacagtatttgaatattttgcagtctatggctcaagctgttcatgtcttcgatctaaatggccaaattatcttttggtgagtactagttagaacatttctgggattgtggattttgattcctatagtttcgttgtaatgtgtatgtctttgtagtagctgatatgtcccaactgatattcagattcaaaattccaggaactcaatggcggagaagctttatggattctcagcttcagaagcactggggaaggatccgattgatattcttgtagatgttcaggatgcttcggttgcacagaatatcactcggcgttgcagtagtggagagagttggactggtgagtttcctgtaaagaacaaagctggagagaggttttcagttgtgactacgatgtctccttcttatgatgatgatggttgtcttattgggatcatatgtatcacaaatgattcggcactctttcaagacccgagaggctctccggctaagacaaggagggggcaagaaggtgaaacgagctttagtcgggtgactagtagtgttgcatctaagcttggtcttgactcgaaagaggcggttgtatcaaaacttggccttgattctcagcagcctatacaagttgctatagcttcaaagatatcagatttggttagtctaattaggttgcatattctgatcttttcgtaaactgtcgtatgactagtgtagtcaacatttcaggcatctaaggtgggcaacaaggtcaagtcgaaaatgcgagcaggtgataataacgctgcaaaccttgagggtggaagtggggacagtcatcaatctgatcagggtttctttgatgctgctttcgctgaccggagggaggatgcagcaacaagtggtgctgatacacctaggggggattttatccaatctccttttggtgtattcttacgtagcgatgaga

SEQ ID NO: 863 - DNA, 77129 bp, Arabidopsis thaliana
aagcttctacaaagcccttcagagattccagtgatgaaagtgatggaaactctgttgtacctaaaacactgacctcaaaagctgaagagtggatggtaaagaaaggattatcatggccatggaaagggaatgaaagggaaggtttggaaggaaggcgtagtcattctgtgtggccttgggtgcggaatgaacaacaaaaacaacaggcttatcaaagcaattctaatcacagtgttaagtctgaaagccaggcatgtgaaagtattaaggcttccagtaacgagcctatggggtattggtcttcctctgttaatgtgaacagcacaagcagtagtagcagctgtggaagtaccagcagcagtgttatgaacaaggtcgatatggatagtgactgcttggattatgaaatcttatgggaagatttgacaattggagaacaaatcgggcaaggtgatgtactcctttgagaaagatgaaccattttgcgaaaaaatccatccttgaagatatcttacgtatttatgtggttttcttatctctgttctgctaagattttaagacagtttcccttttctgtacatacaggttcatgtggaactgtctatcacggtctatggtttggatccgtacgtttttgccttctattgatgttgtagaatatgcatcatcgatttttacaagcctcttactaagagttgctaatgtcactgcaggatgtggctgtaaaggtgttttccaaacaagaatattcagaagagatcataacatcttttagacaagaggtattatgttttctatcaattctctaagcatgtttggtaaaagaaaattgaatttttatttgttttttttagtgagtcacacctgccttcacatctctcttagtttctttcgttagaaaatttagtccctaaactaccacaatttcctcatatataatcttcttcggaactgcatctacccgaaaagtttatcctttatgaaaccagcttagctactcattctcattttgatgtacatcggctgaacttggttttttctgaaggtatcgttgatgaaaagacttagacatcctaacgttttactgtttatgggagccgtgacatcacctcagcgtctctgtatagtgacagagttccttccacggtttggtcttattactttggctaatattacacttccttttgtgctattcgaactccggggccaaaactctgacttaccctatcaaataacatttgcagtggaagtctcttccgtttgctgcagaggaacacgtcaaaactggattggaggcgacgtatccatatggcctcggatattgtgagtattagtcacacactagttttccagttgtgtgactgcagagtctgcagacccactgttttctaagtaaagttgttctatttggttttttacttgcagctatcttgcgtattattctttggactctttaattcagttactgtatcttgtctacaacatgttacacatttttcttacatacttcttcgcacaggctcgtggcatgaattatcttcaccattgtactccaccgatcattcaccgagatttgaagtcatcaaatctactggttgataaaaactggaccgtgaaggtattgttttcattttagaagtcatataatttcccttaagacagaaaaatacaaacttttcaccatgcctttggtaatctcaatagagctaaaagcaagatagttatattccgtagaaaatactgtccacaatggaactagattttaatatttaccataaaaaaggcttcgcttgtcatagttgacttaccgtgtcatctctaacaggttgctgactttggtctttcgcgtatcaagcatgagacgtacctcactacaaagacaggaaggggaacggtactagagatagactttaacgaattgattcctctatttttatgattttatttcttcctagggtgaaatcccattgcttttttacctgtgttgcagcctcaatggatggcaccggaagttctccgaaatgaggctgctgatgaaaagtatattccccattttctgcttgggttacctaactactgttctaccgttcatctctgaaaatgttcctcctactctttaaactacaggtctgacgtttacagctttggagtaatactatgggagctggtgactgagaagatcccgtgggaaagtctaaatgctatgcaggtataatttgcgtatttaggtaaatattgcagctaatagctatatggtcgctgttaaaatgcatctagtccaccaaccctatcaatatgctgtactcagtaaagggtattaggaaagcatactactcatttttgatatttagtaatatcaatatatgaatgtaaaacagtacaatgaatgatcttttactgtaaataaatacttcctgtgactgcaagtccagtgagttgatgattgtttttttgggggcaaattgaaagggtaaatttgtatgaattagagccgtcttgaacatcccttctgcttaagaaagtttgcatattatgttgtgaacacacaaagtgaaccaaatatgaagagaattctatttaggatacttgcaggtgattggagctgtagggttcatgaaccagagactggaagtcccgaaaaatgttgatcctcagtggatttctttaatggaaagctgctggcataggtatgtataacacacttaacattacatataccttgctagagaataattagcctcaattgtgttgcataaagtttgggaccaaaatctgatttttcataaacgacttagatcatatgccacagtctctgattttcggaagtagatgctaaatctgcaagtttgtgtcattttacttgtagaatgagtagataaaaactagttttgtagaaatgtcagcaaacaaaaacggttttttgtttgatcgtgtgtttattgtatcttttagcaaagaaagaaagtgaatgtgcttgtaactattacaatgcaaactttggaatagttgataatgtgtaaagagacctttaagtaaacaaaagtttgatgagtgtaagtttggtatcattttagatcttttacacaagaaattttggtatcatgattagtgtaagtttggtactttggtgtcattttggagattttctttcaaccgaaaccttggtaggaaattagaaagtgttatagaaaagatatttaaactctattaagtttaactaaacaaagtagctgataaacattcttaaactcttacacagctgtttgattaatgtgtttctgtagtagatgaagcagcagctaatgttagtaagataatttttgcagtgaaccgcaggacagaccatcgttccaagaaattatggagaaactaagagagcttcaaagaaagtacactatacagtttcaggcggctcgtgctgcatcaatagaaaactctgccctcaaggaaaaataaaccattaaatggaccgagcggagtctgattatgcgttgagaaagctgagctacataagcaaagcagaaaggtgtttcatgtttgcgttgaagcgcaatgacgagaagcaccaaaaagaagggttttggtatatgcaaacatattctctcgagccattcttttgtatggaattgattctgaaaacgtcatcgattgcgaggcgagctaaagaggttatttatgtaaaaccattatgcctgtgacagacccaattttttaagaatagtctgtacaggtgaaagtatgagatagaatcaagatttggaacactgattctgagtaaatattgccatttttattggaacatgccttgttaatgtttggagtcaggttattctattttctttcttaaaaactcagaaagtttgttcattataacctcaacatcccaagttatcaaatgccacaaaggtatgcgacttgacttaaaaaggtgttcatagctcttcattagcattatgcttcgtgatatgtatgtaaatccgataatgtcacatttacaaactaaagagttacttagtgttctgctgtggttcagattgaattctttcaaagttgacttttgtaacaggtggtgtgccttgggttttgcagaatgttgttctttttggcgctggagatgtgttcctctagtgggccgtgttgtctttggacttttgggcctatgtattgttgtttctattgaaaatcaagtctttaaaagaaaaaaaaaggctatgttgctcaaaaaaaaaagaaaaaggctattaaagagtaatccacataaattactccaaaactcgccaagcacaagtgttttgaggaaaaatagagaaatcaccacttacacaacaacacccaaaatttaaagaatccgcaagacatcttatgtaatgtcacgacaaggtcgggtcacgggtgccctttggatttttagtttttaatccgaggcgtcaacacatctaatgtattaatgtaacatcccctacgaaaaatatgatttataagtaatacccatatatattagtagacagtagtttaagttaagagaatgtgacaagcagtatcagccaaaaatctttgtaaaatattacaaaaatatctgatcgtatacgttactgatcctgacgatcagaaacgattttcttatgtttcttatcgacgacttgcctcttttgcatggtggctaatataatacttacctaacaattaacatttatatccgaaaatttggcttttttacaaatgtttgaccttacaagaaaacaaattatcgtacgtgtggtaaccgtagaccacactaatattggatacgtgaaataaaaaatgaagcaaattgcagttttgttctccatccacaaaatattattccaccatgaaaatgattcttgtgatgaaaacgaagataccttcctactaaaagactaaaattgttagaaaatgggtccatttaaaaatttgcggatcctattgctcgcaagatagacctttagttgatcctaacatgaaaagacaaaatcaactttctcaacgaatcagataccagtcactactttggtgatgtcatgcactacgtacgtacttccgactccaaatatcttaccacaaatttcacttccattaatgttatttattcgtaaccgaccctttttgtttttttttaatattaaaaactcgtattttcccccctcttaataaatgtgatatatttgtgatggagtcctctctaaaatagtactcactatttccttcctaaaagagagattttttaaaatataaatttcttgttctataagatttatttttcaatgttttgaattttatcaaataatactaattcatttcacaaaagtgccgttttaatacttaagttttgtgtcacaaaaaatatcattttgtattttcgatgcagtttttaaaactaaatctcttttctttttttcttttcatccctattactttaacttaataattaaaagataaagctttttagtgtatgtataaaggatataatagaaatttatatagttttcttaattaatgtaaaacatgtcaaaataacacttttgtacgctactaattatagttctaaatttcaaaaactatcaattaagaatctttgaatctgttgaattaatatagagaaataattagtttaagaaaatggtctatttatagcttaacattaaaaaatctgaggaacaaaaacagtataaattataataacaaccaaattttgaccaaaatgatgaaataaataacaacaaaaaaataataattgggagaaaaataagtaaagaagtaaccaatctttcaaagcaagctttagagataatatagtcaaacatttgacttttgagccacctctcatccctggccttatataaaccttacgctcccacacgtcttctctaaaatctcttaaagcttccttcacaatctcaaaagccatttttcaaatttcaaactcagagagagagagatgtgtccttctggtagaatcgcgattccgataaccaccaccgcgaatccaaatttccgaccagctttcgaaatcatcgacacagatcacgacggtaaaatcagcagcgacgatctccgtgcattctacgccggaatcccttccggtgaaaacaacgacgagacgatgatcggaacgatgatatcagtagcggacgcgaacaaagacggattcgttgagttcgatgaattcgagaaagttctagaaacgacgccgttttctagatctggtaacggaggagacgatggattgatgaaagatgtgtttaaggtgatggataaagacggagatgggagactgagttacggagatctgaagagttatatggattcggctggtttagctgtaaccgacgatgaaatcaaatctatgattcgattagccggtggtgatttaaacgacggcgtttcgttcgacggtctgcttaagatctttgggtgttgaaaaaaaaagttcgttttttttgacaccgcacattttccaactttattttgtttctcagttttgtttgtttgtttgcagaagtgtatttgtgtccacccagattttgttttatgttgttataaaaatgtgagaaaactaatgttggaacactattcatatattttgtgatttacagcaacggctctcaaaagtcttttgggcccaacccaccaacgaatgatacatatcttgtttgatgttgatactatgtttttaagcagagcaatcaaaaactagttgtacatctttcttcactatcattgaaaactatgtttttaataccaaacattgaaaacattctagagagtacaaatgcctcttcatcttctattctgaatccaaatatatcaaccccataaatcacttaactggcatttagcaccatgtatcttttcaatgcaaccactcttccaatgcctattcgaaggagagaactttcatgtttgtagtactttttttttttttttgattcgtaaaagtactttgagtaggtcttcctttgtttagtgttgtgatgaacatgtagaggaatcaaagtttttgatgaaaacggttctatcttatatgggcatatcccggaacattagtttgataaaacaaaagaaagtgaaaaggcaatgatactttctcattggttgtatagagagaaaggacagaaaaacacattaactgtgttctacttcctttgcttactctcacttttcacaattcaatctttagattttttctatctgaaccgtttggaccagatatggctacttcttagtaatggtctctttctctcacagttcacacgtctgccatggcttccagtgatgttcttcctcgattctaatagatttattggtatccgcattcatgcgtgaagggcaaggaaggatcgtgctatttgatcatctgactcgaccgaatatgttaacgcatgttgtgtttgtattttggtgttttgtgtttatcttttttgcttgaagatagaatcatttgatttatccaatatagaacatacactttcagctaagccatatattcatacataatttttgtcgatcgattaccaatattagttaatggggatgttgaaccaagctttttatccggtccaccaaagtcatgtccgtatgaattcctatctgccaaaagtccattatcactattggcgggttaattaagctcgtgaccagtgtcgaccctgaattttataagaccacatacatgaggaaaaaatgggccgctacatcaaattttgaataattttattattctgttggaaaacaaaagagatctcttaagccatactgaagtttcgaactcgaagatgatacatcttcacgaaactactagacaatcgtatattttgcaaaaagaccaaatttttgtgataagctctctctgtatagagctaggattttccgatcgccgttcaaacgaatctatatatccaataggtgttgatgaatttgggaaatacatacttcatgaacagcataaatgcataattcaatatttggttcatacaacctctattgtttaataatttctttgttgttcaaagtttcctccccaactgcaaaatcgcaaaagagaaccttagttatcttgtaacatccaaatacacagaatcttgaaaccaaaattgataaacagactttaagatgaatccaatttgacctaatccagatcgagatcgagactacaaaagcacaactgaaaattttgaagaacggtttgaaattagaagatgatcaaagtaacctttaagctcgaccaataaaaaataattaccaatcttttatctctcttcctggacacggatccatacgtagttgtcactaaatcttcgctgatcgggataaagaaacaaaccttcaactaagggtttgagaccaagaagatcttctgaagttgcaaatggattagccgcatggttattgtaaatcacattagtctcatcgcgattgagtcagtgagtattagatgcttgaaacgcgaggtttgtttcgtgcaccgccgaagaatttctaatgttcatacaaccccaaacgcaggcgccaccacataaatgtattacttatcccacatttgtatttaaatcccaaaaaattatatttgaagttactgtcttttctttgtctgttctaacctttcatcttgctagttatcattaaaaaactactataaacttttaacgctaaagatgtatcatggtgatattattagtttaattttggaataaattttggtgaaagttagaattagattgttaattttcacctcaactttatgttattttgacccctaattttgtctagatttgttgatattgcatctggacaacttttgctctatcggcaagattttgttgtgggatatgattcgtgaaacctcttgagtaaaatagtggaacttatagaggaaatgtatagataagaaaattgaattatagagtaataatattttttcttaaattttgtggaggactaaataaatcactctaatatattcaaccagttaaattagttgtatttattaacattaaatttaacaagttgatactgtaaaattagtttataatcttgtattgatcaaattgtctcacttgtatcttcctataatctcacagtaaaattttataattagtcaaattttgatactaatatttatgtaaaaaataattattatttttatatttcatttaatattttgataaaataataaatatgcaatgtccagcaatactaatttattgaggttttattgtgtgtcatggagttatttttttcatggatacatttcgaagaaatataactatgataagcattacttcaatttacacaactagtgagttttaaacagatttagggaatcagccaatatggttcaaaaaccttttttgtaaagatttacatacataataaagttcaatttgcaggaaaaaagcattacttgaagataataaaaattttagcgctctaatgaattcaaacgaccttctcttatacaaaaaaatcataaaactcatttaaaaaacatagagtcgagcttgtcttgtagcgcaaactacgcttgagaactatgtggtacctctttagtttttttttttaatcgtgatttgctaaatctattaaccaatccagtcatattgttaaaaactattgtggaagaaagagcaaaagagagtaggtgaaatcattgggccaaagagggatgctcgatcgggttctccttcaattccttagttgattcaaattttattttacaatccattaataaattaattcacatataccttaaccccaaccttgacaacaaaaaaatcttaaattaaaatttaaaagataaatcaacatttcgttgagctcatagtatgtgaacttttctagtcattatggtttgtcctaaaacagtatgtgaacttttctagtcttttcatatcgctgagagctaagtcatgtttcttattcttaaaacaatagtctctactctctcatagtaatgttggtcttgtcatagaggttttgatgtatagttacatgattatttggttgggcttaatttcattttataaccgttgcataaatatcattctactttttttctgtattggcggtaattccttcttgaatatattcctctaaaaaaaaatcaactcgtcattctcgaatatttttaatttatttatataagaaaataataaaggataaaaagaaggattctggtggatagttggaacttagcccatacaatattacgttgcatggtttactctatttagtagttacgtgaaccgtacgttagagattgaaatcaaattggtttggttcagaattgggttttgttggaacgatatcggtttgctgtggtacatagtcgaaactagtttaggtggatgatgaggtttcgatatttccttttttatttgagattcgatattaccttattcatatgagattcaatatttccttatttatatgagattcaatattttcttatttttatgagattcgttccttatttatacgagattgagagattatggctttcacttgtcaattatctttctccacgcaaaaacaaaaaccgtcgctgtggtgaaatagataaaatcagaatggtgaaaaaaggaggtacgaagaggaagattgcgattgagacgatacagaagagcgattaccttagggttacttgcaccaaacgtcgtgaaggtctctttagcaaagcttctcagctttgtcttctctccgatgcacagatcgctatcttagcgactcctcctacttctgaatccaacatctccttctactctttcggtcactcctccgttgatgccgttgtctcttctttcctctccgggcaacgttgtgttcctcttcaggaggataccaaagagatgagagaggacgttgctatttgcttgtctcgtacaaatctagggttagggttttggtggaacaacgagagcctcaacaaatcggagaatcctcaagagattagtgacgctatcaactctatgttaacgctcttgagtaatctcaaggaattgagtggggaggaagctttagttaacgatcacaaggacttgaagaagaatgagaggagcgatgttgttttacaacacggaactcaatatgaaaccctaaatcctaactccaacactactacaatttgttgcgtccctgatgaattacctgccaattccaacgagattgttggaatctcaccaaatcctttgattatgctagaaaagaagaaatcacaaattgaagaaaagtttgagaaggaatggcaagtttcagttactcgaattgaaaatgaagccacgagttcttatgcaaaacgaagaagaagtatatgacctggattaattgaattaggaaaaagagcattcttatgcaataaggacatttacaattatgctttagttaaattagtctttcctagaagaattatgttaagcattactttgttatatgctctcgtgtatatgctctctcacgagagcaagaagcaaaacttctatttatttcttttgaacacaatttggagttcttacaccaactgcagccgtagttttttttagtagaaactcatataattaaaaaaaaaaaaaaaaaaaaaaaaagaaaagaaagagatgagagagaatctctgaaatttctaactttagaatcgtttctataattcttatacgttagtatttttgttttttggatataaaagtaaaatattaatactttttggtttttagacactatataaatcctatacgttggaggtgctttagtttcttaccacaaatcccaacgtgatgtcgttttacaacatagaactcaagagtcaagatcagtggcggaccacgttggtcttgggtggggcatgtgccctacactgaattctataaatcctttctcagttaaaattcagtataagcagcatggctccaatagagtgcaccaagtttcattttccatatagtagtcgatcgttggctccaaccttaccaaacaaacaatgaaccaagaatatatatgttttaaacattggcacagagcgaactcatctatcttttgacatgaattctttgagagattcagatttttgaacttggagtgactacaaagagattgcaccatatatacttgtatagttgtatacaccacaacattagggaagtatccattagttagcacccatatatatacttgtatagttgtatacaccacatcatttttgccttaattaattactaacaattcagaaataccaaaaatatctaaggataactctcacattcatcgaattattttaaatgaaaaagtttcaagcttatgattttgtcaacaatatattgcggttcgatcatcgattatactaacacagaccatacttagtgtatattcgatatgcttataattagttgcaaacatgaaaattagattttatgtttatcatcaacataataccaaatttgaatttggacggtaaactactacgacaataataacccaaccaatagactataaagttacagattagttaaatacataaactcgattaactaacacggagaatcacatattttcatgtcctaaattttctctcaatcacacttcaccactacaataatatttcagtcctgtctaccaaaaaaataataatatttcagtcctcgctcaacactcattatctctagtagctatgtttatagttttggactggaagaaactactcgtctcggccaccgaacattcccatcaggtctttacctgaacccatctgcttcatgagactctgcagaccactcatgccgccaatctgctttagcatctgagccggtaggaccttactcaattgctgcgagttcttgttttttgagagtgcgctcatatttcctttctctaggttcttaagccctttcaccttcccccacatagttgttaaccttttgtactcttccaacatctccatcacttctcttacaatcctccctgaccctcttgctatccgcattatccttgactcgttaaacacctttggatttgagctgtccagttctgcacaaccaccaatcagttattgctcaaaactactattacttttacagagaaactttctccaaagaagatattgctctcaccttcattagtcatagagtccatcattgtcatgtatcgctttatcttcgcctggctttctttctcatgtccctctggcatcatttcagcacgcattccaggtagcatggagaaaacctacaaaccaacaccgtattttcatatttttgtcttatcagcatcacgttgtgctctttagcttactaatatttgaccagagattctgacctccttaagtgggcccatgttcagcatgttctggaactggtcgtacataattctcaatgtaaatttaccatgagagagcatttccagaagttcaggctgttgatctttaggtaccacctcttgtagtttattcacgaatccagacatatcaccatttcctattgtacatatacattatcaagattctgagtcaactcctcacaatcagtcaatgccatgatatttacctaagagacggctgacaaacggtttagcatcaaaaacttcaaactcatccatatgctctcctgttccaatgaatatgacaggactttttgtagctgcaacactaacaagatggaaaatagatgagatccacttgcccaattggaaaagcttgcatgattttcatatcaccatttcgagtacatgacaactcagcagctacaagatacttacgcgctaagagtcccaccacccttggcatgaccatccatcttagtaataattacagctcccacagcaacagtttgtttaaatgctcgagcttgttcaaacgcagtttgaccaatactgctatccataacaaatataacaagatctggtttctgtaaagtgaaaaggcagcaattagcgcctccaacataattaaggaacaagaacagaagactttaagataagagagtaaaaccgttgcttcagaaatttgacgcatttcttcaaagagagaagcttgttgtttatggcgaccactggtgtcaacaataataagatcacaattttctttcttgaacctatcaactccctcaacagcaattttcacaggatcggatcctgtgtaactgcaaagaatcacaaatcagtattagcacattctgctatcacagtatgccctggctaatggtttcaatccataagagttttttattttatatatatttcgtcatgttattgacattgaagtaaaaccaaattgacaaattgcaaaatagaaacagaagataacacaagacctcaaaatatccatttatgtatactgtacaaatctatgaaaaagacgtgagatcccttgttacagtggcactgtaaaatgaataccgaaaaaagagcgcaaagaaaaaactggcaaaagggatttaaaggtaactggagagggatatattcagtaaccgtagtggcgtagtcctcgagtgtaaaccaaacaatttcataaatggtgtaccatggctctaccgtcaaaaataaaattacatcacttttgtacgtgagctaatatatttggaaatgcaagcaccaaaggtcttccaagcacgcaggaagaaagctaataactaagatataagattttttaacactgcaaaaagggttgatgtcagtaccttccataataggggatcttagatttggtggcattctgtttcagctgatcaaaagcacctgccctgaaagtatccgcacacactagagctggtttgtacccttttcttctgatgataataagcatacttggtacaagttgtggtttttccagcacctaacacacagtcaaaaagttttggacgattttaacaatgaatttacaactacacaaaagcatagcatcttacagagagatcagatacctcaccttgtaatccgacgaacataactacactaggtttggcctttttgggagcaaatgcagactttcctggatccaacatcttacagagttcactgaagatcgcctgaaagagaatcataagaacttaatcacaaaaaaaaaaaaacgtaaacctatttaatcgaaattagacatgcagaatctgcggtaaagcctaagacctgctcaatgatacgacgcttgttatggccggctgctagatcctcaaggttgacgattttcttaatattggtctgcatctccttcacaagggggaaagaaacatcggactggagcagagcacgagtgatctcgttcaagcaatcattcagagccttttcatcgattattgtcacattgttcatcttctgtatggcgctcataatccgacctccaagctccgccaacaccattttcgctgctctctgtattcttctacctcaaattaggttgatctatatatctgttgtcggattttggaagatctagcgagacgggagaagctgagtatctttttttttttttgggggtcaaacattgagtatcttagattcatttctatattctaaaaaattataaaccggttaggatcaaaacgatgggcttaacatagctccataggcccaatagtaagttgttcccctactgaattgaattagaaccaaataagtgctaaaccaatggtacaattttcaaaaaaattcatcgtgaatacggaaccggcctaattaatttacaaaaccgcgtccgtcttcaatagtaatgggcctgcgaggcctttttatccccttcttaaaaaacgacggcgttacactactctaattccgactacggacgccgtgtcggagtcgtcagattcgaaaaacatacaaaaccaagtcgaagcttttaaaaccctaaatccccaaatcgggaactgagattccgattcgaagatgtcgtcgtcttctccgagtggaagcggtagtgatttgactgagagaagagggatccctgccgccaaattcatccaagatgtggagacttatctctctcagtctggtctcgatcctaactctgctctcgcctttcaccaagaaaggtttctcctctttctagttctcattttcactctgaaagtctactcatttatctgagtgtgttcttcttaagctcaaatcccagatctcctacggatttataatcaattgaatccaaaatcattacttgtgattaatcctttatggtttctctttctatggttttaggcttcagcaatataaagttgttgagatgaagcttcttgctcaacaaagggatcttcaggttcacttgtttctagtttatgtatgatgcttttaagttatctctacttgatgatatctcactagtgttggtaaatgtgtaggctaaaatcccagatattgaaaagtgtttagaggttgttgctactttggaagcaaagaagggtactggtgaggttcgtcgttgttcattttcattttgtttagctttgatgttatgatcagtgtcttgctactgtttttgagatggattgtgagtatatataaatgtagaaacattgttatttaaacttttgaatccagaatccagagtttttattccataatgttgaactttgttgtgctttgatttcttaccaatctttgaatgcaagcttttgtgttcatgtgaagatattttcttttctcttctgcgcgagtcagtcttacttgcaacatttccttagaatctcataagcctacttgcatttgaaagtctgtttttgaagatcgagattgattggttgaaaagacaatgtcgaaatcactaatcagagttcttatttattcctatggccccttaaattagtgttaagtggtgtttgatggtgacagcagaacatgttgagttcttgcttcactggaagaatcagtgaatcgctgacacagagattgtagtgggcacgatgttttgtctttcctatatgaaagtgtctttggtttttagacttactgttgattcttgtgttcttcatcattattttctcacatggaattcttcttacaatgcaggcgctcttagctgattttgaggtgtctgaaggaatatattcacgggcctgcattgaagacacagactcagtgtgtttgtggttgggagctaatgtcatgctggaatattcctgtgaagaggtccattaccctaaaaacatattctattcgctattttaaatctccgggaccatagaataagttcttataatctttgttgttccaacaggcttcagctcttctgaaaaacaatctggaaaatgctaaagccagcctggaggttcttgtagctgatttacagttcttgagggatcaagtcacagttactcaggtacagagatacttgtaaatttatctcatttcatttgagttagcccctaattcgtgagaagttacatataagtaggggcctgatcttactttaacataactgttaattatcaaaaacccaaaattgcaatttaggcaacctgtattgtagatacatacaaagattgagtaaagagtagtctctgactaggactttttggtgatcgacaggtaactattgcacgtgtttataactgggatgttcatcaaaggagggttaaacaagttacccctactgctattgctgttgcagattcatgaactagagatccaaattataatcgtgtgggcttaaacgaggtaatatgattatttggacaccttttgcctcaatcaggttgtttgtaactcttaatctttgctatctttatgaaatttgtgttgctgcgacaaacctatgaatagaacattagcattgttatcatcgcttgccttccgtttttcgctacatacctgtggagttttgagatcagcttgtgttccccgctattgaagtattacttttgtaagggatgttagagatatatcaaactatttgcagaatctggtggtcttgactaatgtcccaacttccaagtgttcagaagatatgattctagaagtaaaaggatgagaaattactaaaagtcaagttgtgtcattttctccgaaatttttatgttcaatattggtgacggcttatacttttggttagcaaaaagtggaaatgggaaacaaaacgtgatcaaatcgaacctttttatcagcttttctcatttgtgcatatgcatttaaaggaatgagattcattttctgaatataacatcttttcttgtcactgatacgacgttttatagtaaatcttttgggaggatttaaccaaccattattaaaacaaactcttatttgatgatttggtcatgatctttgccatattcaaatactttgggtataggttattttaggcatcaatttgggtatcatgttctgtgtaattccctttaacaagttgagagtattatttatgatcgttttgataaagaatattagtacgagagagcaaacaaaaatagggcattcatcaacggattctgcttccactgccatagaaaatgaacctctcaattaatgatggtccatatttcacttattgactttcacttcttcttcttttttgacaactttttatttgtttatcaattttatttccttatttttcctccaaacatttccttcatatttggcctcttttaaaccactctttgcaccaatattttttaaaccactctttacaccattattttgaaattatctaatatctatgacactaacttgatacattgtacatctaatttccggaaaaacacttcttcatgattatatacgatctcgacattgatgtatattagtggttggttacaataaaatagtttgggaatacatggaccatgaagatttaggtgatagtatatatgttgataatgacatgtaaatgcatttatagctctcccacaaaagaccattttttgggtctaacaactttgatgtatatacggacatgaaatttcaacccctcattacaattcaaagaattcgtaaattttggggtgttttccctattttattcaacgttggatgcattagacgtagttatgatttgaattgactcaagttgactttcttatagacttatacatacgatactttcataaatgtttacaatcaaatatgtagctattacataagatcgagatgataacatcattcgtaattgttaagagtcaaatatatcaaacattattcgatcgcataaagcattgattatgttaatcttgtcaatgactcacttcactatagtaaaattagtagataaaccaaacctattcaatccgtacaatcaagatagagatctaacaatgctatgaagaaaatcggttatttgatttggaataacgatatattccgtatgtttcataataaacatagaaagataaaaatggcgcagaatattttaaaaatttgtattattagaatttggaaatagagattgtagataaatatcgtaatctcaaaatagtagtgtgagagaagagagaagcgtacacggaaaaagagggggattttggagaagcaaagctgtctgtcccctctcagacttattaaagtggttttgtctctttgtgcccaaaataacgcgttttagggttttgcgttacaaatattattattcccattttaatcaaatcaaccatactcatctgttgactttgaccttttcttttcttcttgtaatcttcttgggacaaattaaaactattaaattgaaattttggtttctaaaaagtataaaaaactttgcgagccgcaatcatcggtagatgttctcacttgacaattgtttttataagaaaaattgattttctaagtcaacaggttgttttcccgccctcctgcattttactcagaacgaatcttgacctttattcttcattttttgtttaatctgcaaatcacaatagtcgataagagatctacattgtattattattattattattatctatataaccaatgacactactagtatatcatttagaactagctgatatctaccaaattcatatacaaatatcacactttgtctagaccatttgtatatgtggtttgatttaagttagtattcagtttcttttaagatagatgactagatctgaccactaccaatacatgttcgaaaatttgagtagtctcgaaaatctctatgtttggtttgctccgatgccagtttcatgtaatcaatcatgtatatatatgatatatccttacaaatttttaaaacacctgctttagaacatatattcatcggaattcatagtcaacgaatacagtttacatgaggaccttataattatacaaatacacacatggctcacttggcttggaccgacgatagctaactcttttgtcctttattcctttcaacatgacaagtgacatgacaatctttttcaaaactttataaattttagctttataaattaatttaaaagcatttgggttttgaattgcattggtcaaaggatattatatcgatatagataagtcagcagctcattatatatagtgagtgattggttcgatttgtagtgctattgctagattatgataaatagattttaccgtagattttttttttgtaggtgtatttgttgtaattagaggtttctgactataactaaaattaaaattaaaatattagttcaatgttgtgtattaagctttcattatacaaatttctacaatccttaccatgcatcccacatacctatgctgatgttggaacatgaatatactttaccaattgacctaaaaggttctagtctatttaaactcccattgggggaggcagttcaaccacatttgtgggattggaataaccctaaaatattagggtgggacattatgccaccaccttctcctgattttattttttactatcatgctctaagagattgtaattgtaaaagtttactctctatggatctaaaaattttgttttttggaatgctgaaatttttgtattaagaattaaattgtgagaaaaatacctacatgtgataacttgcaatcgaaatctgaaattatttaggataactcgagtgtaaaagcttggttgaataactgatggtcaacacctttgacttttgaccacttcttctcacccataatgagatatatacattttcttagatctggtctcgtgaactttagcagttagctatctatgatcctgtggtcaatcataccctttgtctttattttatcagctttgaaagcactacttttattcgcagtataatataaaaacactacaaatcaaacttaattaacaaaccccgatctcattcatctcccatgtgcacacacacatgtatacgacatacatgctacatatctagcatatatataaaatgcatagttttggaatgtaagattaaagtcagtataggaactaaaatagtatgtttttatatgacataatgaagtatcagacccttttcagtctaactaatcgcactacacttgcatatgtttgtgtgtgtgaacgataattaattatatgtaagtagtgaagatacaatacctttctattatattttttagtatatttcttttcgagaaaaggaaagaataaccaatactatagataataataataatatatatatgtaggaatcggagtcgttgcatacacagatgttgatatgtgcgtataaaatataaatattatacagaaggaccgagtgatttattgtggtaacaagtattgtattagcaatttggcgatttcgaatttttaaagtaaaacgtaagaaaagggagtgtgtggacgtacgtccttagtttgcggctactaaactttttacgagtggaccatgtcaaaccagttcttatattaatgagatttggtttccattaattaatttcattcattaattcattggtgtatattatcacctcaagacggcacattacatatcttttcgtacaaaagaacagtgcacgcgtctacacacacaacctcacacgtcacgtacgtttggtacgtatgaaacactgaaatgtacttttgagacccatggtatgtattagcaattgtgaggttttgtacttatgcgtgaaacagagaaacatacattttgaaatggatcgatgggaagtattagcaattgtgaggtttggtacgtatgtttgaaacactgaaatgtacatattgaattagatcagtagtaagcatcaacaacatagcattttttaatgtcactggtgtttcggtcaaacccgactaattcgaggttaataacccataaatattttggcaagagttctcataaaccagtcgcatctaatgtatccataccaaaaaagagtctaaatggccacactacaacgagtcaacgattttttttttcaactttgaagtggaaacgtacccataacttatacaaatttacaccttgaaaccaagatcttcaaccaccctgctacctcgtgatggtttataactttttacaaatgatcatagtattaattagaaaagtagcattttattatcttttgggttaaaaactaacgtagcatttgatttgatcacgcgtttttcccattttcacttcattttatctactaattaattaatcattcataataatggtccaatatcattcatcaacctgtgaagttaaaaacaaaacaaaacaaagtaacgtgcttagtcaaaacataaaaggtgaatggcttgagtaggaagcaaccgacatgagggtaaggaaaataaaacagctaataacgcgttataaccacacgtgcttatgacaaccttctcttttgtgatattttggccgtttgatcaaccacatgtcatataaacagctgcttgatatacgatttttacagtgttagcttttggatcgggccgggtcggatgggtccatgaccttgacactccattctcatcagacgcaaaaggttatatatgttctgagaaaagcgtgtaatccccacctcgcaacaaaagttttcaggatattgtaacgaagtaaataaaactcaaaaatggtaagatacaaagctgtaaatcttttataccactttactcttgtcactagcttaccaatttatcgattggtatttggtgataatattaagtttagaacggtacatttaaccacaacgacaagaagttattaatctgactttgcttgttacgtaattgtgcatttcattttcatattgttttgatttattttgctttgctgattaaaataaaaaaaattatgacaacattttaaaatcatcattgattttgtttcactgcatttattatataccatttcacatacatatgaccatttgttcaactataagtatagggatggacattcagttatttgggtttccggtttcggttttttggtttatagaaaatagatccaattcggcttaatattataattcggttagtgcatatggaaacaaagttatattttggttatgtttttgacaaacaaatcataaatagcttactataactgattgtagttatagattgtagtcttgtagattattaataatataagctctttaatgaattttggctagtttggttgttttatatagttcgagcttggttcgattcaaaattgggttattcggtatagaatattttttcttccatttaaatcaaacataatttggatcgggttagagtagacttttggttcggattcgagaagtttggttcggcttgaaaatttgacctagctctaactataactatttgaatcgttttaaccaattcctaatttgccatagtatgtcgagtttttggtttgtaattttttttaaaaatgattccaaaaaaaaaatgaatagtcggattaatattataaattaacaaaataaatagaaatgatggtggaggcgtggaacaataaatagttaacgagatttgatgaccgatgacttgtcggagaagaagcaaactctctgctgacgtatgctttgtgtcagcttattttcgaagcttctttcttacgcgttattccttatttttaattgttttttcatttactttcctaaatttactgtttctcaatctattcaatttattagcttaaatttccactaattttgtctctttctgttggttttatctttccctcagagcacattttccatcttatactctctatctacatgaaagtatgtgctcacgctgtttccataaaggaatattaattttgtacagtataaaatccgttaaaagtttcacactaatgaatactactatcttctctcacattggaaaatgcgctaaaatataaaaggagttaataactgcgtgtttatcactagtgagtttgtaatagttattgtggtgattaatctaattatagttggtccttgatttaatcttaattaagaaaagagaaattaagtattgcaagtgtaatatgaaaagaatcggcgacaagacgttcaagtcaaaatagaattaggctaaataagtataaaattttacgtcaggagaggatcacgaaaaaaaatctttccccttaaaaaaacaattacaattgtattggaaaagacaagttgtcgttaaaagttaaaaatcaaacaaagccgcgaggagtttaaaattgaaaacgaaaaataaaacaaaaaagagtactgtaataatcagatgcgtcagacccacaccttttggtttcgtacgtgtcttcccttacgcgcctatcctcgtatcccttggtctcttaccgttttaaccggttatttctttgtactaatacgcgtaaaaaacaagagtcttgctaaaagatcatttgagttcatcaaattctgttacgttatttgaattgatacgaaaactatttaagaaattatgttctaaaattctaaataacctgtttatactatactttccataacatacaaaaatttgctcaaatactaagaaattctctcttagtaactatgtccagccatacttaggctatgaatgataaccaaaactgcatctaaaaccgtaccgcaacagtgctgtaacagtatcaaaatctctacatatacatatgtatttatgtattttcattactatttgaaccgcaccgcacttctcccgtaccgcaaaacgcagtcaccattcggagccttaatatttaatcggctttcatgctcaaacgttatgacgtaaaattttaaaaattcacaaaatgagactgtttattagtctcctcaactatactttagtttggcctgatgtctacaaattgtaatctagttaatagtaagattttgtttgtttaaattttttttatttttttttgcatatatggttgtgagttaaatgcccatatgatatctatcaaaagtatcttttctaatttcgccccctttacaattatgaaatatacaaaacgtatatatttttctgattatgatgaaatagttgaactattcgaaagctcataaacggtaacccatccatatatagcttatatcacacactaatcattggaaatagttaattttgctcacgttcatagtaaaaatgaaatgtaacaaaaaaaaaatgaaatgtaacgaacccgaattatatttggacaagaaaaagtcaagttagtattcaagaattagagaccaaattgtaacaaatgccgtttggagacacgacacaatgtgggaataaagaagaaaaaaaactgcaatgaagtgaagggacaaaaattaaatgctcggcagaggacggcaccgtcttgatccattcacaaccgtacgccacacacccctcaccggcgtttaccggtgaccagtgttttctttctttctattatattttaattccatttttattttatattcttttgcccgcgtaaatgagacgaaataataaataattattataaaaaaaaacaaatgggaaacctcctaaatccaagctgttttccagaagaacccaaaactccacaaaagttatattcacacctctctcttatctcaaaaatcttataaaccattacaaaataaaaaacatataatcacccagaaagctaaagaaaagttttccttttttcccctcacgaaatctcagagaagatgatatatatctataaaagtatcatctcatagattccatcttttctctattacatggagaagaaaaaagaagaggatcatcatcatcaacaacaacaacaacaacaaaaggagatcaagaacacagagacaaagatcgagcaagaacaagaacaagaacaaaaacaagaaatctctcaagcatcatcatcatcaaacatggcgaatctagttacgtcatcagatcatcatccgttggagctagctggaaatctctcaagcatcttcgatacttcatctttaccttttccttattcttatttcgaagatcactcttctaataatcctaattctttcctagacttgctccgacaagatcatcagtttgcttcttcctctaattcctcttctttttcattcgatgcctttcctctccccaataacaacaacaacacctctttttttacggatttgcccttacctcaagctgagtcatcagaagtcgtgaacacaacaccgacttctccaaactcaacctcagtctcatcttcctccaacgaagctgcaaatgataacaacagtggtaaagaagttactgttaaagatcaagaagaaggagatcaacaacaagagcaaaagggtactaagccacagtaagttattcattaaccctctattttaatattatttggtgttggatttttattaattattgtgagttttctttttaaaggttgaaggcaaagaagaagaatcaaaagaaagctagagaagctaggtttgcgtttctgacgaagagcgatattgataatcttgacgacggttataggtggagaaaatacggccaaaaagctgtcaaaaacagtccttatcccaggtataaatacatataactctgtatatacatatatattgcagccctagctagatccatttagaccatcagaccatgctcactatatatgcatgtgtttacatatactttatatgtaaagatatttatatgcatatctactttatatgcacatgtaagtatatttcgctagatcgggtttatccaatttatggatcatccacttctacatattgtacatatgcatgttcattcagatattgatatacataacacaccatatctgtagtcatatataatttttttatatatttaggtgtgtgtagagtagccctagattcagtgttctctatatatgcagagtctaatatgcatataacatgaccctattcaatcatatatatgtacactatatgttaatatagacgactgtatatacctaatacgcgtttttgtagggtcaaaaaaacgtttgaatttttgttttcgagaatatcttttctttggttccattccatgaggtttctatgttttgtgttattcttcccttgatttatgttgcttgtgtcggaagatttctgtttcatcttgttccaaacttcatctcagatctcgagatcttctgtatctctgtatatcttccatgtttcaaactaaaatagattagaaatttgttgaaaatgtattagtacttaatttatttatttttcctgaaaatacagaagctattaccgttgcaccacagtgggttgcggagtgaagaagagagtggagagatcctccgatgatccttcgatcgtcatgacaacctacgaaggtcagcatacccatcctttccccatgacgccacgtggacacatcggaatgctcacgtcaccaatcctagaccacggtgcaaccaccgcgtcatcatcatcattctccatccctcagccacgttacttgctgactcaacatcaccagccctacaacatgtacaacaacaactctctaagtatgatcaatagaagatcatccgatggcactttcgtaaatccaggtccatcatcatcattccccggctttggttatgatatgtctcaagcttctacttcaacttcttcttccattagagatcatggattgcttcaagatattcttccttcgcagatcagatccgatactattaacactcaaaccaatgaagagaataagaaatgaagaagttttttttcccggggcaattgtttttttctttaggccggatccggtaggtaggtttcatgaggagtttttggtcggtttaggtaaaccgatgttgatggctttctaatgtttttttcttcattacatttagcatcggttttgtttcatcaccacgaaataagcaatcgacgctaagttggaacagaggtttatgtagcatatgtgatataggtataacttcattttttgtttgagtattaataaagatgtatcgttaactttttatgacttcggagagagaagagtttaatctagttatatagtatgtatttagttgtattatagtgtttctagaccatctaatttgtaatcatgctatcactagcccggctcagaatcttacatttattttattttcatatatccatcctaatcgatgtagatttacataacatacagtatacacaaagatacttcgaggtttgttgctattcaatcatctatatgcttaccattgctcacaacaaatatattattctacaatcatgtatattccttatagttacatatattaacttgatcagtttttgtattatagtcatcaagatgcaatgccatcacacaaaacaaaatcttatatgacctaatgtgatccttggctagattagatataagatatttgaaagtaaattaatactttattggacgttcatatatattctcaattttcataactacagtaatttcacatcatactattcataagtaaacatatataccataacgacatctacatataacttttaaaatgataacaaaaagcctaaataagaaaaaaaaatatttcatatctatgaatcagtcatataggtgctaaaaatgttagctttatattctcatctttatataaagattcataaagagagaacttttagtcttaaactcaaagtctcctttatagttttcttcactgcgacttttatgttagtcttcaatcatcacaaataaaattcaaaaagactttcaggattaatgagcacactgtttatatctacatgcgtacttgacccacccattacttagttgtagtcttgtagatatggtcatatggaccatatttaatttttgacattatcaacatatcctttctttagttctccttttttcaagtattttaattacaagataaaaataaaatgaattggactgttatggtatgtaactatgtataattatacttcgttaaacttcattttaatgtaactcatcctttgacattagttaacacacacacacaaacacactaaagatatatcataaagttgatgtatggaggtatatatgcgtgcatatatgctttaggtctttttcaggaagccgatagctacgcaagtcatgtatggctgatattaaatataaaagtaaatgaaaaaaggcatagagttagtaatgtccataatgggctgtcttttaatcactaaaaaaatagaaacagaaggagttctaacaggctactcatcaaccctattccatcaccaactaagtatcaaaacaaagcatgctttttgtattatggagagttattacttattactaatgtgttcctttaatcgcaccatccccgtaaagttacacacatatacaaagttacaaacagacacaacacacccttgtacacgtataagttagtccatttaaatggtgacagcaaaataagtaaaaacaaatacgttagttcgtttttttttttgttgttgtaaaattgagagttttatattgatcccttaaattatgacataaccacaataaggacatttgttcatgtcttagctacaaaccatcttccataaattcttgatcccttaggtcagaagaagactcaatgccataacttgagaaaaatatacatttgaactaataattgtagggttttatctcaaagggaaccagcatagacgcgcctcggttagaacctcattagatgtgtcattgccaagataagttttgttcaacacaaacctcttatatcaaaacaaaaccgatttacttgatgcattttccgttgtaggactgtataccaaaataataactttaacatattcaaaacttggcattccaaataagaacttagtcaattaccttataacttaaaacttagaaatggaaacatggaaaaaaaaaactaaaactattaatggtagtgaccgcgctaacgcatgacccctctgccacaaataataacgcatgctctcacagttgaggagaccttaaggattaagctaagcacccttcttttatgtgcaatgtaggccactcgtcttcttggtcgcaagtcgaccccgtccaggtaagtgattctcttcgacggtccacatcttctcttagtcgttgcttccttaatcattctttcaggtctaagtggacacatctcactcacatgttggtctcttaaagacgaaatgagttttgtgttctagacatgggccatacgttctctaagcccatttgaagtgcattttacatactatcaagtatctattgttcttaccttttttaaaaatgggtatctatagcagtccacctatactatacacgttcaactaggattaccctctacgttcacatcccgtcccgtcccactccagtccgctcacgttctgtatttaaatgggacatatatatgggatatgtttttttattcccaaaatttccgtccgcatcccattccgacaaattctcgtttgcccacccctaattgaatccataatccccaaattcctccaaatttttcgattttctcaaaattcaagagccctgcactttgaaaattcaaaaatttccacatttaaaatccaaaaaaagtaatcaacaaaagggggcgattataatgactaatagcaacctaatcgtcacacatgaagcacaatgcgactctaagtatgagcaaaatcaaaaataagcaagggtggttcaaaaatatttcaaatatgaagataatttcgagaacataccttggttgtttttgggagtagacgcagatgtaggagatggggcaggaattaatcagaagaagtaaaaatttcgagtctatagcataaaaaaaaattgtgtaaaaaaacataaaataaagagagtgtgtgagagagaagaaaacgagttttgaggtaaaagtagaagaggaaaatgttttctttttttaaactacaccaaagggaaaaagttgacttacctaggtgtcgcctacggtcacgtctatccctggccgaagaaggatggcttcggagtttccatgaccgaaggctatgacagaagaccctactttaaaaatcagaattgtttagctctaaactccaccatctttatgaacaaacatatgactcgatttcctcttgtttttgcttataacaaaacagatcacaactatggtatattttatcacccgtggaagattcgttatatacaaatgtaatctcttacaatggaataaaataattaactagtcacctcaacggaaatccttattacgagaacctctcaattgcgaataaaaataattgactcgtattcttaaaagaatgttagttatacttatacgtagttacgtgccatctacgtctcgtttaacgtattgatctgttacattttcttttaagctaacataccattttttttgctatctagttgcaacattcaatctgtatttgttttccaaatacatagatataatggattaattggaacttggttaggttacgtatataattagaatttagaaacatgaaaattagtgtataattaagtataagagcatctccaatgcccaactttatatttttctctattttagagaaaatatagatggttttgctccattgtatgactctaaaatagagttaactctaaaatagaggaaaagtgtaaagattgttcttttttgctttatatgaagaggaaacgtacatttttgttttggtcaactagtagatagtacttagatcatcattaagtactaaaaagaactttgaccaaaataatagtactaaaatagtctcataggaaaactgggaagaacctgctataagaaaagcaaattaatcttaagttatatatcactttgatctataaggaaatgtcattcattttctttagtttcttcatatttgaagacccaagaactcagtgaggatgctaaaaaagtctcgaatttaattgattattttctttacacacatttcagttggcaataaaattcggaaaattaaataatgaaaaaagggaattagagggtacaaccacaaaacaagaagaagcaacagaccgtagcagtgatagctaaagattcaatgattgagacaaaactccacaaaagatcatcaactatggagagatcacccgacaaggacaacaatctcatgttccaaccagagctcagggatgaaagattcacctccggccaccggaatgcccacgatgacgacaggtacgatggtagatccatcaacgtccatcgggaagctgacatcaccaatttttgctctcttcttcttcttcttcttcttctctgttttctagttttgggttcttttggttccgaaattattaggagaatctttgttttgttttgcaagaaaaataaaaacaaaagatgaaagtttgtttattacaaataatgatgtgagtcactgtttctgatgacaggtggttttgatttagaggtcattcttttaataattttctaatgtttaacgtatctagtcgacaaaatatcttaagttagtaggaccagattaaaattcccacaaaatgctgatatgtatgatccgttttggatatttggatatccaataacgttgaatataatgaagagtggaattacgtatttatcttgaacagaataaatgaaaaactataaatttattattttataagattcaaaataatttattcaaacattatataggaaatattaacgtaaataaaataaatttgttgatatcaagtaggtcttggactactgctacataaaatcttgccattttcttatgtcaccaacaattggtcatttggttgtactggtttttttttttttttttttttttttttttttttttttttttttatctcctttcgttttgggaggacgaaagttaaaaaacttaatgatatttttggtcccatatacatccgaacgtgtttcatgcttccattgggtcttcttgtcttcgtcccactataatttgctttagtggctgattatcattagtgatcgttgtgttttgtcggtactcctactattgctactactctatgtgtccaattcattagaggaacattttggaattagcattacagtgctcaaatattctttgtagaaaattgatcttagctaggttctttgagcataagtaattaccaacattttgaaggtagtgttcatttatccaatctagcacgacaaacggacaaacatataatccgctcttacttgtcacgtatcctccttatgatttcccataatctgttaggtaaaaatgatctctcgttttctttgaacggaaaaaaataatgagaatttgactgtttcaaagtcaaacatgtttgcatttgcatgcaagtactaataaaacaaattactgatctgaagtatcgaagaaatttcagtttttcacaatttgtttttacaaaatacacaaaaatgccaatagaaatgttttatttcgtttgtttttagcgtattttttaacaaaagtttttcttataacatggtatgattgtgagttcaattcatttgaaaaatatacataccaaatatagaaaagtaaacgcaaatgtgaacagaaagaactatgaattctagctggttaatgtctagtagctttgatttgagattggataatgacgtggttgtataacgtgagtcacgtgacctatatattcatgtgtggatgcgcctgcaaagagagtgaagcacgatgagtctctttctttatttatttatgattcttactcgatagagttattcatcaatattaactagtagaaactaaagagagagcgatgtgttccttttatgtttttttttggaatttgaataacattttgggacactaacaatatgtataggatttctgattccaagctactagctagagtgcaagggagtttattttcgacacctctcggtccaatgtcactcttcgatatatatcacaatcacgctcgtctctcggatcacttctagaaccatttcactcaaaatttggatgttcttttatgttccaaattgaaacccatccatttttttttactaaacttccggattagcaactatatttgttttcttcttttttcctctagttgatttccatgtgatttcttatatagttttatattttcattatatttatttctgagtttgtagattaggtacctcgtgatttataaattaaaaaatttatgaatattttctttaccaaatggaaggtggtctagctagtacccttaactgacaacaaaaaaaaaagaaagaaaaagctaatacccttaactgagtatgtaaaatcatacagtaattagttcaactccatttaaaaaggatgatttaagcactaaactaatatactatcaagtatcaacatatatatgattttggccttcgagaaacacattttatttaaagaatgtatacattcttggtgatgatcatgatcatgtgattgacaaaaaaaaaagcatgatcatgtgcctgttagagaagttttatcaagagaatttgttatgactacgtgttggatgtgtataaagccccccaaattaaaatttatgtttcaattcttaataaaattttgttagctatcgtattaatttttgattataaacttactatatacaattaaagatcttttctttatttaaacgttatgcgatgaaagatttataataatgacttttcaatattttaaatttattaattattagaatttatttgtgtctttactcaaatggttaagtacatttggaagagacgacaaaaaaggttagcattgcacatttgaaaatgatggaaagacgaactactacagcgggcggtgtgtcgagagatgaagaaggcaattggtatcaagggtttcctctaaactttgggatttgtttagctgccttagccgagttatggaacgtgtattatagtctttatatagcttgagagagatgagttacacggttgaatctggaagtggactccgtggtggttgtcggtttcctgaagacatggattagtgaaccttatccgctatcattccttgaaagtttgtagtatgacttcctatcacatgtatataaagagactaattgtataacagatagatgttcaagacactgcacgggttaagaatgttaggatattgttcttgtaagttttcttaataattgaggggatattcgtctccctttgtcctgccaaaaaaaaagtccatttaattttatatttttcatcgaagttcgactctactaaattgggaacattactgtacatagtataaaaattataacagttatggattgagacttgtcgatacgaatatgtcaaatgaaaaaaagaatctaatgtactttctaaaatcgttttgacccgaaaaaaaagaagtaattcgattaaatgttattgtttacattaaaaccctataaagtcttatctcagttcgataattcttgttcaaggggatctctcagatcgaaggttcgatactcaaagatttcgctttttcttttctttttgtttcactttcttcttcccagcccttcttcgccgacgttttcttttgcccggaggagccgactattactcaagattttgattctgactttcaggttctttctttctttctttcttctgcagttccgtttctatcagctcaagatttatcgattaagatttctcaaagtattgatttttttttagtgattagacaaattttcatcagtaactcatgaactttgttatgattagcggcttgggtttgttttgttgaattgtcaatgaagaaaaaccctaattttgcattgtcacaggaagtaaaaatatggactttgatgatgatgacaaaccaaaagaggttaccaaaacccgtagattcgctcctggccgtgccggaaagtctaaacccaaacctaaaccggaacccactgctgataaaccggtacagccgccgccgcagtcacaaactgagtccgtgagcaagactgagcatgacgttgatgctaaattcgttggcactaaggttgaaactgaggtttgtaatggctctgtgaagatggagatcgattcaaaagtcgataaagagcctgagatcatggaaactgagttgatggaggaagatcagcagcttccattgcaggaggagaaggaggaagaagaagaagaagacgacgttgttgttcgtgaaattgatgttttctttaagccgtctattgatgctaatactcaggtctattggattagattcttcaaacaatattttgattttgctaatcgttttttggagtattgactaatgtatgtttcttaaatgtgacagctttatgttttacaatatcctctaagaccatcttggcgtccatacgaaatggatgaacgttgcgaagaagtgagtgttcctctatgtgtattgcttattcatttgttttggttctaatctttttgtttgtttatgtgtctttaaggttagagtgaatccttctacatcgcaagtggaaattgatttgtctatggatgttcattcgaagaactatgactccaattttggactaaatatgactaagcaggtagtgttttagttccaagcttgatccaagtttaatctttttgatgcaacttcatttttcttgtttttggtagaccttgaaaacaacatggaagcagcctcctactttggattatgctgttggggttctttcaggtgataaggtattttttttcctcgttttcgaaagcttgataacattgttgtgtagtgtggactggatgtcttattgaattggacttgttgacttgcagttacacttgaatcctgttcatgctgttgcccagctccggccgtctatgcagtctctttcatccgacaaaaaaaagaaacaagaagaatccactgaagaatctgtgggaacatccaaaaagcaggtatagatccaacctttgctaaataattgaggtgtatagatcggcctgagcagttagtttggctatttacatgattctagttttgagtctatatttcctttgtggcagaacaagggagtgcagcaggcttcgacggatcagaaaccaattaatgaagaagtatgagatttggttttattttgtttttatgtgatcctttcttttatttggtttgttggtgggtattgcttggtaaacttatgttgctatctttgttctttctttagacttgggtttcactcaagtatcatggacttcaatccgaatattgctccagatatcttaacgggatgatggcgaatgggaactcttcgatagatttcaacatgagcccgtatgatgcctttctctaagttcgcatgagataattttggggtttcctgcttactttaaactttttttctttttcttaatatcctcttgtatttccttgaaggggcacttatatcaacgaactatgccgtgggggaagcagcagaaactctgaatcgaaagaaacattaaaaaggtacaaaatatcagggtcatctagttaacatttgtcatctaatcctcgaaaaggaattcactgtcgctttaccaatgtctggtctcatgtgtcatctagtcaacatttacaccctttcttacgttccttaatatcctcttgagttcagggtcttgctctccctaccacttaaagaacgtgtgcaaaagttgctctgcgaggttggtagctattgtaatcagcattatgtttctcaatttcctgttcttttctgtttttcaagataatgtttatatggttcctgctccttagttttgaataaaatataagccatttggctaactcgtttgatcataacagggatctccgttgattcgatacagtgttcttaaacactatgctcctgagttctcagacgaggatttcttaggggccctccaagaatatggcaggttagttcaaggtttatggactcctaaaactaggctactaaaactagacgggcctgtagaagctgccagggattatgtcctgtctctgttcagccagaatacaactataaagtactctgaagttgaagcaacgggtgacaagatgaaacctttgatggaaagaatgttgactgaatttgccaaagaaaggcatgtgctaaaagattggaagttcaaagagcccactgatgtctcattcataaaatcctacccggagattgttaaggagcaagatattttttggacggataagagagagaatctaaagtcgagaataaccgcccaaggaggaaaaagtagagctgataaaaggaggaatgttgttggcacaagttcttcagttacagttaaaccggaggttccaacaaccctctctgacaaaggaggaagttcaaaaaatacgatacatcgtgttgttacacaagaaatgccagaagaacttaagaaggcgttaccaaaggctttgaaaaaggtgtttcaaactcacaaagtttgccggtgagattcttgggaactatacttgcaattatctgaacttccgagttttcagatttatttttttgataacatgtgagtttgtttacgaaaaaggaaggagagttaattcataaaccattttgtgtgcagctatgagacgatctgccaaggacttagggatcttgcagtttcgacatcgaataatccaaaagctgattcaggaatggcggtgaatgtggcgctagccgtggatgcttaccagggcgagctcgaagacgttataaatggagtggctactaacattcacgggtcttatgtctccatatcgtctccagaccatcctgaatatgattctttgaggttattttttgttggaacatgatcacattggttctttatttcggttgaatctctaatttctctgatttttttttttgtttttatcatcagggaagtggtcattagcctcttaaccggatctccacctggaacaaagcttatgaaggctgaggtatttgcagcaggcaggaccaaacttgaacgtgaaatcaccaacaacgaatatataaaggtcttcacttgagctctctttgactttttttttgtgtttcgaccaaagcgtagttttagtctctaaactctgtgtgttgtgtgacaggtgatgcacgagatctgtgaaaccaactcttcaggatgggttttacagaaagctcgatgatgagtttattaaatcatcatgactagattttaatggtctataaattttgatatgagtaaacggttcagtagttatgagatattcatattttgtttttcctttttgaaatcaaacaaccttttttctattactcaactagagttggtaagacaagccacaccaacacaggaaaataaacataagaagcaacaaaagaactatacaatacacatagacggctaagttcaaacttgacagagagtgttctaatgttctctattgaaatcttaagcatattcgaatatattttacatgcaagaatgtaaaaaaaaaagaaaacaacaatgtgaacacatgaaattggaagaaagtgtaaatacttgaaacttttcaatctaaaggttttcacagtttgatgtgatctcaaataacaaaaaaaggtaatacgaactcataaactgttgttcaaaaagggaacaagagaaacattgtcaatctaattcagtttagatgaagaggctgcaaaacccgaactcaatcttgtgtgccgtttcaccatcctcatctggagcagaagttccctcagaatatgtgcaccaagtcatacgcaaatctactccattgttaaggaaacctactgagacaaacagagaatagagagagctgttttcgagttgcgcatatacttgattctacacgaagtaaacaaaaaggccatttctatgttaatcacaggttcttaagaagctaatcatttttacctacaccataccatagatgtttttccataaagctaatcaacctttgatttagttttgcacattatcataaaatgagtatgaccaccaaattgagtttaaggatacgtccagaacagcacaaacgactgcgaaaaagaaaacaacaccgcgattagtatgagattaacaggttggatcaacaacatgtatcttgaagcaacaaacaatgtaataagaaaaggaaatgaagatataccataaggccaccaagaaaaccgtcaaaaagaacccgattccacgaatcaaagtacaagtcagctgagaatcctgccttagccatgagcccaacagatgtgatcaacatcaccacaaagtaaaatacaaaaccaatcaagccattgaatccaattattcctgctaagacaccagctatgatagacagaaacgtccggctgcaaacacgaacaaaatgagggataacaagtcaaaaaacccgagaaccatcatctttttaagaaaacgaaagagagagaattgtattgaatcagacctgttttgaatgactttcaaattgttctgcaaattctctgcactgaaagttggtatgtcactcatgatatcctttgatctcttctcagatgaacccatttaagataacaacaatctgaaacaacataaatttcaaatctttgtattggattttacattacagtaacaaaaaaggaagaacttggacatcatagagtaagtgtatagattacaaacccaaaaaagtattgattttaagcaaatttccacaggaaaattaggggtttctaattgattcaatgattctataactgggtttcgctatctaagcatcacaataaatttcgattcctaaaggttaagactttatgattatctcttaagtagtcgagagtgggagcaactatgattaatcgatctggttttatcgatctcttccgatctactactttgagatctacacaaactttggaaaaggaattgatatagacttacaattagaaacgagagtagtaagaggaagatcgaagtagcttgctttggtacttgggatgaattgaatggagaggatgagccaatttgagagagaacaatcagacgaatatctttaagttctttagagtgtttttagacaaaagaaaaacacagagaaaacaagtaatatataaaccgtaaaatcgaaccggaaccaaaccttaaaccggattgtccactactaatcaaaattaacaacactctccaactatgctagttaaatttcttgatattgaaacggataacatgattatacatcacaatttgtgattatgaaaattcgttacttactactaaagatgagcagttcagtttgttccaagttttggttttataaaaccatcgctattacattcaaactgaaattaattcggtttggttttgtttgcttaggaggttttaatatgtttaacaaaacacttaaccaatgcattagtaagtacggtaaatggttatatatggagtagcggtaaaaaaaaaacttaggtgcttttcgtttggtttggttccagattgatttatgcaaatttcagttttggttaaacttaaaccgaatgtagacaaaatcattcgtcgtattcgtatctagcttcaatatcaactaaaaccaaaatagcattccagatctcgattccaacaatctcagtaatgataaaaattaattattgctacaatgcatcagtctgtaacaacagaatcattagagcgacgctgatgatgaggatgacgatactcagctcggattttagattctaggacagagacatatcgatctagaacagagatcacagcttcaaactccgacacttgtttctcgatagcatccatttgtcctacaaattcatccaagccaccactttttgatttcatctgttctgcgaaaactctgagcccagctgccacgtcacccatatcatcgtactctgacgcaactctcaggttcatcttctccaatagatctagatggttgttcgttccctatttttatccaattcaatttcagatctgtggaaacaaataaatctgtaaaatttcggattgattttcacctggagctcggatttgaccatagatgaaacactcgtgaatagattttgtagcgattcagctagatcatctcgtgaatccgccattgatgaggatatttacttcttttcgcaaagacaaagacaaagacaaataaacaatggctcttctgttgtttagggcactttccatatttgttgaattagtgatatttaggttaagctacacgtggaggcttattattcgttgatatcaactattgtccatgtctgtaagcctctccctacgacagaggttttcagagcagtaacaaacaacttacacatgagagttaacattgcacagtctgagattatactcgctagattcttttcaagtcttgaagaacaacatgtgcagcgtttcttccaggtgcacccataactccgcctccaggatgagctccgctgccacacaagtagagacctttcaaagggcttctgtaatttgacctgtttcacacagtccaacaaagttttgaatttcataatcataaatcgtaaagactgttttgagtacttcggagtcacgtaccatcctttcacagggcgcatcaggaagagagagtctaatcccatggcaccgtgaaagatgtttccgcctgcagaatacaaatgggcagtcatgtcaatatggtttggccatgtcgcatgtacttgggatctttctccaagtacttcactttatatacctgttagaccaatttcccgttccaggtccggaggagtcaacatgtcgtagctaatgatggatgagctaaacccgggtgcatattcatcaatcagtttgaaacacctttgtgcaaaggcttcctgatttttacacaagcaaaagcaaatccagatgggtttggcatgtcttgtagtgtaaaggaatgtttagccaagcgtgtataacaaactaactcggtaagtaggatcttcccagcttccatctgagggcttgtaaggagtgtactggatgaacaagttgattacatgcttccctacatacaaaatcacattcagagttcaaatcctaaacaagcaaaagggggagaatgtgtacctgggggagaaatggtgttgtctagtgtggatggaatagtcatttcgatcactggtcttctcgatggtaagccattttcagaatcatgacatgctgagtgaacctcgtccatgctgacagagagaagatagaacagagccattgatcacttttatttgtattattatttgttcttcgagatacatataatgaggaacaaattagcacgaatgatacctctctgcaccaatgtgtatagtgccaaaatgctctggacctggacctgaatgatttgtgttgcagcactggaactgtggtaacttgtcaacagccaagtttattttggtagttgcctgttcacaacaattaaacaacaaatcaccagataattagctagatggtgtaattaaaaaaaaaaccaattccgcctatagagaaatctatcttctcttgatccagagagtgagggacttaaacgacatggaatccttacagagctgtaatctgagttcttaatagcactgacgaaattttcaggaagaacattggtcggaaccaactcctgttatccaagacagaaagaacaaacgtaaatttgttagcaaacaacaaaattttaactgacatatactgggagtttggaacttatgatttaaaaagatttaccacataagttctgtaaggggtcgcattggacaatatagccgatgactccacccgtgtaccatcagcaagcaaaaccttataccaggtaatgtcatatcagtttgattcacgttttcacttcatccacaaatcattgaagacaaactaacccctttcacgatgctagagtcttcagttagtatttcagaaacctggaaaatatgaatgtactaagctgctctgatttctgatgagagaaatgatactagaactccactgttctgaatatcgtaggaaagagggataacctcaaaatgatctagaatttaatacctctgcgtttgtgaaaatctcagcaccagcttcctttgcagcattggctatagccatggagacagagcccatcccaccttcaacgtaactgcatattattttcttaccagttactcacgatagccaggccttgttttattaaacagatagtcttgtgctcttcatttacaccttacagagatgcatgtttactaatatctggtaagatagttcttcaattgcttatgcatcaacacttatgtaaaacatacacagctatttctacattcccaaaatatcaagaggaaaatacaaattaacaatcaagatacgtacgaccaaatgcctttctctccatctgtttctcccatcacatgatgtaggagaacatatccacttcccggagtatggacactggcctgtgaattaatgttcagatcactacattaatcccccaatatagaacgagtaagatattaagaaagtcaattaccgtagatccaatcacagcatctgttgcaagactcgccttcaggacatcagactacaagcataaggccaacacaaaaacgtgtgtcaatacaacatcagactacttgctaatgctagttgtataaccaatatgtgttaagataagaaaagcacctcaaaccagttgttcaaaacttttgaagctggtgccaataaaagatccataaaagcccttcacaatataaaaacaaagagcatgtaaacaaaacagtgaaagataacaaaacaaatcagcttaattgtttttgaaaaaggagatcatacaccatatctttatgccccaaagaaactgcttgccggagacaacgagcccagaaagcagatttgtacattttgttgctcaacttatcattaaaagaagaggcactttgcagagattcaggtggagttgaatccaaaagaggatccatgaatccacaaaacctctctagctgcttctcgtatctgtaaagcaaaaaaaaaaaaaaaaacttatttgatttgaatatcacattccgagaattagctaaaaaaacaaataaccttgggtaagcatcagcatcatgtttagagaactttgaaatctcagaatgattaagatcttgatcaggtccaagcagaagataacgtccatctaaacaaggtgtaaacgatgaaggacttctcttcaaaagcttaagtccatgtctacctaactccaattctctttggaatccaaaaatcaaagttatcaaacaatccaggaacgatcagaacaaaatcggaagaaggttaatcaaacacacctaatgatacaaggacgaagtaagccctgaaggtaactgcagcgtgagaatttgaatccaggaacgatctcctccgtcactgccgcgccaccgatgacatgacggcgctcgagaacagcgacggagagacctccgcgtgctaggtaagctgcggctgttaatccgttgtggccacctccgatcaccaccgcgtcccatttcttcttcggtaatgtactgaagctccggcgccacattgtagtcttcactggtcagtcaaagtctgtgtgactgtgtgtcacaagttctactctgatacttttgttccaatagtttttaagtatttacaaaatagtcctagtaattgtacgattcacaaaaataggccccaagctatttatggtcgcaaccccttttaaaaacttatttgctttatcacctatagtttttgatcatttataaaagagtccaaatagtttgtaaggccttatagtcttcaatgcttatatttaatttgcatggattggttcatcatttaataacacctgaattgaatagacatgacaaacatttttgcaaactttatttaggaaatgaatcctgacaacgcgattgctaacacgaaacaatccgaccattctgatttggctgtttcgtggtgaaacggtaaaccacaacaccgattctagaactttcttgaggaacatcagagtggataacgtcaacatcgaagagctttcgagcttttttgaagaagacagattctttcttccatctccttagatgcgccatcaggaaaattaacctcttcccctctagctgcatcaaacgcagcgttttgaggagaggctcgtagagatggtcatgatacaccacgtccgaagccagaatcaagtcaacgttctgacctagaacctccacgtcatcagcttctccccatcgtagtggtgccacgttgactttcccgccgaatctctcaacaatttcagcgtttgcttcggcgttgaagttgagattatctaagacgtgtgggagatccgtcaccgtgacgttagcagagagagtgattgccgcagcgatcccgacgaggccggttccagatccgagctcgagtatgttcaacggcgatggttttttcagcgacaagagtgtggcggtgagtggactcttgctagggtcacgtcggtagttatcaagcaacgtgacgaaagtagaagccgctggccagagctgaaaggagagaccttgtgacgtcagctcacgaatcacgactgttgactcgatggagctgatgttatacttctggagctccagtgcaccgtcacgcagaggagtaggaggtaaactctcaccgtcgagaccattctcgcctatgaggagcattttagcttcgtatgtgtcgttttcctcatcgtcgtctcgcagaggaagagtaatcattccactttttttgcggcgccgatgttgtcgctcgcttgttcactttccatgtttactgaactagggacctttaggttaagttacacgtggaggcttattattcgttgataacaactgtgaccatgagtctgtaagcctctgtctaagacagaggtgtttcatagcaatagcaaaggccaattccctcacgaatacggaatacatcaatgtgcagaaagtgaagacaaaacaaattgatgtttttggaatatttatacatttgatgtgcatgaatgcatcattaaatcactggtgacttctgtacagatcgatgctccctagttgtagtctcgaggtcgaattcacgtctcgtacacttaaaaaccggaacctgcaacatacacattagatatgattatgacccataagaaaaacaagaaaagcaaatgggactgtcttatgataagactcttatcaaactcaattcaaaacacatttgtgttctatcagggaaaagttatttaacatacctgaaaagatttgcttggaatccaggtgtagttattttgtaggatttgcgttggaaccgttcctcgaatacctgactagtttgcttgtctaggacacaccatgtcgaaccaccatcgttacttccttcaagaatcctggtggaggcaacaaacagtgttaaagcattgattgtgtatgtctagacttgaataataggaatcagacattaccaatctttggggtctctctctggggcatcattagcagacatgagttcgtatgctatgagttggtgcatctggttgtagagtgttttgtacacgatccaacagcctgtgcgaggagagattcgcattataacatgtaacaaatatcatagttttggatcaggctatatttcataccttttgcaccatttggttcttcccatttggactcttggattccatcaaaagctgcggttgcctgaggcagtgagtgaggcatgatatttaggaataaccaaaacaagtttgattaaatggtaagatgagacttgtaataggatactacttacaatgccagaaggaagctcttcaccacttgcgaggacagaaccagagcataccctgttctgtttaacaagtggaaaagacagtgaatctttgtttaagttttggtatttgctgaggtcagcaacaagttcccttaacgcgtccaatgcaactggcaatgctatagcagttttagtgagtttcccgtctacggatattgtgacacttttaccgtttgtgtctctctcgctctttaaagaaagagcgagaagcaaatcgcctagtgcgggaagaaactgctccgggaatgaacttgagttatctgaatctaaagtcaatcgagccttccttgttttgtaaggcgcattcttcagatccactaggacttgcttgatcatcttaagtacctcatttgttcttgctacaggtaagccgtcctcaacgaactgagtaaggataggtagaaacgagtcataaatgttggtcacatggtcatcaacgcatttgcgaactgggcaagaggaagagctgacagatgagttttcgtctgaaccaaattctgatctcataatacgccattccctgtccccactttgccttccgggtaaagaaactgaggcattatctgcggaatgcagatttctctctagttcttcctgctcatttctgtctcgtaattcaagcttagatagagattcaaacattaagctacgtcgtcgttcccttgtcagggttcgaagaccatcttgcaaagatgattcagttgtgagagttcttctagataaaacctacagtggaaaacaacagcaagaccatgagtgattaatagaagtcactgtttttggtgtcgagaaacaaaacagtcactgttttcgtgtagcattacctcatgccatttctttgtatatcgcttggtaacatcacaaaccccgtccttagaaatcgcaatgacataattcaattttttattccatctagaaggcagagattttgttagaatatggcactatggcagtccattatggggattgttcgatgagaaacatggaaagaggaagtaactggtacgcaagaaatcttaccctttctcatataacatgggtttatcatacactccttcacaagggtcaagatggatccacctgcagaaaaaaacaacggcacaaattactcggtataatgaaagttcctacagaggaaatcaatagacatttgtttggcagatgaagtttacctctttaacgagtgagagtagcattctgtccacacgtgatctgtgaagtccattatctgtaaatgaataaaaatattacatatacacattacaaatataaaagcaaaagcaaaagcaaaacttttgtgggaagagataatgttagttagcagaataccaaacgagaatcatagccaaacgtgcggcagtatagcgtaaagcagttcgcccactctccgcaacgacctttctttgtttctacgagctgcacaaacagggaagaaaaatggaacctgtcaatgaagtcaagaacatataccttccaatgtacaagctatttagttacctttagcggatcgttgtaccgagggaatcgagtagttgttggacacatggtacagctgtataagttatagtgaaatactaagtgaaactaaagtttaacaagagaaaataaataaagcactgtaggaattgagtaattcttgctctcaatccaatacactctataaaacgcgaatgatttagcttttacagtcctacaattctctcggaataaaggccgtgatttcagaataaaccatacaaactacagtacaaagtaattcacgtaccgatatatttcaactcgatttgctccataagcaagctccgaggtaagtgggtttcccatcccctggcctatggttttgttaccacaaaagtcacaaggaggttcattgacccatctgcattaccgcccaagtcaataacatggaaaagaggttctttaaaactactgtgccactatatatattcatacaacaaaatatgctgcatagagagaacaaaccaatgagaagactatcttcaattctaaatctcatcaaggatttcaataatgtattcaataatttagatttggctcaaaatatgaaccaaatctttatgtgtttttcttttctttcaactttacagtaatggattatttggctgtctaagccctaaaagacaagtaaaaggggagtccggaaaacctgaaggattttttgaaccagaaaagaagctgaagcaggaaagcgtagtctctttcctctttcgatggctcaaaattcccttcctaaacgtttgttaaaagcttggatcagttaaaaaatctcacataatatagtaaacatcaacctaaaaccttaaattctaaatttcatcaagcattttcaatatcagaagtcagaacttatagttcaattaatcgatgaacataaacacaaaccttggccagagaaaccaatgctttctcctcaagctcgtctttaggaacagtctttcgagcagcatcttggcggactggatcttcatactgaacacacacaaaatagtaatcatacatcaacacataaaccaatatacaaaaattgcaatcaaccatcaaagattcaaataatcaagtcttttaccatgagaacttgactaacataaggcctaattctcccttcgaattcgccgttatctcgtgcagcgacaaactgttgaaacataatagcatcttcttctgcctgaaaaccaagaaacataaaatcaaaacatcatcatcatcaaaatcagttgataaattcccgtgaagaccatcagtaatataaaacctgcaacattcgagccaattcttcatctgatttcaacatttccgcatctgagttctctacagaatcttctccaactgaaactaatcgaagtctctcagataaagaagcgagatcagactcatcagacaccaatcgattatcatcttccgcaacgatctatattacccaaattcgataacaaaactcatcaaagattccaatgaataccgagaaaacaaaatctgatttttaagttaccttttgttcttcaggaggaactaaagtgagggagaagattagaaatcgtaaaacctatagagaaacatcgattcaatggcggaatatcacataatcgaatcggacacgacgagaatacattgagagagagagagagagagagagagagagagagagagagagggaaacctcaagaccatcttcagtgttgtagtcgacatcgaagctcgaatcttcatggcggacgacaaatttccgagcaaccattttctcagattattgaaattccaaaatgatctctcaagtttgtttgatcccaagtcttttaagtcaagagagaaacagtcctcccggacaagacaagaaatttcggttttattttatccggccggtaataaaattacagttccgtcttaattttgaaaatcttgaaatcataccggccggtaaggtatgctgtatatatttgacttctattacgtatgcagactatattgttaaaaatatttatatatgattatgaattatttaagctaacaattctaaataggtgaccagttttttataatcactaaataaaatttcaaatttcatataaaacattttaaagatattctagacatatataaaatttgcaattttttttttgctgacatgtgccatatttttaatatactttttaataaattattataaaaaattattttctgattaatgtgatttaaattgaaaaaagtatttttaaagatgtttaagttagcaatatatatgttactttcgttttaaagtcgaaaattaacttatataggatattccaatatatatatatatttgtgatatgtgacatattgtcttattttgttttttccttcacttaaaataaatattttagatcctgttattaataaattattttctgattaaaggagtataaattgaatcaattatctcctaatgatatctaacttggctacattttaaataactgatttaacattttatatagttctaaaataaagttagctaaatgtccatttgaaagtaaacaagtacagtaccatcaaaatataggaaaaaagataatattcaatatcttaacaaatttagtttttcttaacaaagcttatgcatactaccgtttataatttcctttctaattcaaaagactaataattaagtgaattaactacaagatgaatcatattcattaaatatatgttctcaattctcatattggaattaaactaaatcctcaatatatatgttaattttatggtaagtgaagtttttaaattaccataatctgttatacatatgttgatcttacaaattaatcaagaaaaatagatagttttgtggaatagataaagagctttgatatcttccgtttacagtatttactttgtcttaaaaagatcaaacttgatttgattataaaaactatatacaattttaccgtctaagacaaacttctcctaacttttaacacattttttacaggtttaattatataaaaattataatttcatacacatccaaccatgggtcgcatggaagtactccaataattcatccatgagattttttattagcatatatactaaactacaactatgttactttggaatgtcaagcataaaactgagcgatgatagctttctaacattgtgcagatagataacatcacatcggactgttactctccctgttttgtcttgaaacttttatttaagaaacatatttttttatgagctgatgatgatgatgaccaccatacaccatgcctatagccttatcaaaaaggcatttgccatatgccacctgaaatattaacattttaaaagccacattttatataaatttattgtttctttactttttaatcaatgtaattagattatatgatgaaatcttctgcaaaaaaatttcgtgtttgtttttaaactgaatagttgcttttctacttgtaaattgtaattgattttagaaaatattgattataaagaaaaaactatatttgagataaattttgtattacaaattagtaaaatctctctatatagataaattaatatctctataaattagtagatgttttttggttcaaacataattttggttctctaatttttttttggagcaaatacttgttctcctagtaatagtctatatctaagtaatggttttaattttattgttcttcataaaagtgtatacacaacaataagaatcttgggttgatgaaatggtgatgttctattggatggttaacatgttcatgtgcacactttagatgaaaagagaactatccttcaagaaatatgaactttctcactattgtttcatataacacatgatatttaaaaattcataaaaattattttgtaaatcataagtaagtctttacttgaaacatgaacatcttcttattgtcaacataacctcttcttatagcgttccattttttagtcaattatttcattcacccgaaattatattttagtttttaaaactgataaaattttggttttaaattttaaattcaatgtttttttggtaagttatcttttgtttgtagtcatgtattaataaatttcattaaaaaaacttttgtaacatgtcaatattccttagaaataaagcaaggtaaaaaagaaaactacatcttttgggaatagttaaactttaaggtgatctttcatttttaaccataaattaatcctcctcaatgggattaatatcgtctcccgatatatattcgcaaccattactaaaacgaaagcagtgatgaaataagcccaatgccaagagtgtcctactgactcaatttcaaaatatagtccagcgattcccgaagcaaatcctgaaaaggctaccatcataatatataggatctcaaagccatccacaggataactcaactgaacaaatgagatcacaacgaagattatacagatgtatatccaaaagatatcccacctctgatccatataagtaataaaaaacatggttacgctaaccataaattggaaaatattgacgataaattggtttgccttaaaagctggttttggtgattttgaagaggtgatgcaatgactcaatatgccaactaacaagaacgtttcaacgaactcgaagtatcttgaacaggcatattcgaagctcatgtcttccttgtatggaaaaatattgccccatgcaattccagcaccaaatagggataatatagccatatgactccatagtattcgtgagatgctatcgtttactcctatgatattaacatttttggtgggattttgtatagtttcgtctgatgcgccggagataattttaatttcatccaagtccaccggcttatccattttatgtttgttgtgttgttgtctaggaagccctacgatgaagaggaaagagaagtgcacaatgaaaacttagatttcagttgttttttcacgctgcaattttcttatttatatatattaagaaaaaagactttttcgacaaatcaatatactattgaaagtaaaatcttaacaaaaaatattatcatcagaatatctcaatgtaattttgtatgataaatcttttttatataaatacaataaaactaaatttttcatttaaatcaaaagtattcaactttaatgattaacaattaataatattgattaaaaatcactttaaatatatatatatatatatatatatatatatatatatatatatatatatatatatctatatatacatttttgcagccactttgtgaaataaatactggagttgggatttatttacagcggctgccactggcatttaataattgtttttgataattagaaagaaaatcttctaattaaatatttgacataaagctcaagtgtacagtttttttaggagttatgtaacgtttctcccaagaaaattgtttctttatttttcttaatgttgtaattctccggttttgatatatatataaagtgttattgtccttatgatacttttcaatcaatacgaataattaatagactgaaaaaaaaaaacgaattgatctttgctgattagatattggcgatgaggtgaaatcatttaaggagccggaataaaacgttctaatggaaataaagctaatgtgtgcagttataaaccggcttagattttataattaaggtgtgtagaattggataccaaactgcgttgtcttattaataacacgaacatagacttatatacatgacattctctagggtttacacaaccgactatatataacgtgatacacacgacacaagcccatatttacacatatgatttagtaaactattctcactggacctaattcgggttagaatgtcttcggcgattaatcaagtccaattccttccactccctgagggcttgacaggatgaacaacagtctccccacatagaaactttgtacgccgcaacaactcccgccaagaagatggaccccaattcccccaagaagcttgaaccaagagcgttagagaagagggataggatcggagaatcccaaatctctcttgaagaggagaaacttcaaaagtcccgctacatgcaagtagaagaatagtatggtaattgccagtgcaagatccgatacttttcccaccttggattcaagccacatgaggcctttcaacatggacatttctaggatactacgagaaaggatggccatatgaggatatttcttagaaaaggaaaagggtttagatagagttttgggtttcactttgtagaagatgaaaccaactaacccgatgtagataaaagagtgagtgagaagcacaccctccatgatggaatggtgtgggactatttcccacactttagagaagtgcaagctaaagagagcagcaacgatgcatgttatcgtgtgtattggaaatattaggttcgtctttggttggaataactgaaatctaatggaagggggaacatgggttaagagttgagaatagtggattaacagagttaagaataaaagtggaacggcgaagagagcaaaaactagaagatcaaacatttggatagaaaaaaagacttgtgttgaagatgaaattgagggatatgatcctccttccttaaatagagagtttacaaagcttaaggatcggaaaccccttgtttgtagcgtgtgcacaaacacaacatccaaattcttacgtaagtctctctttgcaaagttaataatatcttacaactcacaaattaaagcatcataacacttttctataaatcaactctgtaacatatgtgggttgttaacttgttatacaattatacattttttttgtttttctactaaaatgactttttaattattgacggttcatacttaacaagcaactgagtcacaaacacataacctttaacaaagtgaaaacgaagtggtaatatagaaattttgattatttgcacaaaatccaaattcttacgtaagtctctctttgcaaagttaataatatcttacaactcacaaagcatcataaccctttataaatcaactttggaacatatgtgggttgttgttatacggttatagattttttttgcttttctactaaaatgtgtttttgattatttacggttcataattaacaagcaaatgagtcagaaacacacatatatcataaacctttaacaaagtgaaaacgaggctgtacgtaatataggaaatttgattatttgcacaacatccaaattctttgtaagtggagtgtttccaaactcacaaaaaaaaggaaaaaaaaacaaaaaaaaaaacttgaaaactttactgtatactaaacactatatcgatatgtgaagtgtttcccaagccatccttcttgattgggctttgtctgattttaggcccatttacacttgccgtatgccgacaaaacaaaacagaaagaagttcaaactagaataagatacttgtatatagtctatttcatttctagacttgtactgtaaatctgtaataattacaataaagaattagtaagcaacgttcgagagctctagtttaaggtactactaaactaatgactgacctgttaagatgcaatgttgtccaatatgcagttggttgatggttaatatagttgttcatatatcaaaatcccaatttcatatttttgattaaatcttatgtatggcaagtggcaacagatataatttagcataagttctatgtgtcattattttagggacaggacattgtccgtacacatgtttaatcttggtgtctacttgtcttttattcaagatccttccttggtcaagtagaatcattggtactccaagtccgatccgtactcatcagctgggatggtagtttgggtagaaaaattagttactgcatattcatttctgctctactaatctggtgtaagtaaaagggttgctcactacactggaccactgactttcataagatatccttgctctagacatgtcttgcaatagtttcagataattctgtttcgtttatcacatgccaagactgcagaaacaaatatatacttgcactatcaatcaggtgcaactgtggattggtgctcggttggcatcatcctctttgaactcattgtagaaattctacccttcaaagcagaacatcctcaggtcatagactaatcactgctttgtttcttattaatgctttgacaaaggaacatatgttttctcaaaatcttagatacgaaaattcatacttgggctggtcttcaaatgccatgtttttatttatttggcttctcaactcatttaaacattcattcatttgaagtcagcacatatgtgtctatacattttctgtgatgactagttccaacaagctgtaaactgttaatgacactaatttcatgactcacatcaagcagcacaccttcgttaaagacatcaacatgggacacactagcaaggcaaaaggtgcatttatttatcttactcttttacagacataagctttgctacttgatgccctcttaaagttgaacactatttttctttaggctgcatttgttccggcttcagagagtgaaattgacacaagatacattagaagccgctaatcttggaacgcatcggatgagcaatttttcctgaacggtaaggtacaagattgtagtgatgctgatagcttgagtggcagcagtagttgcttgcgcaatcatcatgaagaatgggaggtaatgtctgctaatccattatttgaatcttacttccttagaatatagtcggtaaattctatcattaaagttctttggatgtgcaatttcattgaaccggatcaatgttgttacacaggttttggaatgccaaggacatccagtttttgagccttgtgaacctgcttgtagtttactcttctcataatatggaccaaatatcttctcatagtaagaccctcgcctactctcctaggctgatctgatacctagcctactagaacaagtgcaccatatccccaaaggtacccatattctaaaaagtgcacatgcttacgagtttggttccttgaaaactaatagcaaggattctttcatctcttctggtaaaaatattatgagtgtggagccagagaagaattatttcacctttgtttctccttgattttcaatttggtaaataaggaaatctctaaatatagcaaaacaaactggcatgaaagccaagggaaaacttgttcaagtatttcatcttgttcaaagtctgataataagtaagttttattctcttgtataagaacatgttcttgtttggggatttaatttgaattctcagtagaacaaactaaagttgcaatctatcaaatcggcttctttcgagagctttttgctctgtgtgaataaaacttatcatcaagtcaagtttaatatctttagaacacaagggtacaaaactttcaccatgttaatatagtcgaattgtttctgagtttttcaccattgcttctttccctttttctttttcttgctgctactactactagtgctactggcggttgctgaagacgggttctctcttgcattatcaaacataccagattgaaccgcgttctgcaaccactcatagaactcttcctctgtcattgtttcgtccgggtttgtgtttggcattctctggtttcctttttgccctgaagaaccacttgttcctcgtttggcagctgtcgcgttcatgttcacatggaagctcggcttgtgggtgtttgcaggacatctcattcccttccaacaaatcaaacaaaaccattttaatcattccgataaaagaaaataccaaacaatctcttatgaaaatgccgaaagcaagcgaaagtttttggtacctgacagatataccactgagaagcttcatatattttgctgtctgcacaaacataagcacgcggcatatcaacctgcattaaaacaacaaatcctttcatatgactatgagaagcatatcaatcaagtcatctgattgtacaaaatcgtcttcttgagaatcaaccagtgaagagcatctagttccagtatagagcaatttaccatctatcccatgaattgaaattttgaatacaaaataataccttttgaaatagcccgaacaagacgtgctgggaagcttgttcaacccaaccatctccatcttttgcttgatggaattccttgcaatccttgagatacaaaagcagagctcgtgtaaatcagtttaagttatatgtattatacttccctctcaagtagtttcataattggtgtaatatataggatcttaaagatgcaggtgggaagagttggaaaaaacctggcaccatctagctgtagattttgatttctttgtaagaaaccaggcatggagattgccacattttttacacgctatctgtctacactctctaaatgcttcctctccttcaccttctgagcttccaaaacccgacccagagaaaccgtgtccccgagtgtcctggttcatgattatacattgcagcttaaaataaacacatatatccgagtagagagaaacatgcctacttgtttacaagtgtgaaggacaaaaaacctgatactttaagcaagaaagatgcacttcagagtaagacaacaataaacataccttttgagaagagttctgaaacctccgaaagtagttcagtagttcttccctcttcaattcatcatcatatgatttttgctttacagaatcaagtaatacctaaaggccagctaaggagattagagatgcgggttcttgatgcagcgattacaaattgatgaaacggaaagggaaacaaaacattacctcatatgcattctgaagtttcttaaaagcttcagctgctctctcattccccatattcttatcaggatggactagcatcgcctattgaatcatccacaatgcttataaacccaacatacctttttgctgctcaggagtatccaataaacattcacttcaaatagaaaaataagcagcattacctttttcctatattctcgtttgagataagccatatcaacattcccatatcgagctaagcccaaagctgaatagtggtcaggacaattcagtaaccgagcaatttcatcttcagatgttaactcagagtctgttccgctagttgacgcgactcctgggccacggtctcccggaaagccagggccattttcaaaagatgaatcatttacgggctcagtgggtctatcagcagtgctctgctgatttattttattcttgaagaaatatatgagagcatcggttgagatgaaagcaagattaaaagccaatagaagacctagccatccaacataactcaatgcactatagactgaatacactgtgattataaacagtgcaacgcgctcgtgcttcatcatgaatgccagacctttatattaacgaacaatgcacactgtattagacaaaataatgcaagagattggtcgttgctacaagattgagacaggaaggacttttacctccaaagaagaggaagagcagtgttgtccaaaagctaccatagagccatagcaaaaccaaaccagaaatggcaagcgtaacagacccaactacgaagccaatgaacaatgccaccaaaacagttgcaacctgtatttatcgaatatttaacatatgcataaagagtaaacatataaagaaatcacatttgagattcttaccgaaatcagtataaatttggtcatgccgaacatcgaaaacgctgaaaagagaccacaccacatgatagagaaaaaagatgctgttcccatccgaatgaatgaatcaaaaccccggattgcacagtccaaccaaaccagagatagaagaagaattatgctgccaaagtgcataagccacctgaagacaaccgggaatacttgccgcattttcgttagaacaagatcacgacctttatatactcgtaatttgacagaatctatcaaaggcctgtgtctttccatacacttagtcatttcccttgatacagtagcagtggatatcctcagtttcctcagtactgcattatatgctaactcaatattctctgacgggctattcgtgctcaatatatccagcaagcttctcataacactgtcaatgtgttcacgaccaaacggaatatatctagtttcttctgttgtaaaaccaggttcattacgaggtctactacctccagctaaatcgctctccgaagcaacagactgatctatatccttgagagaagcagcgccttttgcctcatccatatctctttctaaagtttcacaaactggactacttttagtctgcttatcatcttgacaattctctttcagaacactctcagcctcattatttttcccttgtcccttattagacagcaaagaatcagaagcagtcttctttttttgcttcgtttggttatccattccattcttctgatgacttccttttcgtgccattatcaaattcaaacacaattcaacttctaccactcaagcttaaactttctctaacattccctgacactggagaagaagaactaatccaaataagtaactagaagtgatcatatcgaagatgcaacacagaaagttcaaatctttgagcaaaacgacgaaatcaaacaagcttttgtagtaattgagatcaaacccataagtaaagcttttgaatttcgtctgattgtggaaattaagcaaaaactaaccaagaatcgaattgagattataagagcaaaattggggaattgcccagaagagtacctgaaactctgattcgaaacgagtggcgtagagggaggaaaaggagattccattagagtaaagaaaagtcaatttaaaggtcgtagaagaagaagaagaagaaggcccacaagaagaagatgacgaaactagtgtgccctaaaggatcaatttttttcctgcttataatcgatgaaaccaatttgggatttatctgtggcttttggtgactgatttgattatgattaaagaggtgaaaggaaggaagaaaagaaaaaggttcgctttcaatttttgccgaatgatttggaaaagaaacgatcagaaaaacggtggtttcgaccggcggtgtcactgttttaagatgagctggtgaaattcagtttttgttcaaaatcacctatatttttagaacatacatttaatagaaattaaaaaaaaaacaaagacaaaaaaggttaaataagttaatattattcttaacaacaaaaattgattactggtatgaaagtagttacggcaagcctcttggtaactcatctgttatttgtagatgatagtttattcttttgcaaagctagcaaaaagcagtgtggagtaattttggaaattttaaagcattatgaaacggtttcaggacaacaaataaattttacaaagtcttcgatacagtttggtcataaggtcgatgattcacttaaggcagaaataaaagcaacattgggaatcactaatcttggtggtatgggctcctatcttggtttaccagaaagtctaggtggatctaaaacaaaaatcttctcttttgttagagatagattacaaaataggataaatggatggtcagctaagtttttatcgaaaggaggaaaagaggtgatgattaaatcggtagctacggcattaccaacttatgttatgtcttgttatagactaccgaaaacaatcacatcgaagctcacgagtgcgatcgcaaaattctggtggagttcaaatggtgaatctagaggtatgcattgaatggcatgggataaggtgtgttatagtaaatcggaagagggtttgggttttcataatgttgacgattttaattcggctcttctaactaaacaattatggcgtttaatcacggttccagattcactctttgcgagggtttttaaatgacgttattttctgaaatccaaccctttggataatataaaatcatactctccatcatatggttggaggagtatttgctcagctagatctctggttaataaatgacttattaaaagagtcggttctggagaatccatctcagtttgggaggatccgtggattccaattcaattcccgagaccagcattaaaaaatggttacgcttttgatccttctttgaaggtgaaaaatcttatagactcacggacaaatttctggaatattgatcttttacaagagctttttgatccggaagatgtctcgttaataagtgctttgcacttgggtgcgtcaactaaggaagatatcctaggttgacatttcacaaaatctggaaaatatacagttaaatttggatatcatacggcgaggttaaaaactttggatgctaacttttctttttttggcccagacatcaaagtcttaaaagcattctcatggaaagtacaatgtccgcccaagttacgtcacttcttgtagcaaattttagcgggatgtgtaccagtaatggacaatctacgaaaacgcggaataaactgtgagataggatgtagcagatgtggtgctctagaagaaaccattaaccacacgcttttcttatgcaatcatgctcgtcagatttaggcactttcacagatacctacggtcccaggaaaatttccttatgcatctatatatgcaaatttggatcatttattttggcgcatacctttggaatttgattcatcttcatttccatggataatttggtatatttggaaagcacggaatgaaaaaatctttgataatgtggataaagatcctctagagatcttacatttggcggaaaaagagtaagagtcagacttgtggaagtctgctcaacttgagcttcacaacaaaaaatttggttctttcaatttggaagatcgtaatcgagtgcggcatttttctttagacaacaattattctggatatcgttgttttgtagatggatcttggaaagataccgacaagttttcaggcttaggatggtactgtacatcatcaactggagagacatcaactttgggagctgccaatctcagaagaagtctatctcctttacatgccgaggtggaagctctcctctgggcgatgaagtgtatgattggtgccgacaaccaagatgtagatttttttacagactgttcagatctggtggagatggtgtcttccccaaccgaatggtcggctttctcatcgtatttggaggagttacagagcgacaaggatgagttcacaaacttttctctatctttaatctctcgtagtactaatgttaaagcggattttttggcacgaaaagtttgtacccaaccgcttcatattacatttgtaaacaatattcttcaggattggctcgtttgagtcctaattaattttcagatgacaaaaaaaaaaaaaaattaatattattcgaatgaattctatactctaaaacttttttttttattgtctctatatttcatcaaatcatattacaatattcaattacctgttgtatatgcgattatgatgaacaatttcatcaacaatgattctaaagcgtaattttcttagcaacacccaaatccacggcggacaattttatatataagataaactgattatcttttcgatgtttttataattacttacaagtatttttatagtaaaattatgatagttttaattttaggtgattttatatctatttaggcggtttttaacggttctaatcgtctctatgtaatcaactaatcatgaattaattatcatcccttttggtttgtttgaatgttattttttaacttttaattacattaaacagtttatcattatcttcgatttcaggtatattagcaacacactagccacataacacatgccttaagattgaaagttaactacaccaatcagtaacaattctccaaaagaaaatagactgaatttagtttttttttttgtagctaaataacccgtggatataatccataacattagctataaaactaattcatggttaagaagtagctagttatctacgaaaaagcacaaatttttattcgctatttaatttttgatttttttttagttgaaatatctacaaatttatccgcgactatacgaaatcctaaaaccaaacaaattttggaattttgttggcatgctcaataaatcatagtatatctgtgtataatgtatacaagatagattgaatattgatactcacttacgtggaattgggcaaaagaaattggacttgacgttcaagtcttgaacatagattaatgaaatgacaaaaaaacgagtttcaatttgcaaagacaaagagatccactcgagaacgcatattctctctaacttgcacaacattttaaaacaaaggttaaaaagacaactttgaaaacctcattgcctcaaaaacattctcaactcttatccaaacacaaaaagagattatttgatcatataatatttatggtgacagaagccatgaaagccaaggcagaggtgtaccatggagacaagacatgcagagagaaattcggttcgcttttatccgaaatcgggttaccaaaccggctccttagtaacaaggagatcaaagaatgtggatacgtgaaggacacgggtttcgtttggttaaagcacaaggagaagaagaaagaagatcagaaaaggagatatcaagacttgttaagattcgataacgttgtcgtatgtttcgaagatgaagtcactgcgtatttcgagcctaacaggatcaagaaactcactggggttaaggctaaggagttcatggtttggatctcgcttggcgagattcaagtgaaccgttcctctggtttgattacatttaagactgaggtcggtttattgtccaagtcattgcctttgtcggtgtttgaagacgttcatggtgatgatcatgatctcaaggagaagccaaaaaaagaactaaaactcaacaaaaccaaaatctatttgtactaaaagcaacagaagaaatcaactctatactactttatatgatgttatcctagaaagattataaaaccttgaacaaatttcataagccctaaaggatccgagagctgaaaataaaccaaaaaaaataaaagagtagagaaggcaacattaacatgttaattacagggtactatggtgctgcgaaaggcgtgagcagagaaccacaaaggcagagaagagcttccttttacagaaaacatctctttccataacttacttcgtctttgatacaccaaaacctgtttatgagtagccaagaaaacatactcaccggtctgacaaatcgggaagattccaggtaccaagcctttaatacaccttaaacttatgctatcaacaacactccaagtttcagtctcatactcactcatcttccaaatcttcatccatacatctgataactgaatcaccgacaaaaacccatcggattccaagagataaacccgattaccaccaccattcccaattctaatctcatcgggcaaagaaatctttctccacacatcatgttcaacatcaagcgcaagtatataacacaaaccactcatcaaccaatgaagcatcccattaacaaacaccacttggttcttactcatgtgtgtgaaactacattcttctaacaccgaaacaaacttcctccatttgttactctcagaatcaaacaccaagcaaatgaaactcccatcaggtctctgaccaaaagacctatggtaaccagccaacaccacattaaacttgttcttactcaaatcacaagccaaaccaacaagagtagcctcaccatcagggtaaaaccgagtaacaggtctttctcgactcttaggcaatttcctatactctctagtcgacggattacaaacatagtaaacacccttttcaggaatgcttgaacaacacaacaaaccattagaagaaaccctaatcctcaccctatctctaacaaaatccaatgataactcagaaacacctctcagattatcaacacagatcaaactagaagaatctgatacttcagccacaagcaattgctcttttacagagagttgattgaacaaggaagtgaaatatttgtcagaaggtaatctgtaccatgatttgcaaacggatttgaacctgaagagagatttaacaggtaatctagcaagaatctggagaataacctcatcgggaaagagagcacctttttggttatccattaacagatcaatcaaatacacaagagacagaggaatctacaatggttaaagactaaacctttatagtcttaccgcatcaattctatgttttgattacccattgatggaagaaagataacaacataattgagattggattcgaccaaaaaaagagaagagaccatttcagagatcactgagaaacaaaaatggcgaaacggatgatgaagaatcgcttgagcgttgaacaagtttagtgatggggaagaagcgcatgtttctgaatgggccaataaacaaatactaggcccaaggcccattatattttgttaataaagaagatcattccatatgtgtatgtgcatgggtgtgtgttagttatatagtagttccaaattaattgttgatgaattagtaaaatcttatatcaaagtagagattttgagttaataataagttagtataacctaggattctttcatttagtcttccacccatgaaggatattttgagatcttggttcttcttgggcaaaccttaaattaaacacttttatatgtacatcttatgtgatacataaaatgtctactcttaacatgaccatacaaaattttatgtgtatgtatataatggagatgaattattaaagggagaaaaagtgtaattgaggagaaggatttgtcggaactcggtgactttgtctcaatgatttgtgtctttggtcacatcagtttcctcatcttcctcaggcaacttaagttgcttcgttttcttcttcaattttttctccctttgcctttttccatttagtttctctttttgctttcttattctctgttccattttattgattgatcatattttcacgtcccttaattgatgtctactaaacattagttacgattataatattaataaaggaatgtcctaattaaatttgtaatttgtcgtagaagatgacacgtctacatactactcgttttcatgatcttgtgatgtcgtaatttatgataaaattatgctatagtttgatttcagaaatttgataacgaagaattttggagtctaaccatgcatccacactactttcgttaagtgttcaatttttttggcatggttcaactttgaatctggcttgattatatccaataacatttagccagtaaaataactcgatctatttacattactagtgcacgtgtgactttccattgtcggcaagatctctatacaagaagattcatgctagagggcaagatgatgattttgcatagatttactatattttcagaggcattttctatccgatggtttctctcttatcgtctgacgattgccacatatatcatttcgttattttccataactccgagtactctcaaaatttaatgagcatgttgacatattttttttgcaaatgcatttcaaataacctgaagccataaatagtgaccataacgtccaactcttgattatatgagtataggtgtaagttttgtcaacatagagattccatgtcaaatgtgtgaataaaatatagaaaacttgaaaatttaatataaccttcttgtttttgtttactttatagacaaaacagaagttgtatatatgttgtacatatatgtatctatagactatagctacgtccgtgtgtgtgtctttataaatatataattcacgcaaggcactctctatctttctctcaagctatggatgaatggggaagtgattcaaggcttgaagaaccacaaaagtgtcatgatccaggtatacacgcaggccaacaaataatcatgtccatcacttatgtagtttgtttgataaagtataacttatgttatgtagttgcattaacttttgattggcttaggacaaaaaggttgtttcaagaagaagaagaaggagaagaagaagatgatcaagacttgttctacttcgtgatagaaacaatgacgctatcttacctgagctttactaattggtatattccctttttctggtctttttttcttgaccttgtaagaccttttctctactcttttctgtcttcttactatttccatcttcgagatttctcaattctgtcgagtttctacattagttgtttaatttgactaaatcgatcaagattttgttgtatactcttatgattcatattcccactcttttatgtatccctcttgagctgcctaattttttttttctctaatctctcttactatgtatttctttatagagatcctatagaaagatgtttgtatataaaaacattctattgcgaataacataaagaaaatgtgatgagtaatttaatttgatgagtaatgaaccgtttttaaatcaccataaattgatcgaggttatgcaccgattcttattaaatatacgctcgttacctactatctccaagattagatcagtgccttagtttgatttatggggagaaaactctaagatatcgccaaagtaaccaagatttgctacactcaataagtgaattgaagccctaatgggtctaattacgatcgatgaaattaaattaattaatattggagggataagtgctaatacatggttataaaaaaatgtgctacataataacaactacgaaaaaaataattatttgagtcggacctagattgagttggtaccgtcactataataagattctactactttgtctgtatctatattgtattttagaaaattatacatacgtattcacgtattgaaatacattgtatatagatgctggtttcgtagtatatggctttgtaaccgtatatggtggtagattacctgacgcatgtgttgaccttgagctgtctctaacttaagtagtcatttcaataatgaggttgatattgtgtctttcttcaaatatgtattaagaagaatcctcctttattaactagttgtattttttattttatttttatgtatacaatttggaatctgagttctccacatataagctttgataagatgcaagttaacaaatcttaatctcaacgaggaaatgtatagttctcggcccaaaaacctttgaaattttcactttttaaaaatttattttgggggattgtgggtctcaacacatgtaacttacgctaaatatatgttgacactgttcttccaattgtacaaattcaaaagccgttacggtatttatgtaaaaaaaatcaagttgtaagaaacatttttggtttttcaaaatgaataagttgattttaacaaaacaaaatttgattatttaatctgatatgaaattgaatctgttagatatatagttattgtaacttgtaatgaaaactaaaaatctctcggtaccatctatcgtacaatattcaatttagtgaaccataacatctcattatttcaatttagtaaaaaacttaaactaaaagtgctatactaaaatctagtattattgacaactaataaataaaggttttgcatattgaatatatattagaaaaaataagtgaataaatgaacgctaccagattctcatgaataaattagaaaaaagtatctcaagtataacaccaaaaatttagattcccacatgcactagacacagaattcttctagatgttatcattatttttaatgctttaaaaatattgaacagtatgagtttattttaaatcatcaatcaaataaccctctttaacatatactttttctttgcgtgctaagaaagaggttatatggatcccaagtgtcattcgaacttgtgatttctttagctttgtcctaatatatatttttcacttgaactcccaatacttagtaaccctctttaatatttacattactgtagacgatattattatctatctctaaaatatttttaatatatcataaaaaatcatcacaacaaatactattttatgttatgctctttattagagaattattacatcattttaccaatgggaatttgtatttcttgcagtagataaatacaaattactatataagtattatttttttcaaaataaagttcagtatttggaattggagcaaaaaagaaagagattacatatagtacttcgtagaaaataattgaggaggggaagacgacattttggatgacgtgttacagtgtaagaaaggaattatctggataatggtgggatcgtccgtactgtaatggggttcaattaaatattaaggatttgcacgcgttaatggtggaaaaataatcatcactaagtatatattttaataactaagttcataattattacattcttccaagaataatctccttaatggccatcttaaagctcaaacattaaccactgagatgtctctacgtggtgataaaattatagaaatgataaagttttggattgtctacttttgaacccaaagcctttcacacacttcggtcccctttttcccatatacaggtcccatagacatgtttcctaaaagcatcatgaatcggattatccattttcttcttcttattttatcatgctaaagtcattagataaaatttttaatatgttatgttttgtctgcttgtgtgacatatacagttttaattaattatagtatgaaacttggtcgtggaaccaattatggttgctttggaaaattcatttataataaatagagtgttgtttatatagcatgattccatgaagaaaatcacttttaattagtgtgtaatcgtctttcaaataaattatcctccccaaaaaaatgatttgttattaatttgattctgaatttagaaattatcagcattaatatagtatcacaatcccaaaatagcaatcaaatttactacaaaaataactatttcctaaactctccaatatgtctaaagctgctaatattttaacaaaaccttcttcttcttttttttttcaaataaaaagctttgtttataacaaattcctttcacacttttaaattcagaagctttgtattttccctttactttgtaaaatagcttcttgtctattcagaagcttccattgtcgtggacttgttgatgttgttgtaagagccagaagtcttcatcatttccaatgttccaaaaactgtccgaataatttggtaccatcccattaatattttcaaaccaattaaggtcactttgatcttgcatcttcgtaaaatctccgtttaatagtccactgctattatccatataattcggcgatgtcatttttggatccaccaaattctcatcctgaccaatcttccacacttcactactcacttgacactccgtcaaatctgatacaggagatactgccacgctggaattatccggcgtgatgtaaccattagggttactcattaaagccaaattatccacgttgttggtgttgttgttgttgatcacgaactgatctgaggaggtggtgacgcaagatgacatggaaacagacccgatggacgcggcttggatcctttctacgagccgaggcatccaaagatacttcatggtgtctttaaattgttgactgttcacgtcgcatttaagctgttttgcatgcttttgaacacgtgttctccaatagtttttgatctcgttatccgttcttcctggtaaatattgtgcaatcttagaccatctgtcctcacaagaagaagaaaacttgtgatcaaattcattactagtacaaataaaccaatctttcaaactcttgttaacagaaaataaaatgtattgatgactaaagatgtgaactaattcgtgtacaataatatttagccatctttgtgatcaaaatcttgttagtagaaaataaagtgtataaatgaccgtaattaaaaaacgtacctattgccccaacgtgtgtgaagttcaagaatcaagagttgttcttcgagggttatgtttccacggcgcacatctggtcggagatagttcagccaccgaagtctgcagctttttccggtccttttgagttctgttttatattggaagttactattatttaattagacatcatcgtgtacacgtatattgtatgatgatttcatacgcaagaaactcatgataatgatcatatatatttggtaaagttatcaaatttactctagaaattatagggaccgttgctatgaggcaaactctcaaaaagggtctttgtctcctgaaaactttcttccattgcgttagtgctcttcccatatagatgttgatcaattatttcatttatttcaacacgaatagagttactctattcaaaacctagagggttaaataattgaatccatttcctaaaagttataataattgagtccgaatagcaaaacacgatttcattaggaatgatcatagataattttaacaattcagaaagaagaaaaataatgagagaacggaacacaaaagcatgacactctttttgttttatccccatgatttgttttttccttttttttttgtgtgcatacaaggcaaaatccatttcttgaactttcacaacaaacttttatccaaaaaaaaaaaaagaactttcgaaacaaaaagatatgattaacagaaaaagtggcgcactgagtaaattaaaaaagacacatatggagatcgaaacaacttgtgtataatatatggtttgttacttatttttatttgttttcaatcaaggagcacatttatacacaccgtctatgcctatattaatctaagtgtgtatatgtgtaagtagatgttagagtatcataccggcgcaacgagcgagagagttccatcgaccttcaccatgactagcaatgtaattgatgagctctaaatcttcctcaactgtccatggacctctccttacgtccatttcttcttccactttcgtgaattcctccatgttcttgttgatctttaagctccttcctttgtcacccattgatgaagagtgacccacaaagagatattcaaagaaaaaaatcaagacttagctttgtacttgtctttgagtgagttctgaaatgaaaagagtcactttttggagttatgtttagagagataatggatgatgttgtttgtatccacaggaaaagatggagaagttgatggttttatagatgaacaaaatagatgataattcttttttaagatttatttgtaacatgtgggacaaaggcataaacggccgcaatattagaattgttaatttttcccaataacttaaaaactttaaaacatagagcatctcctaatatatttgtaattatcaactatctttatgagaggagaacatcatcataatattactatccgtgtttaaatccgcataagtatattgttgataaaaagagatatcttataaatatggattggtttcaggaaatatgaacaaaataccggaacaaaacagtttcctcaatttaataatcgaactagttctcgtgcttgtgttttaaactgacaccgtttatgtcaaaattattcattttccaaggcggaaatgaaaccacattttgcatagatatgaacatagattagtccgagtgcggttgtttaacatccattctagtcactagaccatgtctactgatcgaaaaaacagtcttaggattcataatattatgcaaattttggagccaccgaatttttaaattagattttatgtattggtaaaaaaatcaagtgcaatttgttttcgaaattcaatttcattgataaaaaaacatcatgtttgttattttacaaaatattttattacaaatttacaatacatattatattgtttagatgtaaaatttctcatatttacattcgctttagttagaccccaaatccctagacatgaccagcatcattattcctaaatacaccaatcgttgcacacattcattattcctaaatacacccatcgttgcacaattcattattcttaaataaaccaaattatccgtttcacttcttaaattctaagaaatatttatcgttaaatatttctccgttaaagatccagtacaagtactgccaaaatccaaggatgaagactgtatttttatgattttgtcaatttactctcttaattaagatattaatcgaatctatacactgaaaataactaaactatgagtaataaaatatctcatttgactctttatgtcatgcaacgcgttatcctaatgaataaagttccaaatgccgcaaattgaacattaattataggatcgtggtaggacttaattaatttttagggttgattagtatacttagttagcacttaattcagcactatagctttgaaggttgacattttacgacttttcatgcgtgtaattctgtttcttaattatgtttataagttgtcgtaataacttaattatacttttttccagtttcaaacaagttgcaaatactatactgtatgttcatatacgtcttatacttctccagttccccctatgttcattggtttgaccataaaattcaaattcatttagccaacctagctaggtgcattcaaatactgagggacaaattcaacgtttacttatataatatgatatgaatgtaaatatcattagaaaatgaagtgttttggttttacataatgtcaaccttctatatttgtgttttgccaaacatggaaaaaaaaatacaatggtcacatggatcttttgacgaagaagcaaccctagttattcacattaggttaatgaatttcttccatgtccttttttggcgataattgtattatggaatatgcctacatatcaatggtctttaattaagattattgtagcaggagttgcttgttgctaatgaattatattgctcatttccttccatatgtgatatacagtggcttgagccactagcttttgcaggatgggcggtgaatatgtgtacctagatttgttcagacaataagagagtctcaaatatagaacatattggttgtgaggctgagtcgggtctgcatggatcgtctaatcaacttgtagtaatcacaattcacaaggaagtggttttggttttcatcataagtagagaaaagacaacagtgagttgcaatctgcataccccatgaagcaagccaaactatagtcggtagtctattcatttgacaaatctacatcttgaaagcaagactcatcagtgatcaaaccaatatttggccgcttcccgtgaccacaatgcttcccagttcccacgtaaagctggaagcgaagaaggagttttcttgaccatcaacagtccaagtatactagtctagttcccaagaacaaccgtgacttgaacttttgttaggtagatatataggccaagaagcagatctgttcttggcgcataatagaatttctatttttgagggccataagcccataatccattagcatcaacaactcgtgagtgaatgggaagtcccaatagacgtttctatcttgtcctaactatttgatgagtctaagcatcgtgccagatgcttgcattccgacaattacccacattggatcaaacaaacatctcagcaagtaggcgaagctt

SEQ ID NO: 864 - DNA, 71807 bp, Arabidopsis thaliana
aagaacgttgagagatttgagattagaaagtgaatcaggtatagaagaatcgaggtggttgccttgcagtacaagtaagttcagtttcctaagtcttccgacttctgaaggtattggaccagacagttgattgttgctgaggtcaagcttcacaagattggtggagtgagagagctcatgaggtataacaccggagattctgttactctgcataaacagctctgacaaattccaagcgtttccgatcgcattaggtattggaccagacaaggagttgtaagccaagtcgatgatggagacatgaggcagagacataactccttgaggtatggttccaacaaggcggttgctcgcaacacggaaccgtatgagggtcttgcagctcccataagtctcagggatcgaaccagtgaaccggttttgtagtacaagaaagtacaaaagcttaccggatttgcaaacgtgagccggaagaggaccagaaaggcggttttcggagacatcaagagcgatcataggcgaggaagaaccgagatttggcgggagttcaccggttaagtagttgtcgtagagagacaagatcttcaaggtttttgaattgccaagtgacttaggaatctcacctgttaagctgttgttgtagagctgaagcactcggaggtttggtagactgcagattgaatccggtatgcttccggttaacctacttaccgagatatcgatatccgtaagattcttgagattaccgatttcctccggtatactcccggttaagtgatagttatagtaaagctcaagctgccttaggttggaaaggttccctatttcttttggaatctcaccggagaggaagtttccgctaagttcaagatcaacaagagaagtcaagttcccaatggatcttgggatattaccatggagcatacacgtcatcaagagcatgtgtgtgagctttgtcagcttagagacagaatccggtagagtccatagatcaagctctggattctcattgaaattgagatactctaagtcagtgagattgaagatagagagagggaagctaccggtgaagtggttccaagacatgtcgatgactcttaaagatttcatctgtgagaaatcagggagagttcctttgagatatacagagctcatgtttaggtctcgaagcagagaacaattagggatggtgttgaggaagctgctacttttgttgagatggttgtgagagagacgaagtacacggaggtttgggaagtaagagcaaaccccatcagggaaaatcccggagagtgacaaaccggaaagatcaagatcggtgactagcccttgaccgtcacatcttacgccggtgaagttacagtagttggtaccaacgtcatagacattccaagtggacaaagcgtcgccgaagagagagttcttcataagtttgaagaattgaggttgttggttcgaactcatcaagccccatgattgattgctgttgaagcaaaagaagaagaagagaacaaaaaaggggaaatttttgagacgcatttcagagaaagatcaaaagtaacctagaggagctaacttaggttgcaagaaaagagagagaaattttgtgtttgggagaaaaagagaggaagaagaagctaaagtttacaagttgaaagactgcaaattgttgataggcttataaaaacaaaagaagggttcatgttttttgtacacgatcagaatcagatagatgcaatttacgaaaaaagatagttttaaataataatatcattggagaaaaggaacatacatatctttctttttgcataaagaagctttatgtttatacccactaagttattatagagaataacttaagaggtgtatgtatgtagccaactttataccctagaaagctttacttttgttttctaatttttatcagaaaagaagagttgaaatatcactgaatctgatactaaagagtgcatgatcatctgtccaagaacctcgctcttgtctcgacatgttttttgcttgtgcttttttggatggacattggacacaaccatgcatgagagattgctatattatataaaacattttctcgccctaattatattatatttattcctctcaaatagattttgagctttcttcaaacatacgtatgtcccatggaatcggaaatacgtacattacataagtgaagcgtttgaaaatattcaaataattctctgaaattatattaaatacaattcgatcgtagcaaacgcattgtatttatcaattaaacaaatacaatatatttattttcaaacaagtagagaatataagtggaagaaaaaaagtgtggatctgtcatgaagagcgagtataaacgtttcttcatttcaaactaggaggaggagagtcgtcggtatctttaagctccatgaggtctgtcgacccatgatgaagattggacttaatttgggcttggaccgtcacatattttacgtaaaatccttgtgtatattgggagatatgcaagtagtgtacaggtactccaaagaatatccgtcttcgattagcatttaccatgtactcataacacaatgaatgtatcaatgagaggaagtaggattagttttgctcattacaatcccacttcaatggtacacaagtacctgctcatttactcgactccgattcatcatccgacgtgaactacacaattttttatcgaccattttattatttataaatagcaaactaataaaataattatttactttgataattatattttccatgtattaaattaactaaaacgaaaggtatgtacgtcaaaaacagtgagaaaaaatcatattggcataggcatagtatttgaactttaagaaccaaacagaacccgatacgaatttgaattcgatgttttaaaatatgtgaacggatcctaaactttactataaaaaaactcgaaccaaacttgaataaatatacgaatatagcggaaatataagtatatagttaaatatattaagaatatttatatttttacttgtaataacctaaatgcctcaaatatttggatgttaagatattttcagatactttaactacttttggctatattctagtaaaaactactcgggtttggtagatttttcgggtatttttcaattgtatatttacatataattaaatacaaaaaaattgatatttggatattttgggtacatccaaatctgaatccaaaaaaactgacatgaatccgacacaaaccggaagttttaaaatatccaaatagatccaaaatttctaaatctcaaaaacccgaattcaacaaatatgaaccgaatatccgaactaccaggcctaatattcatatgtcaaaagcaattaaaaaccaacattccagtatctgtatatctaaaaaccaatgatttatctatcatgacaatgatgatgatcgatgttatgattaacagtttaacaaccaacaactgcaataaaagataggaatcatttgttcatgattatttcaaaggcatcattcatccaccagcttcaattattctacaccctaacttcaactctcaatcctaattcacttttcattattatcttatcatttctgtgttcaaaacgtcacttcgagttggaatgtattttttggtagcactgttgaattaaagttacagaataataataaataggaataatatccacaaactacataaatttgtaaacaaagagttatttacgtataatgaaaaatactaattatgtttcatgtttaaattttcatatcgacttcaaaatattttaattaatacatttataagttcctttttgtatttcatacaatgaaataaaaagagacaaaagtaaaatttagtgaaaaataaataaaacacattgtgaaatagagtttactataaaggatagattgttatagaatcgcacaactcaaaatgtcaaagaagacattaaattccacggactcaattcggttaaattatcatttgcaataataaattaaaagtaatttgccgcctgctattatgacactctctgacgactacacattttcctttgtattgtcagaattaaaaattattcatatttctggacgaaacaaaaaaaataacatttaaaatctagcgttttcgaagccgtgcaagtcgctcttcttcatcatagctaacttagccagtttctcagccgctctccacgctgatgctggagtcaacggctcaccgttttcatccatcaacgtcatcgtcgtcgtggtctctctctcgcttcctctccgccgttgattatgttgctgctggtgctgactttgatactccattagttgttgtcctctccattgaacttccaccagctctgcctccacgacctttatgtactcagccgcttccaccgttcccgactggccaagcaacgcacgcgctgatgttagcaagtggtatgcgcttgtgcattctccgtattccactagcctccgcgactcggcaacagcccgagtcgctataaagaggcttctaagccgttcgattctaggagaagaagatgatcgaacggcttgaggaacgcggagagattggtctcgtccatatacaacttcttgtgtcgatgggtccttaaagagacctctaactgacaaaatctggtaggccctagtggcggttgacgggaccctaagctcaactagaagctctctttcctctcctgcgtagaggtccccaagccggactgacccggaaccggaactaaccaaagtaggccgtccattacatagataaatggctgagatttcacatggtccagatcctgatccaacccggatttggatcctgagatcttgaaccactacgctaagcaatcctcctatgcattttgcaaaagcttcctctgcaggggcgttactacatccaccgctttctccgaagccatgctcagtaacagggatctcaatgtgagcaaaacgtgttgatcccacgttagttattgttgaccgttgatttgtgtggactttactcaactggccctgaccgtccgttaggagtacgatgctagccaccgggtttctctccctacgatcttcaagcactcttgatgctttttttaatgcctcacttgtgttagaaccttgaccacaaagcaacccatctaccacggctccagcagagcgtttgccgtgttcggtcattctcttcagcggaaggagtctcttgggaaccgtcatgacgacggcaacgatagatagccgatcagctgagccaagcgaggagatcacaagcctcatggctcgtttgaccatttgtagtttcgcaccgttcattgttccacctacgtcaactacaaccaccaagtccaccggtgcacgctgcgacggatctaaaagcctacgccctacaccgcctcttgctgttagaggtggtggcgccttcacccgcaaagccactgcacgagtctcgtaaccacacccaacagagacaaccgccgcttcaggcaacaaactcacctgaacgtttccaaaatctcgaccattgaccggaatctcattagttttgacagcaaaagaagggttcggatccaccacaaatcccttgaactgaggcacgtcatcctcctcttcccctccacaattctcatcagcttcaggtatagtgacaaacctcggcgaaagcaaaggctcatcatcgtcgtaaaatctcgaataatcactctgctttggccttggttttgctctgggagaagacgtgacaacaacgcgcttctcctggattacggaaacagagtcgtccaggggagattcagttgcattcttatgaggaacaaggagagaagcgtctttccagatggaattacaaacaggacaaacaagcttgccctgtttacgaacatagtcggcaatacaagggaaatgaaatgcgtgtgaacactcggccgtatacttcgccgttccttgccctgttttcacactgttcaaacatattccacaagtactctgcaaaaagttaaccaaccatcaaaaacatgcctttataagttatttttatctctttgttgcttaatatgtttcttactctgaatttgaagctgttgcgaaacagagagagttttaacggtgaccgaggcgaagaagggttagagatagcggccaaagacagtcttggactcttagtcgccgatcttggcgtcgaagtttgttccgccgtgggagtttgagcatctgcagtccgacaacgtaggctaggactagaagttgatcggggagttgaaggattacttcctccggatagaaaagctagcttaacgcagcttcttgggctaggacttggggtaagattatagccggtgcgttgcttgtcgagatccggcgccgcggcatcgctgtttctaggggcggtggtgcaaaaggctcgtcgccaaccagtacccattggtgtatattattaatcttgggttgttttggttttcaagatggagaaagttttagaaaaacaagaaaaaggaagaagataaagattgaaagattttggcagagaagaagacaaaggaaaacggtgacagtttcggattttgctttggtctcaattgttgttattatcactctgcatctcagaatgggagatctgtggagttttagtataaaaagatttttaaaatggtttttctttctttattgtccagattccaagtttggactctctctctctgcttcttctcctatgattcctctcaagggtccgatatataagcctaaaatatttatactgtagctggattttgcatttaattcttgggatttctttttgatgacgcgaatgtcgaaaacaaaaagtatttttttttaattgaagaagtctattatgtggacgattttcttttttggacgattttcattttatatttgaaaaagtacaattaaatgaatgacaagaggatattttgatctatgtgatatatcatgtttttgaagacgattttcttcttttatttagcttttacaaacaaataattattttatccgttacatgtttttcatacataaatttaaacgtccaatgtaaaaaataaaaatgaaataaattatgtatgtatgtttgcttatgtgatttcagttttacatagagctttatctttttctatatcatgtttcttttcatatatctaattcatcaaatagatatatgtaatatgtttcgctatataaacatgttatttattagattatatacatatatatatatatatatatatcttgaaagttttgtataattatttattgtattaatttttttggttttaaaactaacataattagttagttacattttcaccaattttttgctagtattcttttgctatttttcaatttataaattttagcaactgttactaacctaaatacttcttcgaatcttgttgttaacctacttgacttttgaccgtctcttttacaacttgtttatactttgtcttcggacctcaaatctcatatggttgtgtcatttttttgttttgaaaaatttatgtcgtcataggtatcgtgaccacactatgtaatgtcaaaaagacccaaattaaagacgttactgtatcttgtctatcgaagtgatccgtccaaacagctatatcgtgcaagcctacatccaaaaaatttcattcacatatcacatatgctacatttaaaccattcaaaaagagtaaaaaaaaaaaaaaccattcaaacaaaggtcgaataacaaaacgcacatgccgcaatagagaattcaacagcccatatgagaaaagatcacaacaaaattttagtatatcccaggctgaagattcgtttcctagaccaagtacataattaaagaggcaaccatactaattaattataattataccgaatatgcatgattacaaaggacaacaactcattaactattctacgaattactactatcattgatcctccttaaccacatgaccaccgtacagtaaatccaaaacgatggtctaaaaaaataagatatgaaataaactactttttcttaatgttttagagaaaaagttgttggaaaacaaatgtttcctatttcctatgttaaagcggtctaacattttttattttatcattttgaaagtcaaactaaaataaaataacttatatagttatagagacttaatttaataaatgttttcaggtgttgcaatattttgcttttattatatatgagcaaaataaaacatgtaatcttttgaagcttatgaatataacagtaacatggccaaaaaaagaagaaagtaaagagcgcacatgtcctgaaatggaagccgtgtttattggggtggtagttaagatgcgacccttaataatacaatcacatgcctcttatgcgacccttaaccaacatggtttatgtatcttcataatcatttcacaacctacctttaattatatagtattaatggtgctacttttttattgattatttctttgatcaatttgtttttgtatcgacatagatattcttttgtcattataatatggattctcctttgtgtcctaccttatttatattcatggcgtctttaagcatttcaatttccaagaaccgaattataagaacttaacgatacatgtatttgaaaagaatatcaagtcaacgctaccaaaaaaaagttatagataatcatgaatactacttttggactattgtttctaatattgagatgaggatctctacttttactagacaactagagaagaaattctagtctcatctttaattatgcatgtcttttattatttattacgtattggtcttttcctaatcatgctaagtgaatagttacttagttgaatcatatggataatgattttatgttgcttttaaaaagattcttcatttaggttgagattattaatatattagacttagtctttcaagtttgaaattttgacattttgttgcacttgtttattaaaaggtttgagccatggaaaattaatgttaagaggctaagaaaattagtaaggtaatattggacatctctgcattgccttgtaattatttatttttagatgagagtttagcaattagaagtgattagcatagtttattagcttcatgcgggtggattaatcataattaagagaaccatcttctaatttctaagccagtgttcagttcaacctaatccgtaattgtttgatatttagttattttttatctatgcataacctttgatccaatgcgtccttcattgttttttaatctcataagtttagttgttttcttttttaattgtttttctattcgcttcattgcttcatttcacttgttactcgtattttatcgttttcttagatttttttttttaaaactcttaactatctagctatgtatagattaaatattggatcttggaagtctagtattgcgatctatcatggtggatatgatcctgattatgaaataagtgtatttacccatgcacttgcggcattataactcgagctataatattacagggaagtattttgtcgtcaatgctaaagctaacattatgattgattattatgtgtcggttagcattcaattagcgatgtgatttactcatcaagttcccaacaaaattccaacaccaactatatgtttacttatttagcaattttagtatagtttttcaacaaaaaataatatttattttcgaggggatgaatgatttccgctgttacttaagagatgagttagcaacatttttttgacgaaaactttcagaattttaaaagataatcttctaaaaatctcttaaatatttgattctttgtaccaacatttccttggactgggcaaccaatacaaattttattttaatatcattttgaggttgacaaagcttaaactaatacaaattaaatttaaaaatttgaagactttaaaaatatattaaaaatcagaaggtttgttggggaatttgttgtaagagataggtcatttcctataccattatttctagggagatacatgcatgaagaagtcttcatactagtcttctttttatcttcataaaaattcatagcagtctttgaacttttcatatcaaagcttgtacaaaacaattatttatgtctttgattttttttatttttgtatattttttttatgtctttgaatttctctagctcttaccaagtttacgtgacctaagaagatatatgttttatcgttttttcagtagcaatcctaggtcccaagttttatgttccatcagtcattttcttgcgtccaaagtcctgcttgactgcttctattgttaatgatgtttttattttcttgttaataaatgaacacattgccataaaatgattaatcatattagaaacttcagaaaaatgaccataaccggaaagtggacgttttcaaaagctatcaagtatcaagagatggcaatttaataatgatgatggtcgatggggccaaaaccatttttgtttcaacacgtcggtccaagaaatttctaagtatgtcaaagttttcgtgttgtttggcaatcttttttataaaagaaagcagtcgaagttttcaaaaagcagtgctctagataaccttaacatatcttaaatttagaccgaccaagatttggaatctacctttgaacataaaaatgctttacacatcgatgacgtgtatatgttatagatagatttagcatgagtatacatatagactaatcagaatgaaacaagtagaggaatttattagtctaagtaagcagttaatgctctctcacctaacaatcagccacgcacatctaactcctaattatctttttttatgtaaaggaaagtcttcataccttactaataaaataataaatatttggttgaaaaataaaataacatgataattaattgttattatatgtttaatccatcaatcaatactgtcttttggtacaaattgtccacaacttcttgaggattttttaagatttaaaggcgtggtcttcaatatttacataagactagagactttggcattgttttttcctactttgatatgaacttaacttctttataataacaaaaaatgaaaagaggtgtaacataaaaaactattcttgcccaaataggtaaatatcgaattctgattacgcaagatgcttttatgttgggataattacaattcgacattagttggttaatggttattcatctttccactcatcatgaaactaaattcaagaatatatagctttatacttgaaacttatgtgtgtttttgattactagattctaattaacgtagaattttctaacatttttcttgtactctgctgccattcaactttaaaaatattgtacacaaaagatattatttctttggtaaaattcaacctagatatcgactaccacgctagttaaagtttttgcatcagttgaaaatggaactccttttaagtttattgatatattactactcttattagtctaagcgttcagattaatgtatcgaagttaatgattattataagagtcatatatacaagaaagtaacgctagctaatcaagagataatgatggtagttaaatgtcaattttgattagagcacgctcgtagacttggttgcacatgccattgcgaaatgttcttgcattcatctattagtttcatatttattatgatactgatgaatcttgttcagataagaattgtacgttctttcaaatggtggaatttgtttgtcaatataaaattttatatgttggaataatcagagagattagggcgtaagatccgtctactgggagtgagtctttcctccgcccaattggcataaatattgaagacaaaacatgaaattttccatcaaattagataaacatataaatagaaaaagagaatcaatgaattttttgttacagtttttaaattttataaattcactactagattaggtaatggttagtgccaaacaatgatcaaactttcaattaaaggcttttaacttcaaaaagtcacatgatccaatggcagttaatatagataaaaatattaaaagctggtccggatctagagaaatgtatggcttcaatccggaactttttaatttgttctaaattcttattagcattacttcagttttaacttgattcaatcattgttgagttatttttcccgcagaaatccagtgcttaaattacattcattagcactatcattcaattaataaaatatgatattgcgttaagcttttatgatattgatttttaattttaaattgctaattataattaatcactaagcatttactgtataaattttgttgaagaaaaaatcttcgtggcattgaacgaaggctggcccaaaatgtttatgggcttaaagtcgaagaaattttgtttggtgcattaacaaatacatttctaaaacatgacatatgaaatgaattaaagtaaggcatgagtgatatgacgatttcatttttcaagaatcattcattcttatgaacaaaagaatgattccccaaccccttcattgggactatttctcactctcttgtaaagtgtactgcaaagagtaattctttaatagtccatatctaatcccatatatattgcaaattaaatattttacctatgaaaacgaagcaaaaccgttttactatttctccttcggctcgagaatgcttatcccacaagtgactttacaactttttttattatttttttttttttgtcaaagaagtgactttacaacttataatttctttattcctttaatttcggatgaatttgtctttagtactaatatcataaatcacttagaactaaaaactgatatactcaagataccactcaaaggtcaatcgtgctaattgaattgatatgctgtttaaattggtattgtatgatataataattaataacgagttaactacaagtagctttatatcgtaattgaattttaatagattaaaaaataataaaaaccttgcttaattctaaaaaaaaagggagcatttagcaacattgaaaaggaagcgttgactaaatcttccacacgaatgggctcgctctgtctcatgcacgcacgtccctggcataacggtgcactctaccacagaggatcattatttcttcttctaacctcagaaaacggaaaagtcgtcgtcttcttcttcgttcccgctcccacgctctctcctcttcctcggatcttccatcttctctctaacagcaaatgactcagtcgtaaccttctacactttctctctctccaatttttcacattttatttttggcttccgagctatgaccccagtgcgtctgcttcgtctcgaccgctgatcggaataaaaccaccgccgagtttcctaggtctatgtgtattgtaatatcctccggaaatggcagctttcctcgtcatgtttatcttcacgatcgctctgttcgtcgcactcctttgggttttcttcaagtatgtctccatttttttgcctcttcatcggcgttgaaatcgtgtttcgttgttttcaccgttttgccagtttctgatttgaaatccattctactcaaaaattgtttcgggaatggattgcgtttcaaattgctggaggaatttagataattgttgttgatttagacaagttttggaacatatagaattgttgagcatagaagaattaggtagatgttgaacgtcaagaatttaagtgtagcatagatagatgttcaataatccttattgaatctaaaattcgtttgatttctcaatcagaattgagtttgatctttggattttcaactctaattaggtctctcccttggattctccggcatagtgctggaataactctcagttttcagtttgatggatggaactgcttgaaggatgttgcattgcaattcaagaaggtttgtatgtcgaataatttatctttgtgatttctgtatctctggttttaactactcgggtctatgtttgttgtttatattatttgcagggttctattgaatctatagtcattggagaatttaaagccaatctaagtcaatccctggttgaactttgtgctacggcttttatccaggaccctaaagttatattctctatatgtgacctgaaaatagttactagaccctcccactcaagtaaaggtccgcgcaaaccaaaaactcggaaatcgagctctggtggcaagggaaagttgatgctatttgctaatattggcagattcttttcagtttccatgacaaatatggtagtgcaggtaattgtagcctgctctgatatccatgaaagctctttttatttggtttagcttcatgataaattccctttcattctgtcttgttgagctagttttgatgaaagcagcatgaatggtagtgatgctactagcttctattgttagtaccataaactaaattataatgaatgattcacttgcaatgatcttcattaattttgatgaaatattatctcactggctatttagatatagagtagtaaaatattgaccacaagcctagatatatttcccatgatgaggcgctttatgctcaaatgactgttagctttctgtgcttctgttaacttattctttatagaagatatacttgtttaactcaaacactgttttgactaggtagaacaaaattaggctttgtagaactatactaaccatcatgtctactggttgttcttattttctcttgcaactgcagacacctaaagctacagcagaaatcaaggagttggagctcgatttatctaaggacagagggtcagggaattttttcatgaagttgtatctattgccgatatttgtacagattggtgaaccacatgttacttccactcattcacctgagatggacagtgacatttgcctcgctaggcagacaccttccaaaaccgcagaggggtcttcttcttcttcttttcattgcgaaaagatctccttgtcctgcgaatttggtcctaataggtaccttttgcttgacatactcatatgatttcttaccccattcacatgtacattttaatcctcatggctgccatattttggtcttcctggagcagaaaatcaagtccaagtataaagaacgtcgaagtagacctagctaatgctgttttaaaccttaacgagaagctgctgttgaaaaacaaatcctcgacaagtgctgcttccaaaggtgaagtgattgattcaagttcaggtaacaccacttcagagaagcctccaaagcaaccaatgaatgttttggttgcaaagcatgcttcaaaattccctgagaaggtgagtgattttttttagcatgagataactgcaagtgtcttttattgattatatatgcacacatatgcatgttgcatcagcatcacttatccaactcatagttgctaaaaacaaatcttacatttcgttaagctacagttagaaaccatgtaagattaatatttgcttctacaatgaaaggagtgtgtgcatatggtgtatagtcaatttttatctgaagtcttactcgtgcctttgactttatgtggtaggttttatttgatttaacgaagcttgaaatcagatttgtgcatcaagaacatgatttttctatcgccaacagcataaaaggctttcaattgagaagtgccaaatctcaatctggtgaagatggcaaggaagacacatgtcttgattttgccatggaactccaggagatgcatgtatgttaaaaatcagttgtcttagtaataatccagtgaaattttcgttttgatgtaccatcctctgttgctgcctttaaatttccctttcatttcagctttttagagaatctgaagtttctgtcttggagatgacaaaatttggagttttcaccaaggtgtattgtccgatacaggtgagtcctctgaattaagacagaagtctttggtaatgcattttttgttgttgtccatgtgcattggttgcttttacaatcggaaatggttagaaaaacagcttatacaatgctccttttggttttatatatttttcacatgtgctgcaattaacagaagggcgttcatgatttgatgtattacctgatcttgatgttcctctcaggaatccttacctgttagagccgaggttgagattaagctgggaggtataatgagcaacattataatgacgagatttgagccgctgttgcgtttgcacttctctagaaagaaaaagatggttctcaaagaggaaagacctaccattgcaaaatcagaaaccactggttttaaggctgtggtatggaaatgtgccacctcagcccctgatgtgacggttgtgctatacaatcctggcggttctcctatataccaagtaagtagaaggcgtgtgtttgctgctgtcttgttggttctaaattcaggaaagtttttcaatatttctttgtttcagtttgaaatattatggttcatgcatgttttgcacgatctttaattagcatcattaaggcgtagcaagaatatttactaatcaacctcaactctgactttaattcttctttttttttttgcagtgcggcttagattcatttcaggccactgcaaataatatgtcaaataggggtacagttgtacagatggagctaaatgaactgactttatgcatggtagatgaacataagggatgtttgaaagaaagcctttttggtttagagtcagatccaggttcattaatcaatataagaaaggtcagatcggaatggggcaagaaagaagtgttacctgagggcgatggttctaagggtaaacaaactctggtggttgacgtatcagaaataggtcttttattttctttcaggagtgttgaagcgcttacagtaaatgcaatatcaagtcaggcttatattaaaagtttaactggttctagtagtaagaacaaacaggaaaaaggggcacatagatcgaagccgccatcgggcagagggactcaactgttgaaactgaatgttgaacgtttctctcttaatttcgctggagattcaagcctggaaaatacagtcattgatgatcctaaacgtgtcaattatggatcacaggggggaagaattataattagtgtctcagctgacggctcacctcgaactgccagcgttttctctactttgtccgaagaacatgagaagttgaagtacataatttcgtttgaaatactcaaattcggatttactctaaacaaggagattcagtctacacaggtagaacttgaaacagcaaaggcgatctaccaggaatttttggaggaacctcaccaagtttccagagtgacactttgtgacatccaaaacgctaagtttgtacgtcgaataggcggtggtaaggaagtttcaatctgttcgctcttcagtgcctctaatattgccgtcagatgggagcctgatgtgcacatatcaatggtcgagcttggtctgcgtttgaagtccctagtcttaactcagaaacttaagcaacatggtaacagaaaccctgaagaggcttccactgtaaccggtgataaacagaaggaagaaccaactactaccccgaattcacttgataagaaaaagaagaaggaatctatatttgctgttgacgtagagatgttaagcataactgcggaggctggggatggggtggaggctgaggtgcagattcagtcaattttctcagagaatgtgggtattggagtacttctggaaggatttatgcttggtttttgtggatgtagaatagtcaaaagtagccgggtacagatatcacgaatacccagcatgccttccacttcatccagtgtgaccccagcaacaggtgggactccatgggattggatagttcaaggagttgatatacatatatgcatgcccttcaggctacagctccgtgctattgatgatgctgttgaagaaatgctgagggctttgaagcttgtaaccaacgccaaaaccaaactcatttttccaataaaaaaggaaagctcaacacctaaaaaacctgggtcgaaaaaagttgggcgtataagattcggcattcgcaagttaatatttgatattgaggaagaacccctccagggttggcttgatgaacattaccatcttatgaggaaagaagcttatgagttagccataaggtcgaaattccttgatgaattaatgtccagtggaaaccaggttcctaaaactgggggagatgagtcagacggtgagaagaaaatttctttcgagggagaagaaattgacccacaagatcctgccattatccagatgatgaatgaaaaattatataaacagtcgttcagttcatattacaagtcttgtcaaagtttaagactttcagatggttcaggtgcctgtaaagaaggttttcaggctggttttaagatgagcacttctaggacatctctactttctgtctctgttactgatttggatctaagtttgacagctattggtggaggtgaagctgggatgatagaaattgttaagaagcttgatcctgtagctgaagaaaaagacatacctttttcgcggctttatggaagcaatcttcggttaaacactggaactctcgctgttcaaatacgaaattacacatttcctcttctctcaacagctttcggtaaatgcgaagggtgtcttgtgttggctcagcaggtaagactgcccttctctctatagcaaatatcatattatttcccctttgtttcaaagctatcctctttttttctctgtgataaagagtttctggaggaagcttgatgttttctacagattaattcactggaacattatacatgcatgaattgtcgtttcaaatgatgaaaaatttgttcccgcctgcatcttttgttttcttctgtctgcttttctttttgtagtcttttcttccctttaaggttctttagtcttattcctataaacccttctcttattttgacgtaggcaacagcttttcagccacaaataatccatgacgtatacataggaagatggagaaaggtgcagatgctccgttcagcgagtggaacaacacccgcaatgaaaacatatcttgacctgccgataaaattccagaaaggagagatctcttttggaattggatatgaaccagtacttgctgatatcagctatgccttcactgtggctcttcgtagagctaatctcagtctcaagggtcctggtcttcttcagcctcctaaaaaggagaaaagtttaccatggtgggatgaaatgagaaattacgtccatggaaatgtaaccttgtccttttctgagacaaagtggattgttcttggtagtccagatccctatgagaagcttgacaagctccacatgacctctggctctgtggaaattcagcaatatgatggtcgtgtgcacttctctgctgaggacataaagattttctttagcagttttgaaggtttggctaggcattatccgaactctccagtttgtccatcaagctaccctttccttgaggttccacgcttcagtctggaagtccggatggattgggaatgcgagtctggaagtccactaaatcattatctgtttgctttacctattgaaggaaaggctcgtgataaaatctatgatccgttcaggtctacttctctctcactacgctgggatttcactttaagacctgagaacccatcagtatctgcagttgatcaaacaaaaaaagttggatccgagtgtaagcctgagaaatcttctttttctccacccacaataaacattggtgctcatgatttggcatggttgatcagattctggaacatgaattaccttcctccttacaaactacgcacgttttcccggtggcctcgctttggagttccaagaatcccaagatcaggaaatttgtccctagacagagtgatgacggaatataatctccgtttagatgttacacctatttgtatcaagcatatgacactggattctaataatcctgccaaaggcttgacatttgatatgaccaagctaaagtatgaaatctgcttcagccgtggcaaccaggactttacttttgaatgcaagcgtgagactcttgatccagtgtaccagggaatagacctccatttgcctaaagcctttttgagaagggatcagcattgctcaaagccagctcagatgagtcgaacaagttcactatctggatcaactgatagagttacttctgataatgggacttctaccagtgatggcactgagaagcatcctgacgatggatttttgttttcttctgattatttcacaatcaggaggcaggcccctaaggctgaccctgaaagactgatggtatggaaagaagaaggaaaaatatatcgtgaaaaagtagatgcaagatctacaaaggagaaacagagtgaacctgaggagaattcacattccgatccgagcgatgatgatggatacaatgtcgtaatagcggacaattgtcagcgtatttttgtttacggactcaaactattatggaacatagaaaacagagatgctgttttgtcttttgctggtgggatgtccaaggcatttcaaccacccaagccttctccatcacgtcagtatgctcagagaaagttacttgagggcaaccagaagcattctgaatcagaagtttctcaagatgaaccaactaaacagccttccacaggcagtggaaatctcgcttcccaatctaaggagcctgcggaagttctttcaccttcatcagaaccaattaaaacagagaactttgcatctttccctcttggtaagtctatatcttaaacctttggtagttaaatcttaattcgtttcttatttgcatcatatgttccatcttattttccttacatacatgtatgattcaccatatttatctatctcgatgcaggagccacaaagactggcgattcaaatgatccagaggaagaaggaacccggcattttatggtgaacgttgttgagccacaattcaatctccattcagaagacataaatgtaagcatagatcaaacttgagtctttactacattacttctgtatgccattcaagtttagaagaatgcatgataacttgaaaatttgtctttattggcgttatttagtaaagcattatcaccttgtagttacattatgttactctgaatgttgtcctgtacgattctttcaattcctggacagtttcttccatatcttgaaactagataaaactgtaaatactaactcttcaagtgattctgataaagtaagtagaatacttacagttggccaggtataccaaatctatgatatgagtttattgatccaagctttagagttgaattttgtatccgtaaatgttttcagataccttgcagtgttttttaattgtcatcactatttacattctctcttcatctaccagggtagatttttgctcgctgctgctagtggccgtgttttagcacgatcatttcattcagttgttcatgttgcgtatgacatgattgagaaggcagctcaaaatgaaaatgatcataatcctgaaaatggcactgacatgacatggacacgcatggaagtgtccatgatgttggagcatgtacaagctcatgtggcaccaacagatgtcgatccaggagctggggtgcaatggctcccaaagattagaagaagctccccgaaggcaaagcgtactggcgcactgcttgaaagggtttttatgccgtgtgacatgtactttcaatataccaggcacaaaggtgtgactcccgacctgaaggtaaaacctttttttagtgaaagcacgatatttgtagtcttttcttcttttgggatgatttatatgcatcagcataaaggcattaagttcaacagagcctctgtagtcgaccaaaaagttattcttttgttctcattatacacaaaagtactactgaagagcatttctacaattgttcatacactaatgtgtaatgttactctcacatatatttcacactatgcacttctcttgcactcggagttatctgtgtatcactcttttgtaacattgtttgaatgcaagacttatattattatatgctgcaggtgaagccactgaaagagcttactttcaattctcggaatattacagcatcgatgacatcacgtcagtttcaagtgatgacagatgttttgtccaatcttttgtttgcaaggttaccaaagtaagtgtagctgtgtgcaagttattgtcacttcctgaattttatgctttatataaaaaaaaattattgttaaaatgtagcacctgactatatcgtattacaaatgcatatgaaattcagggctcataacgacagtttaaaactttctggtgaagaagatgatgaagttgaagaggaaattgatgaggtagttcctgatggcattgaggaagtggaacttgcgaaaattgaacttgaagcgaaagaaagggataggatgatgcttcttgatgacatcagaaaattgacgcagaacgaaagtaactcaggaaacataaatctcgaaaaggaaagcgatttctggatgatcagcggtgggaggccagtattggtgagaaaagagttctataagaagtaaacaaaaacaattctacagcagatgatatatggtgaactaagtgtctcatatgtaggtggaacgactgaggaaagcgtatctcagtgtgcaacagtctaggaagacagcatatacagcactgcggacttctgtgaagaatgctgcggagctaaggctgttggaaaaagataagaacaaaagaccatcctctgccatgcgcatatccttacaaatcaacaaagtcatctggtctatggttttagatggaaaaacattcgctgaggttgaaatagacaatatggtaagcgatcgaatataatagattaatataccttggcggatggctggtcgagcgttttgtgtattcgttatttctctggatctttagtaacaactaatcattgaacataacttttcttcagtttactgctgttacttgctagccttgggtgttcaatttagaccaactctgttttctaaatttttggcaagaaaatccctaaaatgtttcacactgcttgcagatatatgattttaaccgggactacagagatattgggattgcccaattcacaacgagatatgttgtcctgcggaactgtctgcctaatgccaaatgtgatactgttctatcagcttggaatcctcctccggaatggggcaagtgagttcctttcttttaaaactagcacaagtaattttgatcaaatttatctcctacattcatcccttcatagagtatttttcaatcttggctctcgttttccatattcagctagaactagttatgcagttttcattttacacatctttgaagacttgtagataattcgtgaatggttgtgtgcttgtaatcggtagatgctctttccgcactactctttttcatttttgttagtcgtagaaactcactgtggaaaccaaactggtttacagcatcaggtctggaaattctaaagtgttatatttattgaatgcaggaaagttatgttacaggtagatgcaagacaaggagccccaaaagatggacaggctccgtatgaacttttccaggcaagtcgttctttaccatacatgttctaatgacactaataatataagactgaagtttatactctatttactaaaatggagtttttttgtgttcgcttgacaggttgaaatatatcctctaaaaatccatttgacagaaacaatgtatacaatgatgtgggagtatatctttccaggagaggagcaacattcacagagaagggaggtttgttgtttatccattttacttctctagctgatgggatttagcttgctgctaaggagttatgacacgtgcttgtattttgtatcccaggaagtttggaaagtgtcaacaacctcaggatcaaggcgcaggaaaggttcattcgctcaagaagcggcagcattgctcgctgcatctgatctaggccaggtgaaattttttagcagctgctacctaactcttttattcttacattcatatcatctatagaagtcttcatacctattttcctaaaatgatttcaggggtcaaagaatcaaagcctgaagtcaagcacgatccgtggatcagggcgagaactgagaagaacatcctcttttgacagatcatgggaggagactgtggcagagtctgtagctactgagcttgttctatcttctatggagcatcaaggtgaatcctcaaaaggcaagctgaaggattcaaaaacttccaaggctggtggccgttcagttcatgaagaaaaaaagggggaaaagtcattagaagacaagaaatctaggcctcaaaagataatgcaattccaaaccatcaagattagtcaggtatgtcagttgattacctcatctaagcaaaagttcaagaagttttccaagcataataaacttaactgtcgtaatatggttctgagctaggtggaattgttgatcacttacgagggctcaagatttgttgtgaacgatatgaagctttgtatggacacatttcatcgtgttgaattcagcggaacatggaggagactcttctctcgagtaaagaagcacataatatggggagtcctcaagtcggtaaccggaatgcaagtaagaccatttacaccagcaatcgatgcatatgttttacgtctccctgattaaagaaaactcatgtttcatttggtggtatttgtagatgaagaaattcaaagacaaagcccatgttccaaaagatgatattggtttgagagacaaagacgagtcagggagaacagatcaggagtcaggggcatgggtgaaacgtcctggtgacaatgcaggtgatggatttgtcacatcgattagaggtattttcaatacacaaaggcgaaaggccaagaaattcgtgcttcggacaatgagaggggaagcagaagacaacttccctggggaatggagtgacaacgaatcagacttctctcctttcgcaagacaattgacgattactaaggctaagaaactcatcaggcgtcactccaagaagttccaaaatcaaaacactacaaaaggtttagtattattgtaaaatcattcgttgttgtcaagttattagttgcaaaaccaagataagagaaagaactctatccgttgtgttgtgttgcaggttctaagaagacccaactctcgcctacgctctctccacccaaggaagaagaccaatacgaatctgactcttccagtggatcgtctgcttacgaagagttccttgaccagaatcagatttaagatagaattcaacattttgtttcttataaattttgtaaagagttgcagattattacccccatcacgtctacactcttttactagcgtagtgttgataagactggtttattacatatgactggacatagaagaagaaggttttgtttgggaatcatgcatattggagacatacgttagagtgtcatgtatgtactgaatctatttagtgtaagcaacaaactgatacacaagaacagatatataaacaagaaacgtttcaaacacatctctagcaccataacttgtgtatttatttatcttctattgtcacaactacacgatcttgcctcattccacaaaggtgtgttccgtctgatgaagctgtctcacaagtcaggtgttcaagcacatgtctgatgaatatcatacctacctgttgtccttctaactaatcaaagctagaaggtagatcaaattctgaatcagatggattagccagattggcaagaggttcctgcattccccaaaactacattactatgatgccactcgatgaacatgggctatcaaagaaaacttttatcaataatcccaagaatctacataaacagcacccacgtacctcctgttcattacttttacttgttttagaaagaagtatcttacctgatcatcatcatcatcagccgatgctgacaacatttcaacaggcaaataactggccaaatcttcatctgcttcttgcaaaccctgtcccgaaaaaaagaactccgataaagaataatgtgcacaccttcgagacaataaattaaaattcactagaaaggcttatgcctaaaaaagaaacgactaaaactacatagaagacaaggaaatgttacatataagtcacgaaggtccaccgagtaagaaaacggtatgaaggagataaggaacagatgattttcaagtcacagtatgcaaacatgctgatttcaactcataatagaaaatgaaaagatcattttaagccccctctcccttaatatgaaccttaggcgctaataagcaagtcatattaacgtttaaaattgtattaaaaagtgttcatgctgatttctctttttctcctttttatcgttgtcatatactcgtattaacgtttaagaaaatcttagacgctaagccgctaagcatgcgatttcccagtgcctaaggcctcatcgaaaatataattgattttaagcgatttaagaatttatatataaaacaatatataatatgatatcatatgtaaaataaatatataaaaaatatctattacaaataagatattagatcataaataaaaattaaacaacatatatatttaatttatattaaacatatacgaatatttataactatgtatatgaaaataaaacttcgttcgacattggaaaatacaaaaaaatgaaatttatacaattataatcggtctaaacggtcacatctgagttcctaacgtttatactggtttttagaacactcgtcatgtatgtgtaagccaacgtgtcttttgtggatatattgccgtgccttgcgtgtctatggactatgatggtattgtgaaatattaataaaacgagacttggaggaaaaaaagattgagttctcccacggcagccgtaatggacaagtcaaaatcatagcaacaacaagatcatgatgatgatgatgatcctttacttctcataaacctaacaagttcgtcaacataacgaatattctcatccatgttcccaaacaaatccttcatcactttagccttagcccttatctcctcgccagcatcatcaatcatcaccaacctaatcgagtcagcgaccgagtcagaatcaaacgacccatctctctcatctcttgaaacctcaacaccaagtcctttcccatgcaacaacctcgtattaagtccttgctcattcaacaccggaaaaaagattggaactttaccaaaccctaacccttccaccactgagttccaaccacaatgtgtcaagaaccctcctactgactcgtgactaagtattttcacttgtggaacccaaccaacatgaaccattccacgtcccttgactcgtgttttgaacccatctggaatctttggctcgttccttaggacccaaaagaacggtgtctctgacttctctaacccaagagctagctcagttacttcctcatgacgaagactcgcttcggtgccaagtgacacgtaaacaactgaattaagccgttgcttgtcgagccacttctttatacgaacccatgtagtatcaacggcatcgtcgtcttcaataaccggaggcaaaaacccgattggaaataccggtttacggtacaggtcttttagtaaaccaaaccattccggttcaaactccggacagctacggacaaaaaccgcatcgctttcgtcaatcgagtaaccaaaccgaactgagtcagagactccggttacatcttcctctgtcttctcaacgtatctagtaacttcatgataacgaaacacgatgtttgacttgaacgggacccacggtggcaccaccgtgaaatcttccggcgttgatctaatttcttcaatcaaagacgaagacggtcccatgaaacagagagtagctgcgttaaagagactaaagaaagccttagagattccaagctcggccgcaatagaaggaagccagtgagaagcatagtcgtatatgatccaatccggagaagaccgtcggagaaactctttcaacggtggctgaagaagatcaaaagcggctttaagagactgttgcttgttgtaaggaacgtccatggatgattctgaagaaggaggcaagcctgagatgggagggagagggaaagagacgaaggtgatggaggaggcgaggtttgattgtaatttaggaagtctttcgatgtttcttggtgttgatatgaaagagatcttgtgacccttttgagctagtaacttggagagacgaagaaaaggaaggagatgacccatagctagccatggaaacatggctacgtgcataacttcttctctcttgtcgaccatttttgttattctctgcacatcttcaataaagcatggacatatcacatatattatggaatcctagttacgtatccactacgtgatgtagaaaggaatattcatgaaatagatattagtttaattttgtttgttgaccaaaaaagaaagaaaaaatcatacgtaattttatgttattttaaacctaaaccgcaaattagatttcgttaagtttataactatactatcaaatttattcaaatttatatgtatcatacattcagtcctgcatgcattacaacaaaccttaccacaaatgatatgtttttcgtgggaagatattcaaatttttaaaaatagttcccaagagaaaaaaatgatattgaaaacgaatagcgttgacggacagttggtagatgaattgtatagtgttaaccaaatagtaacatggataagttaataatgatgaaggagaagaagataaaacttaaaagagtgaaaatgaggccaacaagagagatgtgaaagagaccgaattgattcatagcacactccagatttgggaaatgggggatgtccctctccctctctcatcatccattccccacttgtctcctccctatcttttttttctctctgcatcactaatcaaatcaggttttagaataaattctacatatccaatgactatatagcaagtcactttaaaaaaaaaaaaaaatttaaattttatgtcgttgatactgtattctaaaaaaactttcataaagtattatatttttgtaatagacgaagttttgatcaaatactatattataatatagtttgaacccaaaaactttattaaaaaaaaaaaagaagagagtgtgaacccacaacaaaaagacacgtattttgttttcttcacttgcaattcccaactagcggcgccgctctcttttcttgctttcaaagctcatcttccttcttccctatcctctcatttctctttttttctttttatagaaaacaaaaccatttcttttaataatattaaaaacaaataagcaaatacttttccattttatactttatacaccataccatttcccaaagggatttacgaaaagtccctctcctctatcatctctttattcaccccataccaacaacctctacatcttcttcttcttcttcctcctcttttattttctttttaaatcatttacacaaaaatccaaagacaaatctgaaatctctaataaacaaatccataaaataagaaaaacaaagatgaaaggtgaatacagagagcaaaagagtaacgaaatgttttccaagcttcctcatcatcaacaacaacagcaacaacaacaacaacaacactctcttacctctcacttccacctctcctccaccgtaacccccaccgtcgatgactcctccatcgaagtggtccgacgtccacgtggcagaccaccaggttccaaaaacaaacctaaaccacccgtcttcgtcacacgtgacaccgaccctcctatgagtccttacatcctcgaagttccttcaggaaacgacgtcgtcgaagccatcaaccgtttctgccgccgtaaatccatcggagtctgcgtccttagtggctctggctctgtagctaacgtcactttacgtcagccatcaccggcagctcttggctctaccataactttccatggaaagtttgatctcctctccgtctccgcaacgtttctccctcctccgcctcgtacttccttgtctcctcccgtttctaacttcttcaccgtctctctcgctggacctcaaggacaaatcatcggagggttcgtcgctggtccacttatttcggcaggaacagtttacgtcatcgccgcaagtttcaacaacccttcttatcaccggttaccggcggaagaagagcaaaaacactcggcggggacaggggaaagagagggacaatctccgccggtctctggtggcggtgaagagtcaggacagatggcgggaagtggaggagagtcgtgtggggtatcaatgtacagttgccacatgggtggctctgatgttatttgggcccctacagccagagctccaccgccatactaaccaatccttctttcacaaatctctttctttctttttttgtttttttttgttttgtgttaggatgaatcaagaaactagggttttttttttttgcttttgatcatgaagaatcgtttgcttttttatctacttagattttatttttgtatcagaattgacatatctttccacggtgtaatctctctcaaaccttgggtttatggttttctttagcttgttgcggaattaatttgatttgactcatataaatatgcttccaagtgtcttcaatcatattctggagaaatttaaatatttatctctaatgattgttttcattttaatactcttattgtacaattatgcttctttattggatcttcaaagtgtggtataattaatacgtagcaattagctataacgtttaagaaagctggctattcttgtcttccacaccacatatttgactgcttctcaagaaagcgggctactttatcctctactacaccatcaaccttacaattttggcggcattgaccatatactttttgttcccataacagttaaatacaaaaagtaaaaaatgtacgaatcgttcgtcatatcacaggtttgcacaattgcttttctttccaattactcgtatgtatttattaaaaaaatgtcatagacttaaccaaaaggataaacatgttaataagatgcaagtatgactactccgtgagagagcgcgaatttgtttttgtgtttataagttcaaaaaaagacaataactatccagatacgtggtcaaaaaaagacaataactatgcatatacgtggtcgtgaagcattgatgggatactgtttggctttgtctgaatgtgtcttgatgtttggattcatgtccctggtctctctcatatatccagaagtttcaagactatacaactgcaatgtctgcaaaaacacacatatctatatatataaacacattcaatacccacttgtcttttcagtgccctctcgctttttttacatgggggtttgggtttgaaacttcaggaaaggagaaagaaacgtgaactaaattcgacaaccttttctttttggatgtccattttcctttccttttttgacatcagccatataaaataataataagtatatattttaatttgactctatcaagtatctactaaatatgtttcaattagaatagcaccaaaaatgattaattccgattatcccaaccggggggaacatagtccacgaaggtaaatttatgaaaacgaagtctagtactatcatcagatatataattaaaccttagagattaaaactactggaatgtaaaaaaagcgcaaaagagtggaataaaatatcaatgataactcttctaaataagtcgaggatgcaagatagtcgttcggataaatgctcttgttatcgaaaattgttggatgagtgttacaaataagaattcaacccctattcatatcaaaatgaatccgaaacgaatggtaagaagaattcaatcaaatggtaattcagaatgaaaatctaaagtaaactaaatgatcaaaattaaataaggatgacttaatacgtgtaatccataatgatcaaattgattggggaatattaatgaatataatcatagttggtccttcaaaaaaaaaatccaaaaattcacctcaagcctccaaagttccaaacccatgtagatgtctctcaacaaacccaacccacgaaacaaaaagataaaaatctcaaagcccgacccaatttattcgataagacaagaaaacaagtgttattatttcttctgctttctcaattatggtctctgtccaaaaagattatactatagtaatagttttgtgaagctttttttaatagcatagcaattcgtagaagaaagaacaaccaaatgtcaaaaatcttgttttaaaaaccaattagtttcacgtcacagctcacacataataaaacaaaactccattttttttttataacgtgaaaaacaaaacaaaacaaaacaaaggaagagaatttgcgcgacaacaacgatcgatcagtcgtcgtcttctcagatcttgttcttcaaaggattctatgccgcaagagcttcgattgtatcctctctgaggattgggtaatacccaataccatggataacaatagcgagcgcaaaggaaaacgaatcgataaggataatattcgtgtcaagcggaaaactttgcaagctttgctcaatgattgccagagagccctcgagttattaaacttagccgaagtcagttctgaagacgatgaagatgataaaagcaccggcgagggaagtgggtcacaagagagcaggggagaagtttcttcttccgatcgagaagatcctgaagctgatgaagtaagtatatgcatctctctgaagaggaattgtgaggaaaatttgcttcaagctttaaagttcggaactttttgtttatcaaataagtgtgcgttgaattttggtgaatgtgtatacatcaacattttataatgatgcgtcatatgtttgtaatgatacaataatgtcatgactttcttcttccttgtttcagttatatgatctcatcaaatccagggttgaatgtgatgacttccttgaaaagattgagtcagcccaggtttcagcgccgcaacatcttgctggtgaggactataatgttttttttaagcctgtttgctcattggttgtatagatgattgtgatttctggtgttttagaagatagtagctcttgggatgtagttagtgaagatgatctttgggatgatgaaaccatggctcaaagggaagaagattatgtccttgttagagaagaagatatagcagagggcattgcatgtttcatggctacttatttacaatcacttaagcagacaaaggtatctaaagtcttaactttcgttataatttgttcattgtatatcagcctttcatttgagtttatacaagttgccatcattgtgcaggacttgactcctgagcagcttcagaaaggtattctcgactcttctgtcaaccttcaaatgctgtgtatctcaatgataagtagacataatagttggctgtaacataatagccacgtcactgttgctaacactcaaattcagaacagatagatctttagaggaaatacggcattggacagactggtaaagggcattgattgttcttgggaatcggttttggggtttgagagggcataggaaagtaggggaggctcaaggattcatccatagattattctgtggttagatatgtgttctacaattcagtaagaaatagagtttaccggttccaatcttaaaactcaactaggaagcttgttattgcgctgacacaaacaaagaccattaagtcgccaagttattttctttgatgttgattatgtgtgaagttgatcagtggtggcatatcagattagtagtaaaactgtaacattagtgtttgaattgtaatgtagcacttagcaggatgttctcagtgaagaatagaaaggggaaacttcggaaagcctgggatggaagtaaggttgcttacaacgtagcgtcatggagcgcaactgttatagggtataatatcatctagtcatcttctacattgcaaaatctaatagtcccattgtttatcgttctcaccaagcatttttattttgttcatttcaccgacaggatctatcaaaaccccgtgatcctgagggttgcatcaaaggccttttgggcgtcatgtcatgtaatatcgaagctcgtttgattgacgatgacgccttctcgaacacatctcgcctgtgtactgtgataacagtttaatttgggtttctccatgatctctgtgaatacaacttcatcatgtataaagaatgccatatgtaattccgttctttactgcaatattctttctgcatcatcgtttatatccattaaatgagtaaatgcatgctagaatcacgtattttagtagactacagttgttattccaggttgatctcacacttgcacaataaaacatagttaaaagtttaatacagttcattaaattgtttatcaaagaatacaagtttggtatcaaacatatacagagtaaaacgcatagatatatatgatatctcacaagaacaaaacagcaacccaaaaaaagaaaagaaagacaatgcttgtggtaaagtaacccaccccgtgtttgtatctagtaaagccaaatgaaatccttagtagtttggttatggctgacttgtgtttagcttctaatcttctggtctcacacccaaatccttcttacctcattcattttttttggcagcagcgacagaatcacacaagtctagctttctcaaggtttccatggtgctggtggaggtggtggagtagggaacaaaggaggaacagctgagaaaatagtgtttttgtctatcttaccggtggcttcttcttcacccgataatgccacaagagctgcgactagaccagcattgcctgcaagagtcggttcagtgtagttgtagttcatacggacatcacggtacccgtcgcgcttgtcaggaccagcaaccatggctccttcaatcgtgtttgggtttggtttcttgctgtctctccatttccatcctcctttgcagttatacttgactttgttcttgggtatcgaagctcctctgtgatgcacatgtcttgggtattttgtgccaaaaccaacgacataactcattttccgagggtttttacccagtatataatcaatctgccaaaatacagcaaggccgagttaaatccaatttagatgtcaaaataaaaaatggagtttaaaaagatcttcgtacaatcttggttaaaagtgtcatttttggatcttatccattactatatctgagattaccatttctgtaaagagtaaaggaaaagaagcaatacctgggatctagcaaagtcacgtagcacacttgtcgaatagaaattaggtccacagtaccatccaggagtatcagcagcatccagataatcactgtatagagtcgctaagaaagctgcatttacagaatattgcagcggctgtggagctccatgattcaactctattaaacctcctgcacataccaaagatttcattttagatatctgaaacaagaacaagccccacagttggagttttattagaggcagacattaaagctggaaggtaactaaccattggttctgttaaatttgttgaaaataggcaagtatgagcacatgactatgctggtctgattgtggaaggtccttagaatttcttcatatggatatccaggactcagaaacaacctcaaccggctcaacagcaactaaaatcgcaaaagggattcaaaagagtcaagagtagtatggttaaggcaaatgatcaagaagacatgaatatctaagaaacataaacacagcaggttgttatgtgtggactgacctgagcaccagcaagcttgttgtcccagctaaatacaccatagtaagggccaccccagaaggcaccagcatgcttggccatagtaggttgggtgattagattgagatacgttacatttccggtagcataatacatccaagcaccaccccaaatgaactcatcccaatacatacttgaattatagaacttgctagattccgcagtgcctgcactatatctccctctcctcgtccttccaaactgatacaccaccttagcaccatggacaagctttttagaatattccttgttatccttgaatacaatagatgctgaagccagagcagctgccatctctgcagcgagatccgaacatccaccattacaagtagtcacgggccttttatagtccatatcctcaggtcgcatccaacagtaatggtcattaggatctgtatttccatcatcagtattccctgatccaacctacattaaacatgtaacgagtgaacaaacaactcaatatgaaagatctcctacgaaggtcataaacaagtacctgtgacacaagatcatcaatggaatcagcagtactattgaaagtcttgagaaagtaatcagttccccatttgataagctccttaacatgagtgagctcaccagcagcttcgtatttagcactatattcaataacactccagctcaacatagtcatagcataagccatggggaaattgaacttgatagcatcaccagcatcataataacctcccaccaaatctttatagaagcttcctgtttcacctttcccatcttgaagcccagaattacctctccatgacacgttattatgctttggcaatttcccagctacaacaatcaaaatcagacttagatctaaaactctatatctaaattttatcagatctaagtagattctacacttacatttctgagcattgaagaacttaagagctttgtgtagagctatagtataattatccggcggcggagtcttaggatgatgacgcggcacagttttaacgatcaaggtaatgaatccggcgagtaacgcggcggcaacaagagtaccaacagtccagacgaagatcttgcggctaacgataatacaaccgagatcgacgtacttcttcttcttctgctccgttggaccaagtaaccaactctgctgcgtctcatctagtggacgtgaaagagccgcacgatccaaatcgtttaaattccgactacgatcatcgtcggtggcggaatctgcagtgtttatctccaatggacctccccatggatctcttccgtacatgatgatgctctctgataaagcagcagagaacaacaacaatgaatcaaaggtttgggatcagatctggagaagagaagagaagagagaaagaagtaaaagtgtgtggaagtgaagaaatgtgaagctaaaaagctctctctagtcaataatgtacaaagactctttgagagatctggttttggttttttactcttttttttttttcctttttaaaactcacttcaattattttgttattatatgttttgtttggtttatttgtacatgttacgttacagctaactctaattttggaatagtatatttttggccaactatgattgagcgttttggccaacttgtaatcttgtgtatttatttttcatacaattaaaatttgtcggagacattaaaatattattttttatgcaccgttttttctaacaaaaaattgcatatactttgtttactagtaaagcaatgggctaatgtcgggtggatggaaaaagacatctccgctaataaactgtcggtgggatgataattttattttatcctttatgattatggtgttttacacgtcatcatttctggtgggctctaagtaatgacataatttttaaaaaaaaattataacaaggaaggttacttaaattctacttctacttgaaaatgatagtctaccacaaaatttcacttacatttgttaaaatttaaaacttataagataagtgtgtccgacaaattgatggtagatcaatgacctaaaaaaaaattacatcttgtggtcatttttacgactctaatccctcacagagtaagtaaggagaattatgagaatctaacttttaatttgaaattaaatacattcgtaattatagaatctaatccctcatatatatatgaatatatctctactttaaaaaattccgaaaatatatgggcagctatgtaattataggacttatcagcttgcatttaattaatattaaatgtccaatgtagaaacaccaacaagtgtagaactagaaaccatagatgctcatacatttgatttctactttatacatcgaaaactgaaagataaacatacacatatcaaccatagctgtttccatagtacatactgacagagattacctaaaatatatgcatcaatttgtcttcgaatttccttccataatgttctttggccttgaaagcatcgttagagatcgaaactgtggctgttgaagtggaaaagaggatgattcgccgatcgccagatgctatgtgaccgtatttctttggctacggtcgtctgaagagtcgctggaccgcatactatcactccaacatccacactcccccatttcccattcaatgactcaaatatctctgcaattacaaaataaaaatattacatgaaccaatcaaagatttaacttaaccgaatcgagccaaatatctacaccaaaagtcggattcaagaaccgaacgaaaccgtgtcaaaccgttccgaatgatttcagtttctataattttataaataaaaaaacgagataactggacttgacaccgctaattttgtagtgtatacctctaaaggccggtctggtgccataacgaatagtggtgtaattctggacatcttcttctattgccaagcccttaagctctgctgcagatggattatgggtttcttctccattcaaatctaccttgtcgttgccatttgcttccacttcaccggttttgtgttcccagcgatgccagaaaacaaccacaagacctccaaaaatcaagacacttgcaaccatacaaccaacaaatagaagtcccttgtaccaccacgttgttatgttgtatctttttatgtaaaagatgtccaacaatgtgatcattgaaataaatccaatggtggatataattagatagagtccagaccatatgttatcccctgtaccaactagtaccgacatagaacatccgttggtccgtggtagcttgacagaaggatgcaccaccttgtgaaccatcccatcttcctgtataaccatgaaacattaaagagttcaacaagcttagtaaggcctattgcagctcccaaaagacttatttaagacgtaccaagcgaggctcggattgtcgagtgatatatatgtgaatctcaaggtttagtttcttagagaagaaagggcaaatggaaggtatgtcaattgctgagagcagagagagctcgtctgagtttttaatggcccatacaactaaaaccttactaggtaaacaagctttcccatctcttttacggtgtaggatatcgcttaagatggcgaaaaaaggcgtaatcccgattcctcctgctactaagaccaggttctcatacctgcacccgcaataaatctttcttgagttaagctaaagcttatggcattgaaaaaatttcaagtagacgaaatgcattacgctaaatggtatggagattcatggccataaggtccctccacacaagttgtgattttaggatatgactgaggagaaatgagctgatcttggttctctgcctcgtatagatttgacaactggtctctaagctttgcagtccatccaccaagaacctttatgagaaccgcaacatgatggttcccatctagagggcttgaagaaacactaaatggatgccattgtagccaagatagttccctcacttgaagaaagataaagctaagcgcattgtatcgcatatctgatttttgcggtattgaagaagaaaaaagtcagtaaatgttttagattagaggtagaaaacagagaataaacagagttgttacttggtggttttgaaaggactagttcaagagttccacaaggtaaactctttgcagagattacatcaacagtccttcttgattggcagaacctcaagaagcggtctagaatgaaaagaaatattcctccagcaactatactaaacatgtaatcaccaacatgaagtgccaagaacacaataaagacgatgtatagttgatgtgtgtagaagaagagctcaaagtaattctttctcacggtgtgaagcgatgtgacccacatcagtaaacccgccactagactgataactccgggtaagatagcaattccgatagcattccatgaaaatatctgagaggagtaagtagttgatgatgatgaaactttacaatagaaaataagaagataaaattgtgacttatagagtatagacctatcttgaaccgatgatcgacactatactatagtagataaactaggctatactattatgtcaagattcaatgatgttgtaggatcttacaagctctaaaagttgaccttgaatgatccatccaacaacataacagaggccatgtaaggagaagaaagccatggtgatatgaccaagccaaacatgatatcttgtagcatgttcaaaagggatatcgataagacggagaagaatggaacctctcgagattggaagaaacaaaaaaaccatacacaacaatccaatcattcctaaacgcagacccgttacctccaacagaagaatactgaaaatacacacacacaaaactaatgattggaatgagaaggaaaaagacaaagatgggaaaaaaaaaggaagagttttaagaaccttcgattcttgggaaggacgtggaagcgttcaagaaggtcaagattcctcaaggtataagcatagatagaccaaaggaaaaaaacagagaagaccataattccaagaaactcagctgcagaaacaactccaaatggtccatccacaagaacagggaatgtccatagcctaaacctcgggaatttcgatatcttcttccttcacaatcatcatgacacacacatttatgcaagaacaaaaattgatacaaccaaaagaatgcaattggggatattattacacgtacttagtgaagaccttgtcttccccggagataatgagatagagagaagctaagacagagatgacaagaatcggacaactgaaaatcaagaacatggttcctgcaaatttagacaattaaaggatgaaattagttacactttttggacatgtttccgtagaaagcaaagcatctgctcgttaatgtaacctgtggtgcctaggaaagtcttggaggagacaaatgtgaggaaatcatcaccgagttgttcagggtacatcatcataagaaaaacaacccaagtcacaaaaatcatagacattacaactttcaatatccatttcaaagatgaagtaatcacagatgatgatgatgatgagtccttggacaaaagaggggtttcataatcatccatctttatttgaatttccacttctcagtgttgtgatgagaagttggctcagaagcagcatcggcttttaaggtggcgttactagagataaactaataagatattcttagaagagtcaagtaaaattttctggaccattgaggtttctatcattctcatttatgaaagattccttcggacaacaatcctagtacacaataaaaaaaactataaaaaaaaatgagagtgtcattaacacgtgagagtaacgtacttgggagagagtgtcacgttaggttgatttcaaccacaattaagggtaaggtgagagactgagagtacttactactttagtatagataagatggttattatgacgactatgatggttattggataagcttacattacctgaatctgaacatatagaatttcaacatcattcggattagctcgaaagaaacattattcggtttccgcgttcaagatccagcagagagataaatttgcaaagtttcactgttagattgtttctggtaaatgacactatctaacaatgtgttacgttaaacaagaataatcgactatcatgaagttgtatcaatctcgaacacacaagttataatcagtccaaggaaaaacttagatgtatatagtcaaaaaaattcttcattacacttttaagtaaccgaaacaaaatccaataacaaataaaagtaccacttagacttagctacgatttacatgtcaacaaaagaacactaagaaattataattaagtctcatgaagttgtatgtgtagacaaaaaagaattataatcaggcctagagagagtaaagtttgatttcaaccacactttagggaaggtgagagtattgactattgagtatggataagatgattataatgacgattgtaatggttgttgtaccattatatttatatattaagttattaactcaaaagaactaagaaattgctatcatgaagtagcatcaatctcaaaaattagttaaagttgtttccataatacatacagactgtgattatataaattatatgcatcgataatatatcttcgaatttccataatgttctttggccttgagagcatcgttagagatcgaaactgtggctgttgaagtggaaaagaggatgattcgccgatcgccagatgctatgtgaccgtatttctttggctacggtcgtctgaagagtcgctggaccgcatactatcactccaacatccacactcccccatttcccattcaatgactcaaatatctctgcaattacaaaataaaaatattacatgaaccaatcaaagatttaacttaaccgaatcgagccaaatatctacaccaaaagtcggattcaagaaccgaacgaaaccgtgtcaaaccgttccgaatgatttcagtttctataattttataaataaaaaaacgagataactggacttgacaccgctaattttgtagtgtatacctctaaaggccggtctggtgccataacgaatagtggtgtaattctggacatcttcttctattgccaagcccttaagctctgctgcagatggattatgggtttcttctccattcaaatctaccttgtcgttgccatttgcttccacttcaccggttttgtgttcccagcgatgccagaaaacaaccacaagacctccaaaaatcaacacacttgcaaccatacaaacaacaaacagaagtcccttgtaccaccatgttgttatgttgtacttgtttatgtaaaagatgtccaccaatgtgatcattgcaataaacccaatggtggagataattagatagagtccagaccatatgttatcccctgtaccaactaaaaccgacatggaacatccgttggtccatggtgttttgacagaaggatgcaccaccttgtgaaccatcccatcttcctgtataaccatggaacattgaagagttcaaaaactaagtaaggcctattgcagctcccaaaagagttatgtaagacttaccaagcaaggctcggattgtcgagtgacatatatgtgaatctcaaggtttagtttcttagagaagaaatggcaaatggaaggtatgtcaattgctgagagcagagagagctcgtctgagtttttaatggcccatacaactaaaaccttaccaggtaaacaatctttcccatctcttttacggtgtaggatatcgcttaagatggcaaaaaaaggcgtaatcccgattcctcctgctactaataccaggttctcatacctgcactcgcaaataaagctttcttgagtaaagctaaagcttactgtattgaaacaattcatgtagacgaaatgcattacgctaagtggtatggagattcatggccataaggtccctccacacaagttgtgattttgggatatgactcaggagaaataagctggtcttgattttctgcctcatatagagttgacaattgatccctaagctttgcagtccatccaccaagaacttttataagaaccgcaacatgatggttcccatctagaggacttgatgaaacactgaaaggatgccactgtaaccaagacagttccttcacttgaagaaagataaagctaagcgcgttgtatcgcatatctggtagaataagagaggaaaatggtcagtaaatgctctagattggaggtagaggactctcatctacagagaaaaaacagagctgttacttggtggttttgaaaggacaagttcaagagttccacaaggtaaactctttgcagagataacatcaacagtccttcttgattggtagaacctcaagaagcggtctagaatgaagagaaagattcctccagcaactatactgaataagtagtcaccaacatgaagtgccaagaagacgacaaagacaatgtatagttgatgtgtgtagaagaagagctcaaagtaattctttctcacggtgtgaagcgatgtgacccacatgagtaaaccagccactagactgataactccgggtaaaacagcgattccagtagctttccattcaaataactgagaggaaaaagtagaaatgacattgcgggtttccatctcaaaaccaattggtatcgacactatacttatatatcagatcaactaggatgatgttgcaagaatcttacaagctctaaaagttgaccttgaatggtccatccaacaacataacagaggccatgtaaagagaagaaagtcatggtgatatgaccaagccaaacatggtatcttgtagcatgctcgaaagggatatcaataagccggagaagaatagagcctctcgagattggaagaaacaaaaacaccatacacaacaatccaatcatcccaaaacgcagacccgttaactccaacagaaaaatactgttcacacacacacacacaaacaaaaaaccaatgattggaatgaaacaaaaagctaagatgggataaagaagaaaatgagtttaagaaccttctgttattgggaagcacgtggaagtagtcaagaacgttgagattcctcaaggtataagcatagatagcccaaaggaaaaaaacagagaagaccataattccaagaaactcagctgcagaaacaactccaaatggtccatccacaagaacaggaaatgtccatagcctaaacctcgggaatttcgttatcttcttccttcacaatcacggaaacacacatatattattaatatgcttaattattgtaagcaacacaatcaaatcaatagaatagttaaaagaaatctcaaccgtacgtacttagtgaaaaccgtctcttcccctgagattatcagatagagagaagccaagatggcgatgacaagaatcggaccactgaaaattaagaacatgcttcctacaatttaagataatcagagagtgaaattagcaatgcttttggaaaatttcggagaaaacgaagcaagtgatggtacctgtgaggccaaagagagtgttggaggagattgctctccagtttgtgaggatttgatcaccgagtgatccaggatacatcataaggaacacaacccaagtcacaaaaatcacagacattacaactttcaatatccatttcaaagatgaaaccaccacagatgatgatgatgatgatgatgatgatgatgatgataagtccttggacaaaagaggggtttcatgatcatccatgttgttttttgaatttcttctactgcttagtgttgtgatgagagctggctcagaagcagcatcggcttttaaggaggcgttactagctagagataaattaagaagaagatattcttaggaggagagtaaaaggaagaaaatttctggaccagtggggtttctatcggtctcattaataaaaaatattcttttaaacattaatcctagtacacaatttttttaaaaaattatttttttttttaaaaaggagagggtcattaacacgtgagagtaacgtacttgagagagactgtcacgttgtttgatttcgaccacaatttgagggtaaggtgagagtctgagagtaattagtacgtaatatagataagagattgtttttatgacgactatgacggttgttggattctcgtcttgtcattcctagacgactatagagtaattgcggattctcatcccttgtcatttctaatacgtttgtgctatggctttttatcgaaagactggatagtccgaatctctcatgtgtatagggaagctaatcatcttgccgatggattaacgaactatgctttctctttactcctatgtttgcatttgttggagtctaggcccgatgttgttagttctattttgttagatgatgtagcgggggtttcgtacccgagacatgtccaagtgtaattttttaattttcttttaataaaacgggagacgcagtctccctcattctaccaaaaaaaaaatgacggttgttggattagctacattacttgaatctggaaaaaaacccagttatctactgcgacaacgttggagcaacatttctttgcgctaacccggtttttcattcgcgaatgaaacacattgccatcgactatcacttcatcagaggctacattcaataagacatcttccgagtcgctcacgttaacaccaaatatcaactcggggacattctcacacaaaccaccaggaccgaacagtgcaaggagaaacaattgattgtgacccctaaaaaattggaaattttttctttacaaaaagggtccccaattatttatttcttttaaattggccctcaatttttttttcccttaaaaaatttttacgcccccaaaaattcagggcgggccctacaaaccactcacaaggacaagatttgttgaactaaagaacaagattagagtggcagctccccctccatcttgaggaagcgtgtaaaggaaaatccaagatcacttcattactactatgatgttccgtatctctgtatatggaaaccattgtaaatgcttaaccctagtaactctcccttgtacaagtatatatatgtgtatactctttgtcaataataacatacaacacttatatgaatcgcataggattgagatgaacgaagcttagagacgacacaagatggatttgcgaagaagattgaagcagaactgaatgagaatcgaataaatttttccaagaaaattaagtgatttttcgagaaagttagggatcgagaaaagtttgatgaaatcttttagctatgataccattttactaaacaaccaaaataactttcattctcattacttagggaaaatatacatggggcggtttatatacatactcaaacttgggctaaaccgaaacccttaactgaaaatagaaatgcaatctactaaacttgtttatagtaataccagtgtacaatgaccaatgaacctagacactatataggatagatagatcaatagtgtctctctttttattttattttattttaggatagacgtgattagaagcacgcaacgaagtttagccaaaaaaagtaaagaaaaacggttgataatcattctaaagaaagaatataagacaacgtatatatgtgttttaaaataaacactaggttattttataactaatatgggagtattggtcaaaataaatatcaaatcaaatcaaatcatcatcaatgttgcaattactatgtcaagctggtaaatgcttgtgctgattttttcgtccacggatgactttataccatgtcactgcataatcgatgaccatgatgctactccacaagtctctttcttattggggaaaacaaattatctcgtatcatgtcttatgtttccctcgctagtttcacttcttcagcaacagctaatatgtgttccttccctacctctttgaattgaaaccttcttcaaatcccattattagctgtatcccacgtttatcttattaaaatcgacatgatttgttcaaattctactctttgtaaactttcttgtctacatgttttgaaagccaggcagttttcttttatttatttaacttgtgtacaccacttgctttttcatagatcattttttgatacaattaaaagcaaaggaagtgagaagagattctttgtagatttgacgatgagttcaagaattagaacctgtatgctcctgatcttgtttttcttccaaaaatgttatgtttctgcactcactaatgttttcgacggtacgtatatagatgatggttagggtttttctgatataagaatttctaaatcattgaattatttataacctagtgcagcttctgctttaagaggtatgaagaatgaatggaccaggtctccgaaaggttgggaaggctctgacccttgcggaaccaattgggttggaattacatgtaccaatgaccgcgtcgtgtcaatgtaacaacttttattttttatttttccagcttcttccatttaattctttgcagagttctaacgatatgatgttggttgcagatcactagttaaccacaatttggaaggaacgctttctgagtatattttagccttgtcagaattggaaatcttgtaagtctttttcttcatcttcccatacaagaaatggatgttgttctcatcatatgatccaatgttttagagatttatcattcaatattggattgactggaccacttccatccaacattggtgaccttaagaagttaaagaatttgtaagcaaacattatcatgcatgacccatttgtaacatcctttttctattgcatatcttaaactaactatctttcactctccaggatccttgtgggatgtggtcttagtggtcaaatccctgattctataggatctctagaacaaattataaatctgtaagattttgttgcttcaagttattataaatagtctatttttcaattgtagtctaaataaccattaaatcatcttcaatgtatttttctatttttatttattttaaaatagagtaaagtttctctctaatatattactttctttcttactctaaaatagttggccgagttgaaattcgagagtgtctctgccaatggagttactctaaatataaagcaatcctattatttactctattttagagatatatatatatatatatatatatagagtgtggttggaacttggaaatgccctatgtaattaatttgtgtttcctccatacagctctttgaatttaaataaatttagtggaacaatcccggcatccattggacggttgtcaaaactagattggttcgatatagctgagaatcagattgaaggagagcttccaatatctaatgggacttcttcacctggacttgacatgcttactcaaactcagcacttgtacataatccaattttttccatttattgttatataatcacttttttttttcatactaactaatctcgaactcacattcactttctcatgcagtcattttgggaaaaataagctttcgggccatatcccagaaaagctcttcaactcaaacatgagtttgatacatgtgtaagtttcatggcccactagcgaaagctaaagattttgcaccacttgagagtagtaactatataagtgattgcatggtttgttgtttttcgacagactattcaataataaccaattcacaggcaaaatcccagaaagcctcagcctcgttacaacgttgttagtcttgtaagtagtaaaagattgttacaaaaaggcttattcatccgatccctaacaattttaatctcatataatgttatttcttttgttaaagacgccttgacacgaatcgattaagtggagatattcctccaagtcttaataatctcacaagtctcaaccaactgtaagtgtaccttttgttgtgtatttgtaatattataagcgaaatgaggtaagtaagttgaattcatttcaggcacttgtgcaacaacaaatttacaggcagtcttccaaatttagccagtttgaccgatctcgacgaaatgcaagttttcaatatttatcatcctcgtttgctgctcattttaccattaatattactatttttaaactatcattactagccaaactaatgccatgatgttatttttttgtaacagagatgtgagcaataacactttggaattctcactcgttccatcatggatcgtttcattacgcaacctgacatcaatgtatgaacctctctgatctcagtctccctcactctctctctaaatatatatggatgtgcattcttacaaagaagaaatggtcttctacttggcagaaggatggaagggatccaactcataggtccagtgccgatttccttcttcagtcttattcgattgcaatctgtgtgagtaaaaacagtattacatgaaactttgactggaattaatcgacttgtgaaatttttactgattgagatgcctcacttttttacttacgcagtaaccttaagcggaattggataaacggaaccttggactttggtaccaactatagcaaacagttggagttagttagtttaagatacaataacataactggttataaacaagcagctaatgaacacatcaaagtaatgtatgtatatttgtcacaaatcatgcaatatgacttctttgttcgatctattggttatctgtgttgctgtatatctacagattggcaaataatccagtgtgtggggaggtagggaacaagccgagtttctgctcagcaatcaaacacagttcatcattttctaccctccaaacaatcaaagatctatttaagaagtttatttataatgtggactctgtggccgtttagaaacataagagaaaacgcaagttgatgagggagcagaagctcaaatgtatgatattttcattgaccagatgaaggatggacaaatggatgaaatcaggctaaacataagaaagagagctcaggacatccaaatattatcactagaaataatttattatgttgtaaatgtaaatcatgtttaaatatttatcatgcatgttgaaggttgttttcgggttttccttatgtgtgttgggttgtttttcttgtttttattttaattgaatttcctctgtatatagtggctcattttcttaacatgaaataaaaaaaatgtgttcatgaaattagaatattttgtgatccttcttacgctgtttagctaattttctttatccttttggtttggaagtgtcaaatggtgatgcatttcgagtttgtgagggtatatttgattgccgtgtttgccaaggtacatcataaggaaaacacggctatgggatcgaccttccgaatctctttgccaaggtactcaaatacatcaccatttgaccatggtggtggacgccatgggatcgaccttccaaatctctttcatttgttcctcttaagtcttaactctattagctttccattatgggtatagttcatatttgtatgcttttaagtttctcaaatctctttcatttgtcagtttttactttttaggactggtttattttgcacccattccaatcgtggggttttaagttttaacccgtaaattatttttttgtttattttgtatttttgatacgaaagcccataaattgtgaagtaaaaaggcccaataggcccataaaattgggagaagagacgatcatcggacaaaccgagaaagtgaaacaacaaagaagaaacctgactcttcagaaactattcaggcgagagagagagagagaaacaattttggacaagaacagaaacgatgtacgttttctgtgatctcaatattagatatagtattccagttaatcggaaacaaagaagcaacaatttgcaaatcacggaggttgaaccactggaggagttggattcagtctggaaggaaatccaagttaaccaacaacacttttagataatcggaacactatattcaatgactattttgattccagagactgttttgcaacccaaacagatcctgatctcaagaatagctaccagagtagctatgaaggcagccgtgtatgatgtatcaagttcttcacatcttcaggttcaaagctagtaaaccatttgagaatccatccctggcaacattctttcctttctaagacattgaatttgatgagctttatacatcttaggtaatgttactgttgcaccagaactttgtgattccggcaataccataatttaggagttgtaattaatcttccttgagatattatgcttgtaaaacacatgtttaataagttattcaagacttttccacaagtcttgttgaacgtttttgaagttgttgagagatatcatagaaaattccaaaaataatgaatcgctagatcaatctatatccaaactgattattaagacccagtcaatacacaaattgctattctagcaaatgtaagtggtgaggtgcaccttaggcttcaaatggccacggcggactgacaaaaccatttgcgggattggatctcttgttgtttaccattcataaactgtagtctgtggaccgaaaaaaaaaaaaatcgccgtagacaaactagctactgattttacatactgtagaaataaatttggtatggagctgacaacatggtttagtccgctccgcccgtaacatccattcaaagccttaacatataacgtagttaacgcgtagagtatttgagtgtatatatgtatcccctaaacacacgtagttgcacgagtgtagcttgtggacactaacagtttcagtccactatcaagttgatcgacaaaacattatgttgacatacatcaatagcttgatcctaccactacaacattgctatgatgtttctccacttcttgttgttgttgttgtccttgctacttgtactctcttagtctcccctagcttggtaataaagttcatcaatagccaaatttaaaggtttggtccttgtaagcttgacacaacacaaattagttacacatcttcttctcatagctcacatttatttatatatgttttgcatacccactcgattattaaataattagttttgaagttctagtcaatatttcatcaaatcatcatcatcatcatcatcactgttgttgtaattagtattagtatatcaagttggaaaatggcttgtcctcatttttccaacgaggcaacgaccatgactttattcaatcttggttgttaaaaaaaacatatcactgcatagttgatgaccacaactatattccacaagtctctctttctgagatctaacgatttgggcaaacaaaatcatattttattctttgtttttgaagtttatagatatttttttttgtaatcaataatgagtgtatttaatacagtagataaataagggtcctactttagtttcgcatcacgacaactcatatgtatactttaatgtattgtttcataaattgttccttcccattactcaattgacatttccatttaacaactcttcccaattgtgaaacctttatatcccattatcagctgttttaagttgaccaagttttttcttatggtcctcttcctattttcttcttttgatatacttttttttttaactctatttgttcaaagtcttcgtcttctttttgttaacattattgtttacatgtttttgaaagagagattataatttttattaagagattcgtcaaacctttgtgtagagcacatgcttttttcttagattattttgagataggatcagaaaacagaggaagtgataagaggttctttttgggtttgaagatgagttcaagaactggagcctctttgctcctgatcttgtttttcttccaaatttgttctgtttcggcactcacgaatggtttagacggtgagtgtgtgtggatatatacatatacaaccatatagatgatgaacagagtttttcctaatcttgaatattggtgcagcttctgctttaaatgctctgaagagtgaatggaccactcctcctgatggttgggaaggctctgatccttgtggaaccaattgggttggaattacatgtcaaaatgaccgcgtcgtttcaatgtaaggctctgtaaattgttgctgcttcttccaataatgctctgcagacttttaatgttgtgttgcttattgtagatcactaggtaaccttgacttggaaggaaagcttcctgccgatatatcgttcttgtccgagttgcggatcttgtatgtctttctttttctttctatttttcctttcacataaaaatggtttttggttgttttcatcttattatccaatctttgtagggatttgtcatacaatcctaaattgtccggaccgcttccaccaaacatcggtaaccttgggaagttaaggaacttgtaaggaaacacactatcattaaatctctagtacacaacttatgtatcactttgtcttatctcttattttatctaactctttttactctccaggatccttgtgggatgtagtttcagtggtcaaatccctgagtccattggaactctaaaagaacttatatatctgtaagattctgtggattcatgttattataaacagtcaattgcattctctaaaaccattagtattaatttttgtttcctcaatacagctccctaaatttaaataaatttagtggaacaattccgccttcaattggcctgttatcaaaactatattggtttgatatagctgacaatcagattgaaggagagcttccagtttctaatgggacttctgcacctggacttgacatgcttcttcaaactaagcatttgtatatataatcccaaatctttcacttccgtttattataatcactccttctaatatagtaattgatctgactctcctttgcttttttcttgtagtcattttggaaaaaacaagctttcaggcaatatcccaaaagaacttttcagctcaaacatgagtttaatacatgtgtaagcttcatattacattatatagctgagagatttcataagttgtgagtaagtaactaacaaagtgactgcattgttcgttgttttatcgatagcctcttcgatggaaaccaattcacgggcgaaattccagagaccctcagtctcgttaaaacgttgacggtgttgtaagtagtaatatatatagttcaaattttttatttatcctaacgtctataattcttatgtgttttttcttggttctagacgccttgataggaacaaactcattggagatattccttcatatcttaacaatctcacaaatcttaacgaactgtaagtgagcaactaaagatttgttcttttgtttgttgaaaataaatgaaaatgaggtacaagaatttgtagttgaatacatttcaggtacttggccaacaacagatttactggtactcttccaaatttaaccagcttgaccagtctctacacattgtaagttttttacatttatcatcactaccaatctcaaaccttcattctttaccaatctaatgccatgatgtgattgtaaatgtaacagggatgtgagcaataacactttggatttctcacccattccatcatggatctcttcattaccctccctatcaacattgtatgaacatctctgtctctgtcttgttctccatttatctcccatgtgtatactttctaagaacaaagggttttcttcttcgcagaaggatggaagggatccaacttaatggtccaataccaatctcatttttcagccctcctcagttgcagactgtgtgagtaaaaaaaaaaaaaaaaatgaagctggaaatgaactcaagaattatgaactttgtactaaattgggattcttttttttttggactttgcagtatcttaaagcgaaatagtatagtggaaagcttagactttggtacagacgttagcagccagttggagtttgtggatttacaatacaatgaaataactgattataaaccatcagctaataaagtcctccaagtaatgtatgtatccttgtcactaatcaaacatgacttctatttgtctcaatcaactgcttaagtgtttatatatctacagattggcaaataatccagtgtgtctagaggcgggaaacgggccgagttactgttcagcaatccaacacaatacctcattttctacactcccaacaaactgttctccatgcgaaccgggcatggaagcgagtcccacgtgccgctgtgcgtatccattcatgggaacactctacttccggtctccttctttctcagggttgttcaactccaccaacttctcaattctacagaaggcaatcgcggatttctttaagaagttcaattatcctgtagactccgttggtgttcggaacataagagagaatccaactgatcatcagcttctaatagatctattggtctttccattgggaagagagagttttaatcagacaggaatgtcacttgttggttttgcatttagcaaccagacttataagcctcctccgatatttggcccttatattttcaaagctgatttgtacaaacagttctctggtatgatgaacccttgtcacacacacaatcaaactagaactaaaggttgttattgataactcatttgctctgcctttctttttgtcacagatgtagaagtttcatcaaagtcatcaaacaaaagcattctcattggagcagtagttggtgttgttgttcttctactattgttaacaatagctgggatttacgctcttaggcagaagaagagagctgaaagagcaactggtcaaaataatccttttggtaagacaacaatatttactactcccttgactaaaatagcatgaacaaattttctttggcatgttgcagctaaatgggatacaagtaagagtagtattgatgctccgcagctaatgggagcaaaagcgtttacttttgaggagctgaagaaatgcactgacaacttttcagaggcaaatgatgttggcggtggaggttacggcaaggtttgtgtcttaacaaatgccttcaaatgaatgtaacaactaatggccttagttgaaattcatgatcccaaattttgatggttaaataggtttatagagggattcttcctaatgggcaactcatagcaatcaaaagggctcaacaaggatctttgcaaggagggttggagttcaaaactgagattgagcttctctcaagggtccatcataagaatgttgtcagactcttgggcttctgctttgaccggaatgaacaaatgctcgtatacgagtacatttcaaatgggtcacttaaagacagtctgtccggtaagatcaaacttctatcttcctcatgaggatttcagatagttcttggatgctgaatatgttagtaatgcagggaagagtgggattcgattggattggacaagaagacttaaaatagcacttggttcaggcaagggcttggcttatcttcatgaacttgctgatcctccaattatacatagagacatcaaatcaaataacatattacttgatgaaaatctaaccgcaaaggttgccgacttcggtctctccaaacttgtgggagaccctgagaaaactcatgtcacaacacaagtcaaaggaaccatggtgagtagaaaatttatcctcctttctctttttttctcaaatacattttaaacttacaatatctttgtaatcagggctacttggatccagagtactacatgacgaatcaattaacggagaagagcgatgtgtatgggtttggtgtggttttactcgagctattaaccggtagaagtccgatagagagaggcaaatatgtggtgagagaggtgaagacaaagatgaataaatctcggagtttgtatgacctgcaggagttgttggacacaacgatcatagcaagcagtgggaatctaaaagggttcgagaagtatgtagacttggctttgagatgtgtggaggaggaaggagttaataggccatcaatgggtgaggttgtgaaagagattgagaacataatgcagcttgcgggattaaatcctaactcagattcagcaacgagttcaagaacgtatgaggacgcaatcaaaggatctggtgatccttatggcagtgaatcgtttcagtacagtgggaattttccagcttcaaagcttgagccccaatgattgattatgtttctttttgttattttgttatttcgtaagtgacttcatacttgaaatgccttgtgaatgtggagtagcatgattctgtttgatatgtggtcgctgattataaagcagatgaatggagagccaaacgcagaatcaaaaaccaccagatctttggcaatgtcgacaccagtttcaaacataagaaaagtaatcaagctcaatgtatgatgaataattgaatatattaattcttgttgagaagtttgtgtggtttcaaagatttaatccacacatcacacacacttttaatttactccaaacctttcacatttatgcatgagattatattacaaatttatattacaaataatttgtagtacgtaagtaaaattagtattaactaataagaaaaaaaagtaataaagttattgggtttgcaacctaacacatcaacgatcccatcgaacaacaacagttacatgacccagggtgaatttatggttgtcgtctcatctgagagcactctctgatctagtgtccttgttgtccacacctcaaacacgcccccaaaatgtatgacatgatttaacaaaaaataaaaagaaacatgatttaagacatgtggtgtgtggcaactctgccatatatttcatggtgaggtagcgaaccggcaccaagtttttctcgatatgtttcctccatttaccattctttacggtagactacggtagactcataactttttttataccggagtcatatcgtattagtttcttaagaggattaaagcacacatatgtttttgtgtcttatttactacaaaaagtctttttactaaaacactaacaaaacaaaaataacatacaaaaaaaataagaaaagtggtgggatgtggccaaatagcattagcatacatacgtaggaaaaaaatagacgatgtggtcatatgtcagagtggtcaaggtcccatcccatctctgagttttccgtcggtttggagtatattgatcggagaatatgatatgggcaaaaaaaaaaaatcgattaatttttaatcaatttggggtacactgaaaacaaaaaatattttttttattaatttacttggaggaagtactggtcaatataacatcaaaccatcagcatcattcattgttgttgcaattagtattattatctcaagttgataaaagcttgtgctgattttttccatgaccatgactttattgcatgttgctgttagaaaaaccatatcagtgcatagtcgcttaccattactctatttcaaaaatctctcttttcttgagaagaaacgttctaggaaaacaaataatatatacatgacttctcccagttttgtgcagaaacaattaaatgttagatcatttagttaagttttgttacatattgcatatttatgctttatcatgtaaacagatttatttatgtagttaataaaggactagtctattataatggtgttttgtgccaagtcattgttcataatttgttcctccacattaccgtattgacatttcaatttctcccttggataatacctttgaacccttccgcaatatatagcggttctttattatctatatcaagttgaactatttgtttatatggtccactgtctatttgtttgctttatttataaattttcgcttaacttgttcaaagtcttctcctttatgtcttacatgctttgttagcaaagaacatggaggctgcatttttatgttagagttcgtcataacttgtgcagaccacatgctttcttcttgaacgaattgtgatacatatcattgtgtgtctgatgaagatgagttcaagaattggattatttaagctcttgatcttgcttttcttccaaatttactctgtttatgcgttcacagatggttcagattgtaagtataagtagatgatgatcagagttcttttaacagataaagatttccaattttttgtattttaattctttcaatattggtgcagttactgctttacaagccctgaagaacgaatgggacacgttatccaagagttggaaaagctctgatccttgtggaaccgaatgggttggaattacatgtaacaacgataaccgtgttgtttcaatgtaacaccttggtccctttctttgtttgttcttttgctgcttctttcttcaatataatcctctatatacagactttaagctgtgttatttgcttgtttcagatcattaaccaaccgtaacttgaaaggaaagcttcctaccgaaatttcgacattgtctgaattgcaaaccttgtaggtctttcttcttcttctttttcctttgcataaaaatggatttagttctcatcttatgattcgatgtttgcagggatttgactggcaatcctgaattgtctggaccgcttccagcaaatatcggtaacctcaggaagttgactttcttgtaagcaaagtaaacaagatcttaacctaattccatcaatcgcattatcttatatatcgccttttcttttgttgttttcttctctaggagccttatgggatgtgcttttaatggtccaatccctgattccatagggaatcttgaacaacttacaagactgtaagatttgttgcttcttataatttataaacagtcactttttcaatgtaatctttaaaactcataataagtattactttgcgtttcctccatacagctctctgaatttaaataaatttagtggaacaattccggcttccatgggacggttatcgaaactatattggttcgacatagctgacaatcagttagaaggaaagcttccagtttctgatggggcttctttacctggacttgacatgcttcttcaaactgggcatttgtatatataatcccaaatccttagttttcatttttatttagttactctttatatataacattcatcactctgactctcttttactttcttttgtagtcattttggtaataacaagctttcaggcgaaatcccagagaagctctttagctcagaaatgactttgctacatgtgtaagtttcatagtacatgcaaaagctgagagttttcactagttgatattagaaactaacaaagtgatgattgcatttttgttcttgttttatcaataggctgtttgatggaaaccaattcaccggtagcatcccagagagcctcggcctagttcaaaatttgactgtgttgtaagtagtagaaatatattttccaaactgtatgttcacaaaatttctttaatcttataagatatttgctttgttacagacgtcttgataggaatagactaagtggagacattccttcaagtcttaataatctcacaaatcttcaagaactgtaagtgagcaaataaagatttgttctgttttcttaagatatataaatgaaaagatgtaaaagatcttgtagttgaatccatttcaggcatttgtccgacaacaaatttacaggtagtcttccaaatttgaccagcttgaccagtctctacacattgtaagtttcaatatttttcttcctcgtttgttgctcaaatttagcatcagaaacctttcttattaataatcaatctaatgccatgatatgattattatgtaacagggatgtgagcaataacccgttggcgttatcaccggttccatcatggatccctttcttaaactctttgtcaacattgtatgagcattcctctctctttttagatatatatagatttgtgagcatacataatgagaaaaaatggtcttcaacttggcagaaggttggaagatatccaacttgatggtccagtaccaacctccctttttagccctcttcaattgcaaactgtgtgagtcaaataagtcatgatcatgaatgttcaattggaaagtcaactcaaagatttgtgaaacatgtactgattgggatggtttttcttgacttgcagttccctaaagcacaatcttataaacacaacattggaccttggtaccaactatagcaaacaattggattttgtggatttacgagacaacttcataactggttataaatcaccagctaataaccccgtcaatgtaatgtatgtattcatctttgaccaatatgtaacatctttgaagaataacttacgtatgtgtgttgatatatccataggttggcagataatcaagtgtgccaagacccggcgaatcagctgagtggctactgcaatgcagtccaaccaaattccacattttctaccctaacaaaatgtggtaatcattgtggtaaaggtaaggaaccgaatcaaggctgccactgtgtgtatccacttacaggagtattcaccttaaggtctccttcattctccggattttcaaacaacagtaacttcctaaagtttggggagagtttaatgactttctttaagaatggcaagtatcctgtagactctgtggccatgagaaacataagcgagaatccaactgattatcatcttttgataaatctcttgatctttccatcgggacgcgaccgctttaatcagacggaaatggactctattaattctgcatttaccattcaggattataagcctcctccaagatttggtccttatattttcgtcgccgatcagtacaaaacattctctggtatgatgaaacgtaacacacactcaaacgaaatctatattgatttaactcattttacttataagccttgtttgtttcacagatttagaagattccaagacagtaagtatgaaagttataattggagtagtagttggtgttgtagttcttctgttgctgttggctttagctgggatttacgctcttagacagaagaagagagctcagagagcaactgatcaaatgaatccttttggtaaaagaaaaatggtttaacactagaacaaaagacttttctcttgtcttatgaaaatcctgacagcttctcgtttgtctgttgtagccaagtgggatgcggggaagaatgaaatggatgctccacaactaatgggaacaaaagcctttactttcgaagagcttagcaaatgtactaacaacttttcagatgcaaatgatgttggcggtggaggttatggccaggtttgtgtatttccaatgtcctcaactgaaacaaccagaggtagtagttcaaattataataccaatttgatggtgaaacaggtctacaaaggtacccttcccaatgggcaagtcatagcaatcaaaagagctcaacaaggatccatgcaaggagcgttcgagtttaagaccgagattgagcttctttcaagggtccatcataaaaatgttgttaagcttttgggcttctgttttgatcaaaaagaacaaatgctcgtatacgagtacatacctaatgggtcccttagagacggtctatcaggtatatatttaatctctatatatcttgctttgttagttctttggtgctgaacttgaaaaacaaatgtagggaagaatggggttaaactggattggacaagaaggctcaaaatagcacttggctcagggaagggtctagcttatcttcatgagcttgctgatcctccaattatacatagagacgtcaaatcaaataacatattacttgatgaacatctaaccgcaaaggttgctgatttcggtctctccaaacttgtgggggaccctgaaaaagctcatgtcacaacacaagtgaaaggaaccatggtgagtaaaaaagaatctatcataaaatatatgaaaccattaactataaaaactaacaatatctctggaattaattagggctatcttgatcctgagtactacatgacgaatcaattgacggagaagagcgatgtgtatgggtttggtgtggtgatgcttgagttattaaccggtaaaagtccgatagatagaggcagctatgttgtgaaagaggtaaagaagaagatggataaatcgaggaacttgtatgacttacaagaattgttggacacgacaattatccaaaacagcgggaatttgaaagggttcgagaagtatgtagatgtggctctacaatgcgtggagccagagggagttaataggccaacaatgagtgaggtggtgcaagaacttgagagcatattgcggcttgttggattaaaccctaacgccgattcagcaacatacgaggaagcatctggtgatccttatggtagggattcgtttgagtacactggggttttcccaactccaaaaccctaacgcaataattgattaatttgttctttctcagttttttattgttttgttttttggttattttgtaagtgactttacaaccttaaatgccgtgtgaatgtgtgtgtactagcatgatttgatttttgatatatgttgttttgtggtcgctgcttataaagtgtaaacaagattggaatcaaaataaacatcaaccctaagcaaccctaagttgtcatgatactaaataaatctaatcaccggattttgaatatactctctttgaggttgtctcagcagtccggttgtcatgtctctacgggtatccccacgcacatatactgtgccaagcaaggatgctagtgtgtccttcttgaatccgcgaacggatgatctttctctattctcatgttgtagttatgattttcttaacttcgttcgtaatcaagtgaatactttcaataacagacttgtatacacactttttggttttttacggtttactattacagtattaatcgattttctaccataaaattaaactgtttatctagtaattaaaaaaaaactgacacaatatgaaaataaaaatggtcacaaaaaatagaatttctttagtaaaatgaaaaaaaatcacttaatttgaaaatttttttttaagagaaaatatagtgaattgtttaatctataatcatttgaattgcaagaaacaaaaaacaaagaaaacaaaaacctatattttatttggaacggagtactggtcaatatatcatcaaaatatcagcatcgtcggtactgcaattagtatattatctcaagttggtaaaagcttacgctgattgtttccaggactttgaccatgttgttgttagaaaactatttcgctgacctgaaccgtcttgggcaagccaatcatatctaacgtttttagtttgtagatttcgtttttctttaaatgtttgaatcattaatgagcgttttaatacatcatatttaaaatgagacactagtttctcatcacaataactgatcatcacgttggttccgttttgattcaatatttcgggtcgatttgatccaaaaaaatatccaaatattggagttaaagcagagcaaacaaaattaccctttttttttttttttggacaaaacaaaaaaaattaccttcctttcaaaataactactccctctgtttcaaaataaatagatttcaaatttctaataatcttatattcataattggttctttcccattaaccctagtggcatttccatctaaccacattttccgaaccttccattaatagcattctcatattttatcaagtggaactagtctttaaatgatccactgccaatttctattatttatatgtttacttttacattattcaaagtcttctccttcttgtttaacaatattatgtaaatgttttgttagcgaggaagctgtatttttgtattcaagactatgtcataacgtgtgcaaatcacatgctttctcattgaatgactttccgatacagtcagaagcagggaaagagaaaaagagattctttgtgggtctcaagatgagttcaagaattgaagtctttgtgctcttgatcttgctttcgttccaattttgttctgtatctgcgcagacaaatggtttcgatggtaatttatagtttgatgatgatcagagtttttcagatacaggaatttcaaagtcgtttgaatgagtttcaaaattgttgcagctgatgctttacaatacctgaagagtagtttgaccatacctcctcggaattggaaaggctatgatccttgtggaaccaattgggttggaattgcatgtgaatatggccgcgttgttaacatgtaagtatctttttttttttgctgcttcttccaataatcatctgcagactataaagttgagttgttgcttgtcgcagatcactaggcaaccttaacttggaaggaaagcttcctgcctttattacgacgttgtctgaattgcataccctgtaggtctttcttcttcttcttcttcctttccatacaaatgtttttgttcttcatcttatgatccaatatttgtagggatttgacatctaatcctaatttgaccggaccgcttccactaaatatcggtaaccttaaggagttgacgaacttgtaagataaataggtcatgacccatttgtaaattgtacacactttgtcttatcacatattttaactaaactccttttttctacagaaatcttatgggatgtggtttcagtggtcaaatccctgagtccataggatctctagaacaacttgtaacactgtaggattttgttgcttcttattattataaacaatctcttttacaattgagtactctaaacccattagtataacaatttttgtttccttttatgtagctccttgaattcaaataaatttaatggaacgattccggcttccattggcctgttatcgaaactatattggtttgatatagctgacaatcagatagaaggaaagcttccagtttctgatggggcttctttacctggacttgatatgcttcttcaaactaagcatttgtatatatacaattccaaacctttctatttctctttatctaatcactctttttgatatactaattaacatgtctaacctctttttcattttctcatgcagtcattttggaaaaaacaagctttctggtgatatccctgaaaagctattcagtgccaacatgactttaaaacatttgtaagtttcatagtacatttcaaagttgcaatttgtaactaaatgagtgattgaattttttgttgttttatcgacaggctattcgatggaaacctactaaccggtgaaatcccacaaagcctcagccttgttaaaacattgacggtgttgtaagtagtagaaagagatttttcaaaaacattttttatcctagttaacttcttcatatatgttgttttctttgtgacagacgccttgataggaatagactaagtggagaaattcctccaagtcttaataatctcacaaatcttcaagaactgtaagtgagcaactaaaagatttgttctgtgttctcatagaaaataaataaaaagagatgagagagttcttaagttgaatccattttaggtacttgtccgacaacaaatttaccggtagtcttccaagtttaaccagcttgaccagtctctccacattgtaagtttctctatattattcttcctataatttgttgctcaattccttcactctcaagcaatctaaaaccatgatgtgattgttttgtaacagagctgtcagcaataaccgattaacttcctcacaaatttcatcatggatctcattattaccgacttccttggcaacattgtatgaacatcatctctctctcgctcttgatctccatgtgtatatacttgctaagaacaaatggtcttctgcttggcagaaggatggcagggctccaacttcaaggtccaataccaacctccctcttcagtcttcctgaattgcagactgtgtgagtaaaacaataaatgaaactttgattaagaagtcactcaaagatgtgaaactttgacatgtatactaattgtgatattttttcttgactacttgcagtatcctaaagcgtaactggctaaacgaaacactagacttcggtaccaacaagagccaaaacctagattttgtggatttacaatataatgacataacagagtatattaaacaaccagctaataaaggaagcagcaggatagtaatgtatgtatggtcacatatcaaaatgacttacttcttttctatcagttacttataagagtgttgatatttctacagcttggcaaataatccagtgtgccccgaggtagggaacccaccaaatgaatactgcatagaagtcgaacacaattcctcatattcttcccctaagaacacatgtggtcgttgtagtggtgaggacagggaacccattcccaccacgtgccgttgtgtgtatccaatcacaggaacactcacttttaggtcaccttccttctcagggtattccaacaacgatacattcgagaacctcaggctaaacctaactggtttctttgagaatagaaattatacagtggattctgtggccataagaaacataagagaagatgaagatgatcattatcttctaatagatctctctctctttccatataaacaagacagatttaatgagacgggaatggatagtgttatttccaggtttagcacacagacttataagcctcctaatacctttggcccttacatattcaaagccaataagtacaataagttccctgcaggtatgattaaaaaaaaacgatcatacacaaaatctaatcttagttctgttctgtatgactcattttgctctgcttattttgtaggaggttcaaactcgtcacacatcattggagctgtagttggttctactgtttttctgttaattctaatgatagctgggatctatgctcttaagcaaaagagaagagcagagaaagcaaatgatcaaattaatccttttggtaaggacgttttactatcagggaagactgacaaaatactaatagctttttttttgtatgttacagccaagtgggatgcgaatcagaacagtgtcgatgcaccacagcttatgggaacaaaagcatttacttttgaagagatgaggaaatgtgcaaacaacttttcagtggcaaatgatgtcggtggtggaggttatggccaagtatacaaagggattcttccttctggtcaactcatagcaattaaaagagctcaaccaggatctttgcaaggagcgttggagtttaaaactgagatcgagcttctttcaagggtccatcataaaaatgttgtcaaactcttaggcttttgctttgatcgaggagaacaaatgctcgtctacgagtatattccaaatggttctcttagagatagtctatcaggtaatatcaaatctatatatcccttcttttgaaaaaattattttgtactaaacaagacaaaaatgcagggaaaagtgggattagacttgattggacgagaaggcttagaatagcacttggttcagggaagggtttggcttatcttcatgagcttgcagatcctccaattatacacagagacgttaaatcaagtaatgtattacttgatgaaagtttaactgcaaaagttgctgattttggcttatctcaacttgtggaagatgctgagaaagctaatgtaacggcacaagtgaagggaactatggtgagtagagaatgaaaataatcatcctcttttctttctttatcaaatatattttaaactctcaatatcttttgaattagggctacttggatcctgagtactacatgacgaatcaattgacagagaagagcgatgtatatgggtttggggttatgatgcttgagctactgactggtaagattcctatagagaatggaaaatatgtggtgaaagagatgaagatgaagatgaataaatcgaagaacttgtatgacctacaagattttctggacactacgatcagcgcaacgtccaacaggaatcttaagggatttgaaaagtatgtagatgtggctctaagatgcgtagatccagaaggagtgaagaggccatcaatgaatgaggttgtgaaagagattgagaacataatgcagtatgcaggattaaaccctaacgtagaatcatatgcgagttcaagaacgtatgatgaagcaagcaaagaatctggagatctttatggaaacaactcttttgagtatagtgcaagtttcccaactacaaacctcgaacctcaatgactggttgtggatttatttgcttgtttatccagatgctacgtccaaatgttatgctttctgcaattttacgattttacggttttggcggaaaaatgcaattttatggttttggcgagaaaatacgattttacggttttggcgggaaaatacgattttacggttttggtgggaaaatgcaattttacggttttggcgggaaaatacgattttacggttttggcgggaaaatacgattttacggttttggtgggaaaatacgattttacgattttggcgggaaaatacgattttacgattttggcgggacaatacgattttacgattttgggggaaaatatgattttgcggctttggcggaaaatatgattttgcgattttggcgggaaaaaggaatttacaattttgacgtaaaataatagttagtgatttcacaatttttagagttttttggtacaataggtaaatttttaaaaaaaaaattaagaaatctattgaaaattaacattattaaaagagggtatatttgtcatttgttttttggactaaatcatcttcatccaaatgggtctaccaagtccatccaaatgagtttcacaaattagcctaaatttataaagtcattcagatggaacattcaaatgattcatccaaatgatctgttaatttgtcaaaaacaaacatcatttttcatctccatccagataaatcatctggatggagaaacaaacaggaccttaggcatgtgagtttctgatgtagaaattggtgcaactcttgatgtatcatataaaatgcataaaaaaaaattcaaaatactaaaatgccctgattgttactaaaccgttagttaataatagtttaaaacaagtcatgttttataaagaactatcactttcagtcaaagaaaatcacaagtttatgcctaaactagaattgcattttaacgccaatttagcaaactcacaatttgataccataactgcgaaattaatttggtgatgcttgaactattgagctgttaaagtatgagacagaggtaactgcgtggtgaggagaggtgtagaggaagatggataaatcaagaaatttttgctttgtggctttaatgagtttgatcttatagctttcaaccacggagatagaacaccaatgttataataccacaatatgatgaacttaacatccatataaataaatagttacaccaatgttacataattaacatgttataaataaaaaaatcacattccctaagagttagatgaaatactaagaattatgaaatatttattttctcttattgtaatctactttttttttctttttgccttattgttattacctaaatatgtcttccaaatcttcttattcacctaatcatttattattattatttttaactatttgcatgaacagaaaacttcccatttgaggagggaaaaaatagtgagagatacaacatataaaacaaacatataaatgcagtagctagaagcctagaatgataaatccaatgtttttacatgatatattgccccttctaatagattaaggtttattactttatttagagagtagaaaagagggaggagtaattgcctcttaattacgatcacttcactcttttggaaaaatatgtttacaaacaaaaagaaggagacaaagaaagagagagctaaggaggaggaaaagagggtagataagctt

SEQ ID NO: 865 - DNA, 35238 bp, Arabidopsis thaliana
gagcaacctttctaaggttatcaattatcattactaactttgtgtttagtctgttcacaaaacactttggcaaccatcctgcaggatccaactgtaaaaaaagcaaaacaatgaaacatctattaacgaaaagacaaaaagaaaaagaaaaggaaagaagaaaaaggaggaaagtttaaaagacctgaacaacataagtaatcatgcaagaggtatcttcaagcttctccaaaacccaacccgactcaaccaaaaaccctctaatataattgtttttctttttctctgttggctccaatccttctgccatctcctttggtagcgacgcaaccgccaccacgagagtaccgtcttgcatggtctcacgtctttcgtagataatgaactctctgttcctaaagagcggtttcgagttttcgccaaaccttaaacggattacgctcagattttcatctatgtctctaatgtgtgttgcctccaccaggtcgccttcccattgctgtcatttttctccaataatcattattattttaacaaactccaattattaatgaagtgggtgataaacctaccatgtgttaatattttaattaaagcaaaacgaaaaacacctaccatgtgttaaataaaaaatactatcacagaaattttaagaactaatcgatcggatgtataattctaataaatttattgagtaactaatttattttatgtaacaaaaataataatgtattttacagtattatattacacacttatctttcacctctactaaaaaaaaagtttttatgtatcattttccacatattttattgagatgtgaaaaatgtaaatctgtaaatcctacatttaacttagctaacataatgatgtgaaaatatattattgagttaatgtctctcttagcattgtttttatttgaggatatgcaaagtagcatattgtaaggaagcactaagaaataattaccttggccgcgtctatcgcatttgcaaccgtgatgaactgctctggggagactgatgtgaggatcctgcggcttcgaaacgcgtgtagcgatcccgagtcgcgttttgaaatctcgacaccgttcgagtcatgcctcaccatcttccacccattggaagcgttcccaaagcgtccggcctcagaggaagataagagctcttggatgcagctctcactcgcgaacctcacgtaccttctcagcgactcctcgctcaccgacctaacaatgtagcatttcttttaattaagccacaacatagaaacatattatttggaacatagatgttacgtaccaggagcggctggaggggactggaccgttcatgatgtgtagaagagattgaagaatccgaaggtatgaagacttatgatgtggttgctctgcatttttaagtcatggatttggttaagaaagaaagaatgagagagagagaaagagacagagttgaaagcagaatagtgggtaagtgggacaagaaggtagagatggcacatgcaacgactagtgggaactgaaatcattatacatcttcctcttactcaaatcattcttgaaaattacaattttaattatatacatattaatatatgcgtgtgtaattctcaagttgaaattctttatgaatgttattttcatttttctgaatatctaagagatttcggatcctagggacatacattcctttggaccgaaactagcatttcaaggaaacacgacttttcattcatttggcgggatcatacgttactggaccaagtgctactcggtgaatgataatgtttataagtacttcacgttgatttatgggtcctttaatttggtactcaacacatcttccttatatgtatatagttattatttatttattttaataactttttcactttaagactcctttttcgttggtaaacaacttgaattagacatttagactcctttatatcatcgacctataactatgccagactattgataaaaagttaaatttttagttcagtaaaatttctcatatattgtttgagtgaaaattgttcatgaatagttttgtgtaaattcgattgtatttatatatagtttacgcgtctctcaacattatatacatatcatggttgtttagtttagatttttttttattttttttttgaaaatgatgtgctcatagtttgtttcgtgaaaaaccatgtacttttttgataagctaaaacaatttcgattattaattcataagtttgagattgttactagattaatattaatattttttcgttatactttaccgtcgataaaaacttttatttcctttcataattcaatatgcatttctttattacaatgattcaatatgcatgcatttgccgtaaaacttttgttttataagtaatttttatgatatatttatttgaaaagttatctgtctaattaacaacttctgactatctccaaaatatatgcggtatataaaatcaactactttattttacttatttaacaccacattacccgccaagtttaataatatgtaaacttatttaaaattaatagctaagttacgaacgtataattaataattgtaatatgtaagctatatgaaataacttatataaaaaaataatcatatactattgaactcaagaaaatccaaaagacattatcggaatcagtaatgtttgtttcctcgggtctagatttggactgcctctgctggttttcacgtgcttgctgctgcaaatccgattatagaggatacacaaacacaaccataccgttttttccctcattattttaaaagttatatattgattattaattatatctcataacaggtcggtatattatataaattactcatgaatcatgattccccaccggccaacaccatctagtttattattctttgtattatttagcgagatcgagagaattaacaatgatgatattattggaatatatctcattttaaaataaaaagtcatcgaaagaatacctactttttgtttatgtgcctctcatccccggccaatccaaatcattagccttcgacttaaattataaaatgttctaatttttgttttcttaatctttttgttgttttatagagaaaaaatgcgtcttcttctctacgtttgaagttacaaacttacaatgttccttcttctttttgtcgtcaaagaaggtaaattcattagataagtatttacaaagtttgttccaagatactacggattacattgagtataagctctttttgttaaggtatatggatgctattgactaagtttacacttctagtgagatagaggaagttaaaatcatgcattaactacatctaaaagatgtcacatacatatgttgagaggtaatgatgtcaacattcttctttgtagtcgctgctttttctactttgtatcatttcatatagtataaaattaggttgtagagccccaacataatgttacttgagtatatcctaggctccgaagttggtgcactaccattcttaagcttagagtttagctttcaatggggagtgaatcggttccacttgcatcatatatatactttaaaaagatgtgttcacttcctcctatgaagcgacaaaccgatgccaacattttgatctggagatttccaggatgcgtcaacaaatcagacaataaaactaattactcattagagcttatagctagccctagagacgccattaaaatgttagcgggtgcaaattgctagaacaagaaatcaaacttggtacctcatggattattagggtgtatgtcaaaccattttgccactttgaatactttggctagtgtaaaacagtatttatattactaggtgcaagtgcccccacattactcaaaagtgggtctagtccacccataaataacagattatagtatgttttagatttttttttgttcataatatctgatgtttcgaaaaaacaattcaagtttctatgcaaaaatattaaattaaacagctatatgattgtttatattctgcaataaattatatcattggtcaaaatatttttaatagatattaatttatgttttaatgttaaaaaactcaaaataattattttcttaaactttgtgccttaatctaaaacatctatatttttgaaacagagtagtctttttagaattggagttcttttgagataacttggtttctgatggtatctaatatactaattcactaacaaacaataagtattcccctttctgcctaagttcggctacattatagctttttcttttcatcaaatcctgatccttagcttcttaccaaaacaaatcctgattcttagctacacacaatacaatactctaattccatccactaatttgatacatgaatttttatatattattttgttaccctttatatcaaaagccataaagggacaattcttaatcagttttaagacgttaaaaaaaaaaagtaatataaaatagatttttagtcaaaagtcctatgccacaaatgtcttatataatttgattccttgctggtgagagtcacaaaacccaacagacttcacactttcactttcattcgctttttcttctctattactgcaatcacttgttcacgataatggcggacctctcctctgtcgatgagttcctgaatcagtgcaaacaatccggcgacgcagcttatggcgccttgcgatcggtcttggagcggctcgaggatccgaatactcgatctaaggctcggatcttcttgtctgacatctacaaacgcgtcggatcttctgagacgtctctccaaacctaccattttcatatccaggacatctatctcgatcaatacgaaggtaacatcatcgatccgattctttgttgttcctctttcacgatccttgagaattgttctgtgattatttgtcaaatggatttgattcagctgattatactgatttggtgattccctgtgtgtaatctcgccgatcttacgttactttgtttagttgacttcatgatcgattaaaatgatctgatttctggcttcttttgcttgatttcccggagaattgggatgattccggtatcaatctgcgcttttgtttactggaatcgccgagtactcgaaaaacacgtctgcttgattgtctaatgaataggctacggatatagaaatttagcttttcgagatcttttgtcgttttcttaggattttagtgacatagtgaagaactacacatttcacttctttttctttttgcatccttttactacttttgttatctgtcattctcattagtttccaaaatgtgtcacatgtgtcatataccaccttcttagcattggaaaaaactgatcatggtttaaggtttgaattccagacttttgggaaaccatatgagctttaggttttacaaattcaatactgacactgatatttttttcttatatgatttgtgatcgtatttttagaacagtaaatttatccatagcagaaatttttacaaaacgttctgttgctatgagccgtattgacagagaggcatgatcatcaggagtttaagttaaaattgttttggatggtccttttttctttctaggaacttcttgcaatatatctctaacatcccattgctgcagatattggctaccttatgttcaggaaaccattcttgtatcagacaccaacatatctttatatttttttctataggctttcagtccaggaaaaagttaaccatgatggtcattcctagtatttttattccagaagactggtcatttacattttatgaaggacttaacagacatcctgacaccatctttaaggataagactgtttctgaacttggctgtgggaatggatggatatcaatagccattgctgctaagtggttgccttcaaaggtcagtatatgttatatggctttttagaagtatggaccactactgaagctttatatttgggtcagacaagtacatgttctcgtcttagtaaagtgggaaataactgtaataatgtcatcttttagtgtggttattattttcactttagatattgcccctcatatctaccctggaaatgcttcaagttaatttttggtccttcacagttagcatacaggcgtcaagcatataactacacaattacgtgttttgcaggtatatgggcttgatattaatcctagagctgtgaaaatttcttggataaatttgtacctaaacgctcttgatgataatggcgaaccagtctatgacgaagagaagaaaactttattggacagagtggaattctatgaatctgatttgcttggttattgtagagataataaaattcagttagaaagaattgtaggatgcatacctcaggtagtttgtccttctggtctctaataacttatatgtgtaggatttcaatctccgaaaaactgacgttttccttttatgcatgcttccttgtatcttatgctcttgtggcagattcttaatccaaacccagaagctatgtctaagctgatcacagaaaatgcaagtgaggaatttctccattcgctgagtaactattgtgcccttcaggtaagggaatttttttcccagcaaaaatactctgaaggtatcattagtatgttagaaagctagttcctagaactcttctggtgcgtcccaatttcatgttatatcattcaattgtctaatctatgatacctcttttcttccttctctatcaaacatcatgtgaaatctcacattgagctttttgcgagtatgattgagccagtcatatgcatgcctgacatatcgcattttcaacctaaatgttgcatgtttgtgatgagtatttacataagaaaacttttttctcctctgtaaaatccatagcatcctctctgttttctgttgccagcgttgacacattctcttgcttaatttactctaaaaggtgtaaatgatagaccaggtactggaaactttgttaaagtggatgctctacctgtgcctgatgaaatttgtatccatattcagggttttgttgaagatcagtttggcttaggtttgattgccagagcagttgaagaaggaatatctgtcatcaaacctgcagggattatgatatttaacatgggtggtcgtcctgggcaaggtgtctgtagacgcttgtttgagcggcgaggagtccgtgttacacagatgtggcagactaaaatacttcaggtaagaattttttctttaaagtcggaaagattatgctcctccacaatggccacttgacatgtgttttcacaggctgcagatactgatatctcagcattagttgaaattgagaggagcagccctcatcgttttgagttctttatgggactttctggagaccaaccaatttgtgctcgaacagcatgggcctatgggaaggctggtggccgaatctcccatgctttatcggtttatagttgtcagattcgccaaccaaatctggtgggtagataaagaagctttcatttacttaatgtgtttatcttaccatgaacaacaaagtagtcaattaagttggttgtgattgacaggttaagataatctttgacttcttgaaaaatggattccaagaaatcagtaattcactggatttatcttttgaagatgaaactgttgctgatgagaagattccattcctagcctatcttgctagtgtcttgaaaaatagctcctatttcccgtttgaacctccagctggcagcaaaagattctgcagtctaattgcaggctttatgaggacataccaccgtataccaattaatcaggatgtaagactattctctatctatgtttttgacagttttcttagagtttccaggcaattacttattcagactcataatgtatttccactataactgatgatatacgaaactcaggggcactaaaaattgttcaaaatctcgtggattgaaaaagaatggacacttgaaacttctggactcataaaatgtctagcactgtaatttttctttcatgcaaaaccttccgatcatatctgagtatgcttctttttgtttgcaagaacattgtcgtgtttccatcaagggctgtggcaatcgagagtgcatttcgtttattctctcctcgacttgcaattgttgatgagcatttaactcgacaacttccgaggagctggctaacctctttagccattgaggtaaatttcttatatccatatctagtagttttacattatccatatctagtagttttacattattttggaccaaaatggtgcaattgatgttgtgtacgcgcttatgcccaatttgatgctgttatgatgcttttgaaggtgtctcctagtgttatgagtgggtatatcttcaagcgggaattcgacataaataattgttactgaagtaggtgaaaattaacaagtctgaaaatgaacaacataatcagtcattgaatatagaagttggggagacagtaattcaagtgagaaggaatttagtagctagattcaaaagataattagaatctcatagatggtgtagagagttatgtatgtacctacaaatgagatgcaaaagctcctagtttttgaggctttgtttttattccatccatattatactaggattcaaaatttgtgacctgtgctgcgagaaagaataattgttggttcgtatattcttctactaatataaatttacttagtattgtaaatttttaacagatcaaatttctgcaataaatatcattttacttgatgctgctgtgaatttactgtgtctctctctcaagttaattgtttgcgatgtgcttaaccggaaacgttttaatcgtaggacactagcatggataaatcagatgatcaaatcacagtcatcgaatccccgcaccaatctgatctgatgatagaactcattaagaaactaaagccacaggtggtggttactggaatggctccatttgaggtcattaccagttcatcgtttttgcaccttttggaagtgacaaaagaaattggatgtcgacttttcttggatatatctgatcactttgagttgtctagccttcctgcatccaatggggtactaaaatatctcgctgaaaatcaactaccttctcatgcagcaattatctgcggtctggtaaagaataaggtaaagatttcgaccaaccacattggtgacgagtatgcattatgttgtatctcatttaattgagatctaactaactctgagatcaattcatgatcttaacgttgtgtcatgtgcgttcaacaggtctattcggatttagaagtagcctttgtcattacagaagtggatgccattgctaaagccctgtccaaaactgtggaagtcttagaaggtcatactgctattatcagtcaatactactatggttgccttttccatgagcttttggctttccagcttgctgatcgccatgccccggctgaggtatgtagtttaatctattctaacatacgtgttagattttttttcagagttaagttaaaaattaacattcgtgttagacttgcatattagtattccttaaaaaaaagaggccggctgaaaaaagacatgtggtattcttggaaaagacatttagtgatttgttttcatgacaccctaaacctcataatcccggaccgataggagtaacaaaaaaaaaaaatatagattaagctcgcttgtagaacaaagttaaaccaatgtgtatatcgtaaggctggaaactctactcagttctctattatgtggcttgtagagggaaagtgagaaagcaaagtctgaagagatcattggattttcaagctcagcagtctctattctaaaagatgctgagctttcagtcactgagattgacgaaacttctctaatccacatggatgttgatcaaagtttcttgcaaattccacaatctgttaaggctgcaatctttgaaagttttgtgaggcagaacatatctgaagcggaagttgatatcaacccaagtattaagcagtttgtgtggagtaattatgggtttccaaccaaaagcagcacaggctttgtatatgctgatggctcactagcactattcaataaactggtaatttgttgtgctcaagaaggtggaacgctttgtttacctgctggtacaaatggaaattatgttgctgctgccaaatttttaaaagctaatgtcgtgaatatccctaccgagtctagtgatggctttaagctgacagaaaagactctaacgaaagcactcgagtctgtgaagaagccgtgggtttgtatatctggaccaacggttagccctacaggcttggtgtacagcaatgaggagatggatatactgttgtctacttgtgctaagtttggagcaaaggtcatcatcgatacttcattctcgggattagaatacagtgcaactagctgggatttgaagaacgctttgtcgaaaatggattcttccttatcagtttcgctgcttggatgtctctctttgaatttgctcagtggagctattaaactcgggtttctagttttggatcagtctctcatcgatgccttccataccctcccaggcctgagcaaaccgcacagcactgtgaaatatgccgctaagaaaatgttggctttgaaggaagagaaagcaagtgactttctggatgccgtttctgaaaccattaaaaccttggaaggcagatccagacgcttaaaagaggtactcatttctgcctatactcccttttgcattatcatcagagctcagattgtcttagattgtttgcaaataacaaatgaatatttcaaatggttaaagctgtgggaaaggctttagtggtaccgctcaggtctttttgaatctcatgttgttaacaatattgcagcagaggggtaaatggagtaaatgttgatcgcataatcgcatgatgttaggttgttgatcttcctttttaaattattggaacaggtactacagaactctggttgggaggttatccaaccctcagctggaatctcaatggtggcaaagccaaaagcttatctcaacaaaaaagtaaagctgaaagcaggagatggacaggaaatcgtcgagcttacggattcaaatatgagggatgtgttcctcagccataccggtgtttgcttaaacagcggttcctggactggaatccctggttactgccggttttcatttgcattggaagatagtgagtttgacaaggctattgaatcgatagctcagtttaaaagcgtccttgctaactgaaacgtgccagtttcatttacgatgtcatcaacttgaactaaagggcattgtgcattgctggttctgagacttaacacgtcgctcttcttctgcgttcctttgttctgttgtttctaaataactcgcttcccgtttcttggtcagccccataacgggtttactttttggaagtatgatattttcatgctaataaaggagtcataaaactttgaataagtcttatattttaatgtgaataagtctccttgtttctatgatgtttttttcttttatgttcgatcttgggctctctatgatgttccagaaaaaaagaatgtgttccagaaaagatatcaaataagtatctcaaaatgaatccaaagctaaatggtttttgacacctctaccaattcatacattctagatctggtactatgtatgtttcgtgaacccaaagtttctgactttctgtttatgaacctgtgtaacaatcatgatgtgagaattggtacacaaagaagattcatctgttaaattacaccagtggcattctcacaatttacaaaagctacatatcgttctattttttacagcctggttaataaaacgtgtaccaaccaaaacctgtttttttcttcatgaaaccaagacagcaaaatttagagtgtgacagtgaaataactataaaagccgattcaggtcgatgaccagtctcaacaggcgatgtttactccccctccttcacatgacataacctagcccggccaggattaagcagagattctgacattctccaaccctatcaaaatggaattttcagatgcacactcgattaaataacttaaaaaggatataacaggtttctcccaagttacctgttctgcagccctgcttttgaagacgccatatgatgtggaaaccatttcacacgactcagcaatacgagactcgagctcatattccgtaggagcaaacgcaggatctaattgctccaccgatcttgggttaccatcttttgattgattcatgaaatgaagaagcacatgtgcctgtgatatatgatcatgtaaccgaatgagaaaatttaggccaaaattacttcgtctcaacagaatagtaattaaacagatacaaaatcatcctacatgaaatgctgctttgagaatgtcatctgagttagcctgatgtttgagcagtgcatagactttacccttggtagggctgtacgttaccatgtatctttctttctgccattagtaaagagaataaagtcaattacagtatcaagataaagcggtcaaggcttgatattaagggaaaaaacacatacatcgaaaaaaggctttacagccatatacgtgctggggtcttggaatgcatccttaaatctggctcctgtcaaattgtatgaaaaacctaatcagtaagggtaatgaaaaaggaatataatttatatggaatgcttgataacacataccaagcatcactggccgatcatccacccatggaaaagtgaatatcttttcttggatattaccttcctgcaatgagggaacccgccctgcagatagatggaaagttcaatctgtgaagtttgaatatgacaaacctcaaaaggggtgggaaatcagagctctaggagcacactcaagtgcatgctagcaaagtgacatagcttacccgtcttaagaaaggactccactgctactgtaaatctagcacggtttagtgtatgcaatactacagatctaacctgtaaaggacacagccacgttttttgagcaataaatcaagagaaccccaagtacataaaaagagatatacttgaaacagagctggattctacctcttggtacgagctcatgagatagccacatgatagaagaccaaatgttgtgaccaacgaaggatttctttttgatatcaggatgctaaacccagttcccatcttcacatagaaaataataaaaacaaatgaaaattttagagctcaaaaagagatcaaacagaatctatttcgacccttaagcaacaagtagcaaactagcaatgtagccacctttagttcaaatttaattccgcttgacagattaaaccaacaaaacacccaagaaacaatgaaaactaatgttgaaaaagggtcataccagatctgcaatattaccaacacactctcctttagcagttacgtctcctatgttttctcctttagcaaaggctttatagatcggtgtacgagtagacgttgatgttactgctgcaacattctgtgataaaacaaatgattgatacaaaaacaaaaatcaaagaccaacaataacattgaaatcgaatagcaattatgagtgataaaagatgataaaactaccttaacaacattagcagcacaagccagtggaagaaaaagatgtggaactgcagccgtcgccaactctacaccagcaccgagctccatcaatagatcaccagcaaaccgtaactgcaagccaaagtgagtttaaacgtgagagagagagtcaaccatcgcatttgttaagtaatggaataagtacctgtttcaaatcataatcaaatttctttccctgcctcgcaaaaagcattttcccaacacgcccagcaccatcctacaagaattacattgatattcaacaatgagtgagtaagccatgttttaaaggattgttatacatgcatgatgcatgaaaggatatacgagaaaggaaaaccttgagaatccaattgatggcaacagcagcagaagcagaactgtttcttgaagctccaacagaattaagaagagtttgagtagtaaacacacccatagctccaccaaagaaatgctacacagtcaaaaagatcaatcatttacactgaattctaaaaaaaaacttttagagagtaacgaaacatactttcaaagctctccaagtcatataaggaacataagactcattaacactcccaggaaagccttcaggtacaacgtaagatctaagaaacgaacccacttcctgtaacaaatcaccaaaaacaaaaattgaacacatttcacatatttaggaaaattcaaaaaaagagttcatcaatggaacaaggcatacatcaaaaggagtctgaggagactccaagctaatagcacgaactgaattcttcttgaatctcccagaaccatcgctctcagcgacatacttaaaccgacggccatcgatttcttcgcaacagatcaatctcagagtcgaatgaagaaattgagaatctggaggtggaggagagtgaggagggagatcatcaacgggaggagaagcgagagaggcgctgattcggagagtttcacgggaaaggagacggacggagtcggaggcaatagtgtcaggtggagaatggtgtgtgagcttgacgcttggcattgttgttgttgtaaatctaatgaaggatcgatgaagaagggattttaatggagtgtctctccggcggaggaaacgagggaagctctgtagaagaagaagcgaaaccagttgttccacaaacaaattcacctccaatattttattattatatttatctcttcttttattctttttagtcccacagtgtatatctgacaaaataaaataaaaattctgatcaaactagacatttaaaatactttaagttactttctcaccaaaaaaataaaatattttaagctacataatagaaataatctattgaataaattgttgtgttttgcaccctgataattcgatttttgtaacgaggcaaattttgttaattaaatatcagattcagctcataacatgtgaatggtaagtaagctgaaatcaaaatgttcagtaatgtagtctgattgtgcctcctcccacgtgattatagactactatcacttggaattatcattggaaaagtcattacctgaaatctaccatagagctatcaacatcacatcttccttgccatgttttatacattctgaggctccgaatggtgactgcgttttgcggtgcggaagaagtgcggtgcggttcaaataggaacgaaaatacatagatacatatgtatatgtaaagattttgatactgttacagcactgttgcgatacggttttggttaccattcacagcctgagtatcaccacctacttttgtttgtcatctgtcaaaacatgaatctcaaacatgtagagaagcaaaggaggtgtttgcatcaatggcgagggatgactctagcatctctaagcctcattcgcgaatgattattgccttatcgggcatgcgtggccaaattaccaagcctttaagggtccatgtggtaggtaaccgtccttacccattattcaaacttttgtacatcccaagatccgacccaccgtaccaagaattagactaggagtttacacaacacgatttacttaaaactaatttacgctatgaactacatgattcgagtaggaaatacaaaaagtgaatcgtaagatatctcattcaagtttgctacatctgatccaataccaaaacagaaagagagtgtatcatagagaagaaagatcaacactctcttcaatattttaacccaaagaatgcatccattgagagagagagaggaccaatacaagaaaacaaacatgtcaactcaacaacatttacacgcccccaaaatcatctcatcaacaactggagactctacaaaatagaaagcttttggaaaagcagagctgaaaagagaagatcaaaagttattgaccattcaccttcttaacaaatgtaagatgggtttggtttcaatagctgccatgagatctcgctgatgaaacagactgagctgacactgaagcagtcggactgtggacatccccgttgttgccctttgtcttgccactcaatctttccatcgcatccacacatatgtcattgaaccaatcgtcttctggcagctcactgcacatcattcacaaccacattttaatcatttatacttaccataaaggctaaaacattgcaaaacaccctcaaaaccgatgtacctatatggatctatccctgttgcggtgaaagctgctaaggctttagatattatctcattagttcccctgtgcaaattcctcgataggtagcgaccttgggatgcaaagcatatgacaaacttcatgtccaaatacagctgtgacagatgcaggttgtttgttaacaaaggtacacaacaatttcgatgctcgctgaatatacatatacagaagcaagaatgagtgtacaaacctgccgtaggccaagaggtcccaaaggtcgaggaccttcctcaatgtcatcccaaaagctctggtctccagaaagccataagatcacagtctctgttaatcgcatcaacaaagatatggcgaatctttctcttcctacaaacatatctgctgctagacttgccatcctgttaagtttggcaaaaagttcctgttttccaacgacgcaacacccaaagtataagaatattaagctaaaaaagacagaaaaaaatcatgttcttgaagtggacagtagactatgacaaacatggattcaactctacagtatccaatctgccgataagagttcccaagtgactacacatctgggtacagtacttcataaaggctaactggactgatggaaatgaaacaacaactacctggaatatcagagatggaaagaagtccacatcctcgccattttcatctatgtttacgtacatatccgcagacagatggctatctccttcctcagtaaaaatgagatccaaggcatgctggcgacaaaacgcatcttttaacttgtcaacagtactaagtaaacgcctcttccattctcgttgttcaggattacgattttgtctgtccaaaggtctccttaggtcgtctgtcctctgaccagtctgatcaagagagagtttcatggcagcacgtggaagtaattcatccgctagcaatgatgcatttgcgagtaatgcaagttggtttgcctccgtctcagccatttggacaatcttattacatgaactttcaaaatttggatcttcttcttctatcgaaccaggaagtgctcttaccagcacatctacatatgagttaaacacccgaaacagaccttccagagctttacttcccaattgcatacttagcagaggtcctacgtcctcaaagaagtcctgcaacaaaataccattatcaaaaggatctacttgacaaatacatccaaagttcatgacagtccacttgggaatcctctgcctatcagagcagctaagacagaattggtactgcctagagtttataataacttttcagtgggaacgcgagtgcaagttctaatcaatcgtcatcaacgatggctagtcaattttacagctgatgtgtaaactcatattataagcaattttcatgggatactggcatatctaagagacacaccagacgtctaagagtgaaaaatatttcatttttctaggcatgtctgcatttcctaagcactttatttttctagcacaactttagaaaaaggctgaaaatttcggagaaaagtgtttgtcaagatagtctacctggaccatgagattaaaccggtgggcactggatgtaagcttattctgaaatgctgtactagcatgacgactaccagcaggaggacttgtcagtacccaatcatctgcagcagccatagctgcagtgttttcttcaattcgcttaagatttgcctccaatgcctgttccacaataggcttaaagtgctttaaaagcactgggcaaagggacaaaccacgagcttccaacaaagaacaatgcccaagagctatctgtgcacactctgcggcagctcttagtcctcccgctgctgcagaagaagctaatgcatgccttttaacaagaagggaaaacgcctctgtttgcttagtagcccaagtcacaagttcagaactatatgctggctctttcccaaagattcccaatgagtcactagaagcttgagagatagctgagaacacaagctgagaaagtgcagcagtgtacgcccctccatatgaggtgctagaaggacgaagactttgcatgttgtattgatatctctggaaatgggcatcaagaagtacagtatgggctcgaggaccatcgccaagccttttgagagctgctatggctgaccgaagttccccacctcgagttgaaggttgacaagcagccttggcaagttggtcagctaatttttgcttgcgttcggcaatagcaaactgaagagatgaaagtacagaagagcttaaagtatgcttttcgtttgcttgagatactaaaatttctccctcatcaaaagctgccagagcttcatccacccttctttcagctaataaagcatcaaggtggtcaggaaattccgtagcccatttctccagatcagagaggccgttgtcctcaaaattcaataaaccattcgcaagagattcatcagaaactttatcgtcatcaatgttaactccatctgctaagccatggattagagtcgcctgagtggagagaagatttctgatagatgatagctccccctcaagatctgatatctctttagatgtgctgcacagaacagaaaaaagtttaattttcaaaataacacaccgccaagaaaaaacaataaggtagtgcgaggaaaaagaagtcatatgcaaaacgcaaatgcaccaatacccacaagaaatgaaataacttgaaaaagtagagctttattatcacatcaacttcaaagaaaataaccaagcactaaaaacagacaggatatcagctaaccgtataaaggctggataattagcataaacacttcgccgcatttcttcagcagatgctctcttcaaatccaatagatacgagcataactgctttatatcctgtgaaccgaacagaaatatgtcatcatcccaaaataactgagaaaaaacaaagagtccagccaagtaatccaacaatctatgttaaccaaatcaaacactactctttttgtagtaaactctagaaggcctaaactaacttttccctcagctctctcacaccatcacagaaagtgactacacagacgagacaccctttatacccaataccataaccgaattgaatcttttctgtaacagaaaacgagaacaacagattctgtctctgatacaagacatagtcatccatgtatattcacatgagctacattctgtattacactgaacacatcatttggcaagctaaaagcttataaatgggtactaaacctatcagcatttcttaagagtaacatttttacataatcataattcacaaactgccttcaaactccagaagatcacaagaacaaccatacaagcaatgagtattgttacattgctcatcatcttctcgagcgtataaaatctgctgctacctaatatccattccacaattacgatttcctacagctaaaacgaaatgcaacaaaacaagaacactgcgatgatacaatcccaaatctacgaacaagtccccacagactcagtcctagaaaattctcactcgtgataacaacaaatcaacgagaataagaacacgaaatgataaaagaacagaaaaaaaccttctcgttgatagaacatttggattgcacataagcatcagcatcgaacttatcagacttgaacagactcaatccttcctcgactctgacaccattttccttcgtcggcgtagcttttgatctggccgtcttcgccgccatcgttaaacttgcctgtcttctcagagaaaacctaaaatttcacagcggttccagatcagcaatcccagtgatgccggtaatgttaccggagaattaagcacagatctgagggagctcctagatacggagagcagatagagaaagtgggtagaagaagatgatgatcgagttggcaaccagagcgatttagccaacgacggtagcttggctttttcgtctgcttaaacaaacgaattttcttgttgaaaactaataaataaaataacgactctgggttttttttactggattttttactagtaaacggcaaaacagaaaccctctcatttgcacggaggctttcctttatccttcacctctgccatcacttgagctaaaccgacgccgttttaaagaatgcttactttaagattgccgttaatgtaaatctgagcaaaaacctttgaagaatcatatcatcgagacaacagagagagatgttttgtagcttatccatttccagatttgtctcgaggaagacaataacatcatcatctcttctctctcgcagtttcagattccttctctccgttgattctcctcctcacatccctcttctacgcccttcttccaacaccctaatcccttcctcttccttctcccgccgtatttgggactcctgcagcggcggcggcggaggtggcggcggagatgattatgatcacatcagaagtgacgtcaattgtcctcgttgctctgctcagatgcacgtcatcttctcaaatcgtccattgtctctaacagcaagagaaccagggatctatcaagctgttaatttctgttctcaatgcaaaacagctttttactttagaccattcaagctctctcctttacaagggagttttattgaactcgggaaagttaaaggaactgatgatgaccatgatgatgatgatgatgatcagaaatctttccctaggaattggaaaattcaaggtcttagaagcgatgaagatggtgaggatgctgatgaggaggaggatgaaagtaatggtggtgataaagagaagcaatctgtgattaagcttccaactcctaaggaaatttgtcaagggcttgatgagtttgtcattggtcaagagaaggctaagaaggtttggtttcggtccctagcttcttcttctttgtgtctaaattagattcttgtttacatatctttccttttgtgcaggttctttctgtggctgtttataatcattacaaaagaatatatcatgcttctaggaaaaaagggtttgtcttcttccatgctcttatcattctgatactttatatgggatacaacaaagctcgattcttttgctctttttttaataacaggtctgcttcagaatcatataacattgatatggaggatgataatattgatcacgtggagttggataagagtaatgtgttgttgcttggtcctactggttcaggtgcatattgttgcttgccatattgttttggagagtatttggagatactgtttagtatgataatgatcttggcctttatgtttcttgcttggttataagaacaggaaagactttactggcaaaaactttggcgcgtattgtcaatgtgccattcgctattgctgatgcgacttcactaactcaggcaagttgtttcacttatccctcttaaggtttgggtactcagaacattagtatgttgtacattagggaagcattaggcccactaggatggatgccttacaatccctcatttcgaaaaatattttgaatgaagtgatgatgtttttcttgctttttagaggaatcttaacacaagtcttgctcttagcataactaaactactcttcttgtccaggcaggttatgttggtgaagatgtggaatcaatattgtacaaactatatgtggtatgtcttactatcacctcatattatgtctctggttttacatatttgtttataccttcatttgtaatataatcttaacaactgcttacgaaatagtttttcgctgactacgtctgaaactacaaatgtactttgttcctgtctttgtaacagttcaaaaaaaaaatttcttctcaccactttcttcttgatccactattttagtattcggaaaatcttgttatttgcagtattcatgttaatttctttcttagatgctaattagcaaccgctttactttgttactgcaggaagctgggtgcaatgtagaagaagctcaaaggggaattgtgtacattgatgaagttgataaaatgactatgaaggtctgagttttcttcactctttacttttgattctgaattggttgatactcaatatttagcaagttatttttcgctgtcagtctcatagctcaaatggtggtagagatgtctctggagaaggtgttcaacagtcattgctaaaattgctggaaggaactgtaagctttttctacttgaaatctttaatttaactcaactgcatatagactgttaacagaaacgattaggaatactctatgccttgataatatatctaatcagcaaacattatgaggaaacaatatagtctgggaatctcatcatagcatttgccattctaggtgatccaaaatattacaatgtccagcttctgttaattactaatttgcaggtggtcagtgtcccgattcccgagaaaggattacggagagatcctcgaggagatagcattcaggtaaatgcgtgaaaatcgcctgtttcaagctttcttttgtgcatgtcagaatgcccttttgtggcacagttagccacaatactcggttcatgaaaaagctgaacctcttggtggaaaataaaaattgcagatggatacaaaagacatcctttttatttgtggtggtgcatttatcgatctggagaaaactgtttctgaaaggtaagtttctcaagtcttgtagattcagcaaaaatcttccatcctatccttttctctgtgttcgatagggcttgaatggcatgattatatttctcttgaccaggcagcatgatgcctctattggttttggtgcttccgttcgtacaaacatgagtacttctgggttaagtagtgctgctgtaacatcctccttgttggaatctgtaaggaatttgtcctcatgtggctcactaaattgtatgctagtctttcgtgtatattttactgtcaattgatgcaacttgttcattgtctaataaaagaagcacttataattattggtaaatggttcatggtcgtagttacaaagtgaagatcttgttgcgtatggtctcattcctgagtttgttggaaggttacccatcttagtgagcttatccgcattaaacgaagatcaacttgtacaggtagcttgattcgatttatttatcttatggaatggtttcaaacattctcgattagttttccattggtgtgtattaagcaaaagacttgaagtcttctataaaactaccttattgtcccagctgcctattgttatcccatttcagtacatgagtgatagctgtatgagatcgcacctggagtttcctttaattttttttatttcaggcagccttctctgttgcaatttataacttttttttattcatatgcaggttctcacagagcctaaaagtgcattgggtaaacagtacaagaaattgtttcgcatgaacaatgtaacacttcttaccactccatgttgacttataagtgcatcctccctttactataaacctctttggtgtttgattatgtgttaggtccaactgcaatttactgaaggagcaacgaggctaatcgcaaggaaagctatgtcgaagaacactggtgcacgtggcttacggtctatactggaaagtattctcaccgaagcaatgtttgaggtatgaggatttcacccttatagtttttgatacttcaatgtagatattcgattgcaatgtactacaaataccctatttgtgtgttttaaatgttaaatgtgaattcttatcaggtaccagatagcatcacggaaggatcacagagtataaaggcagttctggtggatgaagaggctgttggttcagttgggtccccaggatgtggcgcaaaaattcttaaaggagataatgtgttgcaacaatttgttgaagaagcagagtcaaaggtaagtaagtgcagcacgtgctaagttgacgcaccttacgatgtattttatgcgaaagcttcagaaattgtttgatgttataggagaagagtaaggaggatgaagctaagagagctcagagtatgtagccaagctgatgtcatgagaagtgtgagtaatgttagatatatagggcatgaatggtctcagttggcaaacctcagtagtttcagtgttcagattcattaacaaagagataaagagtaaacagtattttaatggagagagcactctcaaacgagcttgttggataagttgtgaataaaaatatgtgagtgtgaggaatgcactctacattgtatgagatagtagtatgaatagtcagatgcaattatatctattttgttacttctattcaagtggtcataggaccactctcttaagttccatttcgacgggactaacctagtcaagccaaaaaacgatatagaagattacagaccaccaggaaaagttgtgattgtgcgaccttgtcctgtttttgacattgggaattccacaagtctctgccacaaaaatggatagaatagttctcttgacccacagttgtctcttttttcagaggaaacagaccccctcccccaaaaaatattggttagatgggtgatgagtatttcctgactttattccgaaccttgagcacaaggttgttgttcgagaaaggggtattgatgggatagaacgacgtgaccggctcatacgagcaaggaagcccacaatgagtagtttattagtcagtagatttgtgagtttactggatttagatggaaagtgaagaaaatcaaagagaggcttgaagatatcaaaggcaacagaatattgttcttgaagtttggaagcaaacaaattaagatcatctctgattcatagaacatatttttctttttcgtggaatctggaaaaatgaatctcgcttctggaagcggcctattgaacacagagaagttaggaactagtgtcacatcaactccatacactttattaaacagaggaatcattcaaaagttcataagatcttgagagaaaaaaaaacagaggagaaacaaatcaaagttattgaaaacagaggaggatactatttcgtttaagtcatataatatgatcatgggtcggtgatggggagcacatggatcccaagtttatgaagcatgttacttgattttccatggaacccaatgattctgtgacctgccttgtggagcacgaaggttgggtcatcatcgagcccataacatggagaagttcgcttgttggtggtgaacttgagcatgagtataacttcaacatcttcacttccaggtattacgtcataactaccttccactgatgtgaggtattcgcaagcattgtccaggtcgaactacaattgtattcaaaagaagaacatcagagatcaaatataaataaccttgtataattggataagtaggtaataaaagtgaagtagtagtaatcacctcttcatgtcgaagtaggttcttgttcccatgatgatctcccactactatctcttcaatgtcattttcatacaaaaacctgacggaaacaataccaacctcacatgttccaatgtatatctttctaacacgttcaaaattactaccatcgtcccatggaactcctccagcaccaccttgtgcttctagcttttccgcagcaggaggaagaggcatcggataaaaatgtgcaccaagagccgtaatatacccagccccaagaggtgcataccatccatgaaatccgacaacggcacaacctttgctctcaatgacaaattcaactgaatcagaagttctctcaccaaatgtcctagaggttctcccttttgatgttttgaaaacaaatgacgtaacataactatcattcatggtccccacaatggacgtgataacttcatatggatagtcaacaacaaactgcaataaccagaataattaagctattcaacaacacctacatatatgtatattttagttgagggacttatagatataagtattctcacctcgtcagtgattcgcgaatcgtcgttcattccatgggcacgctttactactttgccatcgttttcatagttgatccggaaacaccgtatacaataagatctccatgtaacggaaacctttctaataccttcaaaagcaccactatcccaaagggtgcttcgttcagtaactccttggcattctgactttgttggaataatcggtgtgaaatatcctccaagagaggtaagattcttctcagcatatccatgaaacccgacaatcttcattccactggctgcaagtctaaacttcttacccgttttgggtcccataagttgtgaagtcttgacgttggttctgaatcgaagtgcttgaatgaccgcacagtcgccatcaccgtcatagtaaccctctaccgataccagatattctttgtcaacatgtctaatctcaaactgtaaaacaatgtttacgtctaagatttagcattatactcatgcaattgaataaacagaatttttactatttctccatgatatgtagtacataccacgtgtggggaacctcttctgtaaatagaaccatggattgacccatctctcagacgcccattcttgtcaacatactcaaacttgatgaattgtatgccttcttgaccacttcgtacatgtatctttgtaaaacctgcctggtcgactccatcatcccactttgtgcctaccttgccccctatcgcttctattcttgtaggagtaacccgagtgaaatatgctcctagagagtacagcctgaaataagttgatccgtgaaacccaatgattttttttccctctactgctaatatgaacttaataccatccttgccaggatatccaatcggttcagaaatccgcaagttggttttaaattgaagtgtttgaatccctctctgtgtgtaggagccctcaacagattcgagatgttcattttttagatggttaatctcaaactgcaaaatttggtgaaaaatggtttacaaaattttcaacatctaagaaagcaaaaaaaggttatgacagaaagaaaaactaaaagtgaaattttctaaagtcagcatataccgtatgcgtgtatgtattatacgtttcaccacggaagggtccttcaattggttttccacttttgacataatcgaagcgaatggactctatgcccataagagaataatttacatatatctttgttacatcatcgtggtcagatttgtcatcccacctacggttgccatccttccctaacgcttccgatctttcagtcatctcgtaccggttgaatcttcacatatggatggcaattgtatgtgtttcttagtcagtaatatataccattttcaaccaaggatcaacatgtaaaatttctaagttgaacgaagaagatcaagtttttgttttggtgaaaaagaagcggatgaaactattatctataaagtaacatttcttgaatattcgatgctctacatttttatgaacatgctcattacgtatgcaataatttaaatatgattctgaaacattgctgtaaataaaagcaccatatataaaagagagaactgacctatgatcgtcgaggagagagaggcagctgattgaactgagaggctatgttgatctataaccaaaagatgaaggagtatctatttataggcttttcaaaaaagaaaaaaaaaactttaaaactttcttactcgttttgagaaggaagaattatacaaaaaaaaaagaaaaaaaaaagtctgatttaagaaaatgttgagattttactttaaactaatattgacattagtaaacaaacaaaaagagtaaaaaattaaagtagttgaaactcttggtctttttgagagccacttgataaattaatttcaaataattaagaactccaaaaggtgacatcaagatattttcccaaaaataaaataaaatatggaacaagtttttgtcaataaagtggaaccaactgtatattatttgggttttcttaagtcatcttccggtcatattgtattgtatatgcccttacgtagatcaaaatctaataattatataagactcatgtttctatagtcgttaacatactatatatagccatatcaaaactttttttttaaagtatgttaacaaattattattttaaaggactagactttcctgaaaaatccaacagtcaatttttaaagctacacattgtacaaataatggatcggaactctacttgcatagtttagctttgtttttgtcatagccgccgactctgacggttggtttcatgtctttatcatgtgaggctgtgagcatagattattttatagtatacgtatcgtgtagcgcaacgaatgaaaaaactttaggttttgttttacgtagatgagcttcgttaagtccattttatatatcacgggtctaaaatttatacaatcataaatgacctaagcagaaaaaaacaaagttcggtcgaacaaacatagactacatatataattccagttattatatacaaatcctatttttatcatatttgtataacaaattatgataacagagccaagtaaaaaaactacacattgtgcaaatgaagcaagtttatttgaaatacctcttattatataattccagttattatatacaaatcatatttttatctttttatattttactgattatataagaaaagtcacttgtcatttctaatttccaacgagagaatccacttatcagttatatataatttatctaacattttaggtcattttcggtatcatttcaatcctcaaccacaaatgatctctcttctctcttcttattctactatatagtgtgtctgaattgtaacaagcaagtgtaagtaatgacttaagtagttctgttgcacggcacaacataatgactcttataccaaatcattgtcttaatctttcttttgttccgttcatctctttctccattttgttgcagtctttttccagccttttcttattcttattaagcgtataaatcctccacatcctagcagttagttcacaaataatatgttgatttagaacttataatttatttcaggcgaagcgggaaaagtttaaagccttaatcgaacctcctctaagcagctgccaaggtaagtacgtcccagtatttaatcacatgctctaataatgtagaaaacgtttgtcttatataagattgtcgattaaacaacataagagacaaacgtgtggtggaatggagtaaaagataatcagatgtgaatggcatgtttctggcttttccatggaaaccaactatccttgtggagtaggaaatttgaacttaaatatgaaatctttaacgttgatttaatgcagaaactaacccacgatgagtactttattagatagttgatttgtgaatgtactggatttagaaggagaatgaagaaaatcaaagagagaagtcacaactaacttcacatcaactccatccactttctcaaacagaggaatcattcaaaagttcaaaagattcagagaataaaaacagaggaaataaaagcagaggagaaacggatcaaagttgttgaaaacagaggaggataatgtttcgttttaagtcataaaaatatgatcatgagtgggtgatggggagcacgtggatcccaagtttatgaagcatggtacttgattttccatggaacccaacgatcttgtgaccttccttgtggagcacgaagcttgggtcatcatcgagtccataacacggagatgttcgcatgtttgttgtgaacttgagcatgatcataacttcatcttcttcacttccaggtactacatcatagctaccttctactgatgtgaggtattcgctcggatagtccaggtcaaactaaattaaaaaaaaacaagataatccaaaagaataacatcaaagatctaatatacaataagctttgtataattggataaaggctgaagtagtagtaatcacctcttcatgtcgaagtaggttcttgttcccatgatgatctcccactattatctcatgaatgtcattttcgtacaaaaacttgatggaaacgataccaatctcacctgtcccaatgtatatctttctaacaccttcgaaattactgccatcatcccaaggagctcctccagcaccaccttgtgcttctagcttttccgaagaaggaggtagaggcatcggataataatatgcaccaagagccgtagtatacccagacccagtcttataccatccataaaatccgacaatagcacaacctttgctctcgaggacaaattcaactgaatcagaagttccgtatccaaattttggagaggttctcccttttgatgttttgaaagttaatgacgtaatcacgttagaatccatggttgaaaacccacatccgtattcaaagcctcaaagctaaggtcattattacttttctctcataatgataaaaattaaaacaatctctctatacgctatcctagattcactctctactgaaaaatatagcaataggatggttgttcgtctcctccccatacttgaaacctgagaccacgaaaggaactttacctacccatacaagcttccgtcgtcctacctcctcccatgcctaagttcaaagtcctattctaatccacaatcagtaaatttgatgtcgtcgcagccttcaaccattattgaagcaacaagaagtgaaattttgttttcactcaaagaacatctttgtacagtgttaaaaacactaatgctcgactggttttgaatttttcagactatgcacgagcatgtaacaaattatgttttattgctactttgctttcacgttaacttttagatatgtatatttcgttattacgatcagatattgttgcccaaatatcatcttttcagttatatttcatgagcctgttataatctcaaaatgaccaaatttggttctgtgtttgacgtttgttacttgtgagttgtgatccaacccaaactcggtgaatgtaattttgaatgattgtcgatgatggtcacaataactttgttattctcgatcaagatgcaacacaaatttaagagatggtaagttggtaactatttccaataaaatataaatggaatcaataagatatagcttccaaacatgtatgtggcagatgacttattaatctattgtcctcttctttgaaaccagaaagttacttaacgaccaactttcctagggttcacatgggttgcaatgaccacaacagtttcgtctttaatcgaaataagcttggcatgggcgtcaacaacaagtttttcccaaagtgagatataaacagagtcaccactataatgaaaacaaagaatcgaaaaaacagttgtaacacacctattgtaaggaagatgatatttaaattagaaagagaagcattacctttctaaagtgcaagtcaatataataatgaatgttgtatgagtttatatcaacaaataatttactttattttgtaatctactttatcattcatttattttgtaaaaataagatatgatatgtttattaatatatacatgcataaataacatagaaaaaagaaaaactgttaaaatgtgagaaaataagatttcaaattttaacagatctttaatttttttaatcatataatattgaaacaaaattatcttaattaattatgatataaataaactaaagttgggaaaaattcttgtaaaattggagaattgtttttagtagtgaactattatcgtgcagtctaaaacataacatcatgtcaaaattttaaagatttgattttgtaattagttaagggagttacaattatgctagaaaaaaaaatcaaaaattgtagtttaatatgtagtaattttcaaagtttaatgacatttttctaaatatataatatatttattaataaattattttagacttactaccagtaatgacaagtacatgtgttatcaaagtatagtgtcaaatatcgcattggtaggcaaagttagagaaaatatgaggtgcctcagctcatcaaagacttataggaaaagtttgttggcatccatcaaagagactaatgccatgtggctctaacattagtatttttaagacactaagtaataactacgaatttttaaaaactaaattactacaacagaaattttttcaaaaagatatcaaaaaaataaaaattatatatataaatataaatttacaaaccaaaagaaaataaaataaaaccaaagacagctttggtttaggagttcctagactttgggattaagcaaaatcaaactgacaacacaataatgacacgtaaatattcatatgttacagaaaaacaaatacaagacacaatagtaacaaacaaataactggaagccatatgatcgaaaattatttttagaaaatcaaacatagtcaaaacaataactacgtcaaaacaaattgtatccttcttaaacaataactattttcaaaaactttaaagctctaccctctcccctatttccgtttgggaatttcttatttacaactgtttatctggttagcattttagtttcaaaaaactctttgtacagtcattagatttgaaatgaatttcacatttaaacaaaaaacaaaaaaaattgtaaacaggtaatatgtgcgaaatatcttagaaaaacatgtctacaacatctttgcataattttgttttttcaaaatgacataaaatcaagggaattgaaagatgaaatgccatattaaaaaaaaaaaacattttttcagaaatgccacaatattgttatctttccaaaaatgccaaaatccagcttttttggtcatgatgagtaggtgaccatttttccttcttgaatctggcgggacaacatgtaacaacatgaaattaatagaagaaagtgaaattaatgtccaacaaactaagaagtagacaatattattagaccagtagacaacattattagataagtggacaacattatatcacacaaatttatcgttgtcatcagatactgagtcgaaatccatcacctttggtaacttcaatgacgacaaccaaaggtgagctgatggaccttatttctgagagagaaagtgtataaattcacagtccatattaaacatttacaaagaaatcataaaataaatcatataattgatgattcaattgcaaagtaccaataatcaaaataaccatatatcttaagactgaaaagaaacctaagacgtcggaaacggaaaccgaaaaccaaagcagaatccttcagtctccatgtctcatttgctgattagttgggaagtgtaatcatgaaactccattggaccttaaccgttaagcctcatagaaaaggttgttagagaaatcttggtaggtgatgttgaaaccatcgattttatcggtgaaaggagtcacaaaccaagaccgattagagaaatctaagagaaggtcttccataccgcttcaccaaccacaacgaccacaattggcatagggttgatgcaaatatagaccaaaggactccgactacaagaagaaagaaaaccataaataaggagaaaattcaagggaataaagtaagaaagaaaacgaaaaaggatctctctctttttgcctataatttttagggtttttcttattttctttagaacaaaaaaacttatttatacagcaacaaatagaaaagctttcctattttgtttgatgacattttgcagggctaattcttcatcaaagaaaaggattgtggcaccgaggaaaagattttgcacaaaataacatttctgatgtatttggtcattgttcatgattgcataacaattaatttctctaaaatcaatgaattgcagaaaacagaaaaagaaaataatagactaaacgaataaatcaaggactaactccatctcatagtattctgtcaagaaaacatcataacctacactatcaactatactattgtctctgatggaggacacaaaacacaaacactcgaagtctcctacgaactcaaagatctctatccaaatgcttccacaagattatatgtcaaactggtaatctaaaaccttaataaaacgcaaattcaagccacaaaagacgaaggcaatgattattaaatatgtcttgccgatttacgggatctaagaagattaacaatctatattgcaatcacaaatttcaccacgtatgtattacaaattggttacattacaaagccacataatgacataattgtaaaacataataaatatgatcttatcatacatttttctatcaataaagcaaacataactaataaatttcagtacaaatcctaaataacattaaaacacttaaatgaaattttttagtgtttatatatttttcctcccaaacatattacagccaatgcgatcaatattcactaaaattattatttctaaatttgaattagcggaattacatgtaaagcaaacccgtgcgtagcacgggatcaaccctagttatgtaatatgagaatgtttttttcaccattcccttttcctttgcaatggtctcatgtcttatatgtttctagcctcaaccaaaaaagatgaaaatgttctcttctctcagcttattgtactatatagctcagagtatgtagccgagctaatgtcatgagaagtatgagtaatgttagatatatagggcatgaatggtctccgttgttaaactttactagtttcagtgttcagattcattaacaaagagttcaatagtaatttgtgagagtagatgaatagtaagatgctcttaaacgtgctcttaaacgtgagtgtgaggaatgcactctacgttgtatgagagtagatgaatagtaagatgctaatatatctattttgttctattctagtggccataggaccaatttcttacgttccattagattagactaaccaccagcaggagttgtgattgtgttgagcttgagtagttctcttgacctacaatgagtagtttattactcagttgatttgtcaattcactggatttagaaggagagtgaagaatatcaaagagatgcttgaagatgtcaaagccaacgagtttcacaccagaatattgttcctg

SEQ ID NO: 866 - DNA, 70670 bp, Arabidopsis thaliana
aagcttcgaagcagacaagttaagaccacctataattcataaaacatgtctttctttttcgtggaatctcgcttcttgaaacagcctattgaatacagagaagtttggtgcacaaaaaaaaaaaagaatacagagaagtcacaacgagcttcagtccaactccatacactttattaaacagaggaatcattcaaaagttcacaagatacagagaatcaaaacagaggaaataaaaaagaagagaaacgaatcaaagtttttgaaaacagaggaggataatgttcgttttaaatcatataaatatgatcaggagttggagatggggagcacgtggatcccaagtttatgaagcatgttacttgattttccatggaaaccaacgatcttgtgaccttccttgtggagcacgaagattgggtcatcatcgagtccataacatggagaagttcgcttgttagtggtgaacttgagcatgattataacttcatattcttcacttccaggtactacatcataactgccttccactgatgtgaggtattcagacggatagtccaagtcaaactacaatttaaaaacaagataatccaaaagaataacatcaaagatctaatatacaataagctttgtataattggataaaggctgaagtagtagtaatcacctcttcatgtcgaagtaggttcttgttcccatgatgatctcccactactatctcatgaacgtcattttcatacagaaacttgattgaaacgataccaacctcaccagtcccaatgtatatctttctaacaccttggaaattactgccatcgtcccaaggagctcctccagcaccaccttgtgcttctagcttttccgccgcaggaggaagaggcattggataataatatgcaccaagagctgtcatatacccagacacagggttatgccatccatgaaatccgactatagcacaacctttgctctcgagaacaaattcaactgaatcatcaaaagaatagtctccaaattgtttagaggttctcccttttgatgttttaaaaatcaatggcataaccgaactagaactcatggtccccaccacagacgtgataaactcatttggatagtcaacaacaaactgtaaaaacagaataagctaaccatcaacaacatatatgtagacgaatatatagttagttataagtattctgaccttctcttcttgatgatcattgttgttcaatccatggctacgctttactactttgccagcgtcttcatagttaatcatgagacaccttatacgaagagctgtaaagaaaacggacacttttctaataccctcaaaagcaccgtcatcccaattccaaacattgcttccatcagtaatgcctttgcattccgacttttttggagtaagcggtgtgagatatgctccaagagagcttagattcttctcggcatatccatgaaacccaacaatcttcattccactggctgtaagtttaaatttcttacccgtattggatcccataagttctgaagtcttgatgttagtcctaaattgaagtccctgaatgacctcacattcctcgtcgccctcgtagtaaccctcaacagacaccagatattcttcgtcatgtttaaactcaaactgtaaaacaaagattatgtatcatttaatattatactcatgcaattggataaacaaaattttaattaattactatttttccgtgacatgtataatgtatacataccacgtgtggggaacctcttctatagatagaaccatggattggcccatctgttagattcccatccttgtcaacatactctaacttgatgaattgtatgcccttttgaccactacgtacatgtatctttgtaaaaccggcctggttgactccatcatcccactttgtccctacctttccccctactgcttttattatagtaggagtatcccaagtgaaatatgctcctagagagcccaccctcaaagcaaagcttgatccatgaaacccaatgattttttttccctctactgctagtataaatttggtacacccatcatgatgatatccaatcggttcagatatccgcaagttggttttaaattgaagtgcttcaatccctgtgtcctctgtgtagtagccctcaacagattcaagatgttcatattttagatggttaatctcaaactgcaaaatttggtgaaaaaatgatattacaaaatttcccacatgcgaaaaaagcgaaaaagggtttgacagaaagataaaaagagaaaaaaaaaattctaatgtcatcttataccgtgtgcgtgtaagtattatacgattgaccacggaagggtccatcctttggttttccacttttgacatagtcgaaacgaatggactctatgccactaagagaataatttacatatatctttgttacatcatcgtggtcagatttgtcatcccacttactgttgttgcctctcctgctcccttccgcttccaatctttcggtcatctcgaacctgttgaatctacacaaattggatgccaattgtatgtgtttcttagtcagtaatatatacccttatccagccaaggatcaacacaagttctaagctgaacgaagaagatcaagttttgttttggtggaaacaagaagcagataaaactaatatctaccaagtaacattttctgatattcgatgctctacatttttaagcacatatgctcattatactttggcaataatttagatcagatattagagctctgaaacatagatgtaaataaaagaaacatagatagagagaactgacctatgttagttgaggagagagagacaggtgattgaactgagaggctatgttgatctataaccaaaaggatgaaggtgtttctatttatagggtttttagaaagaaaataataaaaaaaacattctaaatcgttttgcaattatattctccgcctaaaaaaaatgcagaattatacgaaagaagaaaaattcagattcaagaaaatgttatgattattaaactaactaatattgacaactagttattcaaaaatgttaaaatttaaatcagttgaaatccttggttagacctaaagttttctcattcgttacacttgcacactacacttctacacgataagattgacgccaactcatacacaaagtcttccccacgaatattgtattttgattattaatattgatccaaatttatcaattttaagatttcatccataacataaattttaaatgttaacaatgtaagtttcttataaaataatcgatatgtgttttctaaacaattaaatttcaaatcatactttttgttaatattatctgttttatttttgtttaagattgtataattatattttaattgttatttctattatttcattcttaatatacagtcccatattattatgactcaaaccaatcaattctagaatttcacctgtagaataaagttaaaatatttagaatgtttaagcttcttataaaaaaatcaaggtgcgtttaaaaaagtttaaattttaagttgtatttgtttcgttaatatttttttttgtttagcgtttaagattggataattatattttgattgttaattctatgatttcacttgtagtatattgtcctgtatttatcaccgacgcaaatccgtcaattataggattttactcgtagtatatagtttaaatatgaatttatcatatttaaacttcttattaattattataaattcaaatatttatcatattcaaacttttaaaaagtttcaattctttgaaataaataaccggagtaaactggataatacttttaattttggacgtcttataaatcaagtttcatgtttattcgtactcagaatcattttggtccttattatagtatgactctgaaccatggtctaatttgttaagcaatgtaagacattatacacatattattttttcgtcaattgagtaatatatgtccatttaaagaactttgaaaagaatgcaaaataaattaaatataaaatcaaataaaagtgaaagaaaataatatattaagcgattgctgcgatgctttgtctcatgttatatggactaaggtatgtttaaattaggtagataggttttaggaaatacctagtttagagatatcttatatttgtttccgatttatttggtaattaaatagttaatttttaattaatatttttggtagaaatagaaactttctaaattgtttttgtttttttaattaatgtttttaagaattaatatcgttttgttatagattttctaattatagttatcgaggatctaaacacaataaaaccggatcaatgattggatacataaaacttatttatgatccgaatataattaaaccaggtcaaaaattcggccaaataacactaaaacattagcgaccaaatttaaaacatttgtgaccaaaaactgctgcaaaaatttatatagatttaaaagatccgagaatatttaacgatcaaaattaaaacagtgtgaccaaaaactcctgcaaaaatatatatgtatatttgtaaaagacgtcacaagtaatcgtgatttaaaacaagggaaataacttatatacaaagtcttcccggaaatatcgttttcagaattttaaaattcgattcagaattttttttaaatggtagacattatgcaaataatggaagcttacttgcatttaattaagttagtcttttttgtcaacgcttgcatttatgcctcacggcgttcgttaaagaatactccagcatatgcaattagacaattagcagcttctcatctattagttttttggacatcttcatatctagggtatacaatacatcaggcgcatccattgcatttactgtggaaaaaaaaatgagagaaattaatgccctttcgagtacaattagtttagtgggggaatttggaaacattttatggataaataaaatattatgatatagatgaaatacttatttgtgggtttgaatggttacgacggttgaggcggacaaaaccgtctacggattagaccgctttttatttaccattcatcaattatagtccgaagtggtccggaccaaaaaaaatagaagaaaaccgcagcggaccatctgtggactgttttgacatacaaataaacttggtccgcaacggtttattgtctgtccaaaaaatgagatggactaaaccgcagacaaattagaccgatttgtccgctgcctccattcatagcctgtgtgcagtagaagaataatgattagagtaaggacaatttgggtatttttaagattaaatgacaagtgcaatcagcattattagtgttaattggttttatttgctacgtacctgcaaataattattagtacacagagttatagttgtgtgccagaaaaggaattttcaaataattatacaagtatttttcgaatatttgaatctcgaaggaaccataaatactctaataatcttgattgtttgtttatcaaataaagcataggacatcatttatgcttgttttctaccattataacctagatgctagagttgctctagctagatgtcttactttttcatgactaattatgtaataggataatgttttcttcaccattcccttttcctttgtaattatctcgtgtctatgtttctagcctcaaccacaaagtatctctatgtcttctctcatcttattctactatatattgtatttgaattgtaacaatcaagtgtaagtaatgaccgactcttattccacatcatagtcttaatccttcttttgttccgtttatctctttctccattttgttggagtcttttttgagccttctcttactcttatcatgcttataaatcctacacatcctagcagttagttcacaaattattttgattctacaacttccaattttactccaggtgaggacgcgcgataagaaaaatggaaaataaatagggatagctttttctttgtgtgcaaccaagccggatagttaaaagcctttacggaacttcctccaagcaactgccaaggcaagtcccagtttttaatcatatattgcttataactattgaagaaccaaaataatgttaattacatgccttacacttacccaaagtttttaatatgaatagaatatacacccaaaaaatatagagttgtaaacttgtgatcctcaaacttaattacaaaccaaaacacagtatgggaaaatggaaagaaagttggtcagatcttgattaaagaaatcgattgacttagttaaagcatgatgtatctacctctggagttatgcttcatattttactcatgacatgacttctcaaaatagactaaataattagccaacttattataaaaggaccatgtttgtttgagcgacaagcgcatgttgttcgtttgcctattgcaagcgactacatactgtctttgacgaacatggcaagataagaatcattttaataaaactttaagtggacatatcaattactaaatgaatttgattaagcaaagataaaatggacataaaaataccaagtgaaatggatttacctaaaaatatgaggacaatgttgacgtaacatgttttttattttttttggtggaatggacctttggctactcacaaacacctatttcaagtactattgtcttctaatgtggaggattgactattatcgtcctctaatgtggaggatttgcttgcaatgagtgcaaagtcgaatccccaaccatgaactagatactttatgtcttctggttttaacgtaaaagacatgagaagagaagacatacatacatgtaccttacgtgatgaagttaattagggagttggattatgtgccgaaagcagtacgcatatcccgcgattgcatgattcatagtctccagaaattgattaatactatttattaagggcaccacgtcgactataaatttagctcacattgttttttgatgggggtatgacttaatttcagcgtaactgatagggagttagaagatgtttcccaataataataaagccctgttcgtttctccatttgacagatccatccaactaatccattcaacatgttcatctagatgatttattcgactctttttcttttcatttttagtaggttcctttaactggaccatccgaatgacatgttgttcgtttgcttatctctatctccattcaaataatttgtaataatacaaatacctaaaataccaatgctttcatctaattatatttttattattacttgtaaacatattaattttaattcttaatctaaaaaaaatttaaaagtaaataaattttaaatgatagttttttacatttataaatttattttacggtttttgcgggaaaacgtaattttacagttttcacgggaaaactcgattttacgattttggcggaaaacagaattttacggttttggcggaaaacagaattttacgtttttggcggaaaaacgtaattttacgttttacgtttttggcagaaaaatgtaattttacgtttttggcgagaaaacatgattttatgattttggcgggggaaaatgattttacagttttggtggaaaaacatgatttttgcggttttggcgggaaaacgtgtttttacggttttggcgggaaacgaaattttacagttttggcgggaaaaaaacgattttgcggttttggcgggaaaacgttttcttacggttttagcgggaaaacggaattttacggttttatcggaaaattttgattttgcggttttagcggaaattttttttttatttttttaaaaaataattggaaaataagatttaagtctatttgtttttatctaaaaaatacatctaaataatcaattaaaataattagggtatttttgtcatttgttaattttgactgaatcatctacatccaaatgatccaattaagttcagccaaatgagtttcaaaatttagcctaaattttcaaactcatccaaatgattcatttggatggatcatctgaatgaaccgttttttgcactaaacgaacatcaaaactcatctccatcgagatgatccatctgactgatgaaacaaacagagccttaataataaaaaaactgatttaggaaaacccgtgaaattgagctttgcctcccatgtggcaaccaaggagagaatgatacgttcttatggagagagaaagaggcgatttctttctacttttttgggatgacgtggctaattctgaagagttaatgacctattgagagtttttttaaaaagttgatgtagatagcttgagagtgctcaaaataacttagtagtacacaataagtagtagtaaacaattagtagtgttgatgtggatagtagtagacaattagtcttagacccaattagtagtgttgatgtgtatagtagtagccaattattagtcttaggccgagaaaacccatatcaagctgcagaactatgaggattacaagtagatcaccgaactaatccatggccgaaaaagaaatgcttcaatgtagtaataatcttatattcttattacagaactagattttaacccgcggtacaccgcggagacaatttatattttaaagttagtatatataaaaaaatttaaattgtatctatctataaaatatttttattttataatttacaattgttattaagtaacgtccttccaaacccgtctcgccaaacccgtcccgtaaaaaaactattattttattaatgttaatcttatttatgatatgtttatgaatcattgtctaaatattttagtcgatgtgggacgttcaaattcacacattttttgccaattggttaatatatgtttatttttaaaattttgaatcacaaaatatgacggaaagaattgagatttttttaaactctatatattatataatgatgttaaaatttatgatatattaaactttttataattttaaatattaataatgttttataaatttttaatatttaaataataatatttattttttttatattttgaaccttttaggtaatgacataataactctaaaagcaaggatttagaagatttaaatttttaattaaatattttcattcctaaataattaatgtcagtgtcatgagattgtaaataagttcaaatacatgatttatatatttaaacaaaaaatatttagtaagaataatattttttttaacaaaaaactttgttttaaaatattgttaacaaatatgtttatgctaattttaagggattgacttaaagtttgtttggattaaatttgattgataatgtggttgacaatttcaatcaagaatttaaaataaaattaattattttggaaaaaagatttaatgctaatggcattgagttgtaaataagtccaaatccaggatttatttattaaaatggctgaaaaaaatgtatatatagataatagaggtttccacttttgctatgaagaggactagaagaaatgctcatcgataccagaaaattgagaaattggccaagaaaatcacaaacttttaaaattagccaaaaaaatgttcaaacttttccattagaattttaaaaataccaaaaaatttaagaagcagccaaataatgcttacgattttatgacattaacaatgtttaaataaaaaagagttttagttctatgaatatgatacaatggttcttacaaattgattacaagagcttacatattataacataataatttaaattattaacaattaaagattttttattttaattgaataacactacacttttaatgactttataagagtactagattttaatataccgcgagatgatttattttttaaaagtaatatatattaaaacttgcaaattttatttttataaaatatttatatttttacagtttataattattattaagtatttatatatattatttttttattaaaaataataaatcaaagatttaacctgtattgaaacggtggattaattatattttactttttattaatgttgattcaaaaacccgttcctccaaatccgtcttgccaaaaagccatttattttattaatattgattttatttatgatataagtctgaattataatctaaacattttagctaataacataggagtgcaccatatttatttaataggggaatgtaccatatgacccgaatgcacttttacccaaatccaccaaaaaagtcttgcaaaactactatagacccgaatgtaccatatttttttgtgctaatttttatgtgattaagatttaattgatttcgtatataaaatattaaattgttttacgaacttatttgtttataatttggtaacagatagataattgaatattcagtatattttgcttcagtttaggaaatctttaatgacccgtctttaaatccaataagccctataattaagagatgaatattgtcgttaaatgattttggtaatcttaatgatgtcattaaaagattttgtttttgattaaatttttctaatggcattgtcatgtaattaattacaaaaattaaggttacatttaaaatgtacttcccaaataatatagtaggacgatatgcacttttatccaaatccaccaaaaaagtcttgcaaatatactatagagataagaaacgatagtcggttttgataggtatatgattagcaaatatattagttcgcttaaattagttaaagaatacaaattgaaaaggtatattacactttattcgaatatagtatcaaaacttatatagagatttgataaatttttaattgttgaatactttttttttgtgctaattttatgtgattaagatttagttgatttcgtatataaaatattaaattgttttacgaacttatttgtttataatttggtaacagatagatatttgaatattcagtatattttgcttcagtttaggaaatctttgatgagttgtctttagatccaataagccctgtaatctagatattaacttgcagtataccgcaggtaggcttatattttagttcaactaaaaacttttattgtaaagatgatttaaaaatatatgatattattttatttgattttaaatgtatagtaaactgtgagttgtatatattttttgatattatctatattgtttagtgtttaagattatacacttgtagtttgattgttaatttaagagtttcacctgtagtataccatcttgtattaatatcgatctaatcccgtcaattctaggattttccagcttgtattaaaaattgaatcacatctaatatgttattaattattgtagtatataagattataaattttcaatataatatgtatgaaattgaatataaatatttcaaattatgacatgttactcagtagaaagttttcttaaatctatttttcacccgttataatattttttcatgtattgaacagtttatattcgtttttaaaaattcaaattatggcatatgcgaaaaaactctaattatttttctataatgatgatattatttttcggcaaaaatagaatcatataaagatgagaagtaaactataataattaataaaaaattaatatgataatttagatatcaaatctaatttgttgattttaattggttacttttttgggaattaataatgtattttgtttttctaattaaattaaattaattaaaatttagatatcaaatcttatatgttgattttgattggttattatttttggaaattaataatgtatttcgtttttaattaaatttaattaattaaattagtatttgactttttaatcctcaaagagataaattaatttactctttaaaattttatttctaatgacatacctatgtaattacttacaaaaattaaagttatatttaaaatgtacttcccaaataatatagtaggatgaatctaataacccaaaatttataaagatttaaattataatcaacagtttgatcatcttgttcatacaaaatttcgtataagacattaattaacaaagcaaaaaatcatatatcaaaatagacacatattaacaaaggattaataatttaatagttgtgaaaagcctttccagtttcttccacggcctagctcctccgtctttacgctctctcatcaaactcgagaaaaaaaagtggcgcctctgcaatttcaattttcaaatcctaataatttttctctcgcttcccggagaacggaaccctaatttctcgacgcagacatgattttgagaactccgcagccgaagaggctcaggtccgacgccggagaaagccccttccccaccggcgctactggttccggcaatcagctaatcatctacgaagattctcctcttcctgctcctgctccgctacaaacttctcatgatcattcggcggatcaacatctttgcacctatcaatgccgccaaatggtcactacttatacctatctatctatatcccctcacgaagattagcgaatctgaggtttgttcttgttgttgttaggttaaagctgatgttctagatgccttgagcacagcagagaaacaagttgaggaatctaaaaccaaattacagactcttaatgccaacttcaccgaagcaggtgagagatcgtttgtgaattcgaaattacaaaggtcttgattccgaatgtctctgctttaactgttgttaacgaatttgattttgatattctacaacagatgctgaaagaaagcattttcgagataaattcttatactcagagcaagagcttgctgctgctaaagcgcgtgagaaaatgcttcaggagcagcttcttatggagatcaacaattctcaagagcggtataccaaagaactacaatcttgccatgaactggaggttgatctaactattaaattgacttgaaatttctcgttttacttggtgtcattggtgccagtatcattaactgaatccttataggtaaaacttcaaaatgaaatgaaccttcgaaagaaagcggagtcttctgctgcaacagctgaggaaaaagctaaacttttggaggataaactaactcagctatctggaagtgtggacagggagaagaaacgtctcaacaatgatattgctcaactgggtaaagaagcaaagctttctgtggctaggattggtgcagatgtaagtatcgattaagaaacttgatagcttgactgaagttttgtttttggtttctcatgcaattatcgtatttgcacctgttttcctttgcttttagcttgaaaggatgcaatgtagggcacaaaatgctgagacggaatcaaatcttttaagatcacaactggagcatcttaaactgatatttgacgaggtaagctatgtttgacgtgcatcttagataataataacaccagtcataagtcatcatttgctttggtaatttattttgctttctcatatgattctttttatgcagtgtttgcaagaaaagactgaagtagacaagaagctatcgtcattcacttcggaggcagcatcttcttcagataacagtgtattggttaaacatcttcaggaagaacttaaacgctatgtaagttttaccagttcttagtctacccgagtaatgattttacaaagttgttacataagatgaatcatttattgaaaatgagtatgaaagtggtcaggacattgatcataactctctgttttattcaccaatagaagctgtactcgttcttgattaccatgagaaactttgcattacatacccagaatcaatgatttctattttctgttgattactctcataagcagcaaatcacggagagagattatgcaagtttttaaacacttgaaatttactcaaaacactcgttaaattttttttcttaaaatggtcgtcttatttacttaggctatctaagacaattcataagtaaaagagtttacttttcaagaaaagtgaggtaatatagaatgatgtatttttcatgtaacactagttatgcaagtcaaattttaatttgatcgtaaattcgactcacatacttttcatcatttgaagacatgtactatttgtagattctattttcgacttctatactttccatgtaatatctatttagtttttgtttttcttgtcgattttgattcttgataattgtatcaggaagctgaagtgcgagaagctagaaagttaaaatcacggcatttagatgcggagttgttgaatgtgaacttattagaagaacaaagccgtagggagagggcagagtcagagttatcaaaatttcatgacttgcagctaagcatggaaaagttggagaatgaattgtcctcttggaagtcattgctaaatgacattcctggtgtgtcctgtcctgatgacatagttatgagattctcggtgctacagaagtatgtcaacatgatctatacagaatttatcttttcactagagtcttcttctgatattgtttcaaataattatgcctgccatgaaatattctgtgcggagagactgaggtagttgttacggggcattttcctgactttataggtgaactagatagtatttatcagagacatctgtaacaccactttgtccagatatggctttatattttacagatattctggcttgctagtctagcaggtctaatgtgtctgtgagcatctagagtattgatttctagtttaccaagcactctgagttaacacatgtatctatgatacttcctagtgacttgtgtttctgcctttgaagtgaggtggttcaaagcactatgaagattggggaagcaagtacccgtattaaacaactggaggagacactggaggctatacaacttggcagacagaatgctgtaagtgaggctgcattagcgaaagagaaatctgaggctctcaaaacagacgtgaagagaattgaagtaatggtaagtttgaaaattgttgctggtgctctgtaaggggtcacaaatgcacttttattttgctggcatcaattaaagcctcttaagttgatttttgattctcgagagataaaggatagcattttcaattggtgacactcaaatgctcatcattttatattcattattcttgtttattgattgtttgcttggtttctctaggttcactgtctttgcttggatatatactagctcagctctgtatttcatgttgattgttgatctatgcattcataagaagctgatagaagtaatatagttagagacgatattcataggataatatccctagtatttttggatgttcacgttgggtttgttatcaattagtacagatttaatatctctatatatgtggggaaagtctgtttgttcctaatgagtgtattcaattgttagattttggtgcaaattccttcgtatccaaacatgagtctatcacgaatttatgatgagttgatttatccataatatagtgtcctttcaggataagagataatgtgtgtagtatagaatttgttgcaaacaactttttatttaatcatgaatctatcacaattcaagggaattaagtttatagtgtctcattggaggtaactttttataattttctatcagtttgttgcactattactaacagagctttaatttgtaataaagctcactttggtcacggaggagaaagaacagttgaaagctgttgttaatgaattaaggaagtcaaacagtgaaggatctgtgtctggagccgcagatggagcccttattcaggttctagaataacacagttcttattttgaagattttccttcttttttgttggaagcataaagcttattttgcttatatatacaggggtttgaatcttctcttgcaaagaaggagaactatattaaggatttagagcaggatctaaatcaactgaaggatgtcaataatcgtcaacgtactgaaatagaacttctaaatgagaaactagttgatgaagcaaggaggaataagtcgctggaaagggatagtgatcgtcttcgctctgagatctctttactggagtcaaaggtacagatgctagagatgtgtgcttgtaaaaaagattgccaaagaaaatatttgcttatggaactttcatctgccatggtcgaaatgaataataaaagtttttaagggtgaatggcgaattttatgtcctgcatcttatgtttttcttaggtttcatggaagattttattattgtaaaagcgaatagaaatgctatttaggacctctaacttctaccctagagtttgatctgaacagtaacatatatttggcagctgggtcatggtgattattctgccgcaaatacaagggttttgcgcatggtgaatactcttggtgttgaaaacgaggcaaaacaaacaatagaggctttacaagctgagttacagaagacaaaagaaagacttcaagctgttgaagaattaaagagccagtctggtaaatttctgattgtcgacctttcctgtttttgatactgagtttgctacaagtctaccattcaattttactctcaccacaaaattcactggagaagcataccttaatttctctgtgaccctattctctacatcatattctatgtttccgagaataaaagggagggccaaaatctttctgttgatctgcctccggaggacttgagaagaaatattgtagtgtttcaaaaatgttattcttatttactaaatatgctttactgtaaattctttttcatgaatattcaggagatgctgggaagctagttgactctcatataactggaaagattgctcaactaaaagagcaaaatgctacgcttgaaaaacgtgaagagaggtttgttactgataaatgtttaacatgtcctttgtgcaaatatgaccttgatttcccatactaaaacatatgtggagcctatgaattatgaaacaggtacaaaactgtttttgctgatagaatttccgtgtttagaagggcttgttgtgagctttttggttataaggtatgccacttgctcataattatgtcgtagcactcaaattttattctttagcattacaatggttccctgaaggcaatgattctggatatttcagttttctgaatgttgactatcacattgtaaaatgtaatgttcgtacttttgtccattttttacggtctatgaactgcgcgtttctgttgcaaagagggattcagctattgctatctatagttttccttaccttccgttattcgtgtagatagatgatcaaagagtcttattcatctacagaacttgtaaacttgtgaattccttttgaaaactctggcagattgtaatggacgaacatcagcgtcccaatggaatcccagtgactcggtttactctccagtctatatatgctcaaagtgatgatgaaaaactcgagtttgaatacgagtcaggaaacaccagtattctagtaagtgattcttgtaaattgtataactttgatatgctgcatttgaatcagttaatcaactgatactgatttaattccttcagaacaatgagtatgcctctcagggcgacatagcgaagcaggtaaagtacagacatagttttcttccttcataagcgcagtgttctcagtgaagtgtaaaaactcattctgtgtgtttcttgcagatagaaatattcatcaggaaattcaactcgattccagcttttacagccaacttaacgatggaatcattcaaccgtcggacgctatattgagagcactgcgtccttatttccaactctgtgttttgtatatttctaaagcctgctgaatagaaactgaaactcgaaagccgcagcttaaaacactggccttatctatgtctacctctggttcgttatgtctgctataattgtggtgtcagtaactctattttggtatgaaagaaactagtttcgatttactcagaaagaatatctaatgtcattctctgattatgcgtttattactttatagtcaccaaaaacagtaacacttgaatatcaagcaaacagatttttatataaccatgaatttaaaacacaaataatacacagactacctacatgtaaagaagattagagcaaaattgatatcgacttataatataattacatgtttagtttttatttattgttttgaataaatgttgtgaaaaccaaaacccaaaaaaaaaaaacttgtatcacctcattacacaatcatccttcccctgcttttccataatcaatctcaacgaataattgaaataaatgcctaagtgacattggtcatctgggcttttaattttttgatattcacatattattacattgtagatctttagagaactctcacgtacttgtttctccattctttattacctgcaagaacaagtgccaattggatttagaaaacaattagagcaaccaaatgcaggcaacaacgaagactaaacggctaaccttattcacttgaggggatcaatgtgagggtagagtcccaggacatgttccggcatgaaatcatgccttgtcagtattccaacaataggcggtctctgcaatacgaaaacatacgcgttagaaacataaacaagtctagcgagaggaagagagagcgagaaagagactgacccctggtgttttaggcaccacacacaagtggcgaagaccaagttgccggaaaagaatagccgccttagctagagacagagtctcaagcacagtgtaaggagatgtgttagtgatgggatggagatcaacatacatctccatctcctcctcacttagatccaaatcttcaatcttgagccccttacctaaccctgctttaccaaagtcacgggctttgcaacttctcagaatttgtgaaccaaaagttgttctctgcttcgagaatttcttcccttggagaagcacaaggagatgagatctcaaggcaatcccacatagctcagaagcttctgtgaaaggtggctcatcaattacagggaaaccattatgtcttgtcatttttaaagcctgccatattaccccaaccttttcaactctcgaaaaggatatcaaagctccagaaactacgtcctttgcaaccaaattgcgcatgtacggctctgcatggtcttccatgtaaggcagtcctttcattgttacaatctggtcatagacccccctgttgaaacaatctgcaaccgtttttgatataaggagtacaagcatcaccagtggcagcattaggagattatttgtaagttcgagcagtataacacatagagagaccgtcattctcattgtgcctccaaggaaggaagcagctccgagcagagaaaacagacctacatcaagctgagatactggacccagcagtctacccactagtcgtccataagaggctccagcaagaatgacaggaatgaaaagcccagagggtatggctatgccgtatgttatgatgccaaggcagtacactgcgacaaagaagatggcaagggtagagatatggaattcattttcagatctggatgtgaaaagattacggattgcatcatcattggtgttgagaagtagggaggaaaggtcattgtaatggtttggaggacactggaaactcttatagatgctggatcgacctacactagggcactttccctcctctatgccaataggacatggagtacactgtgaaagccatgggagaccaaatgcgcaacacgagctcaaaatggaaactgccattacaagcataattttaaatctcggacctttcctgcaagttatggaaagaacaaattaagaaaatcgaaaagaggcaaagaaatgatattatgaaagagtaactcgttggaaaatgactttatgaaagagttaacttgttgagaaatgacgtactcgtttataatgctatatgtgcggaggactttgtccacaaggtagttgtaaaggcttccaagcacaccaccaataactccaaggaatactattgctagcaaatctggagtgctatatagcactggtcccgagtttacatcaaacatgatgagacctcctttcccaaacagtccacatctcccagagcgacagaactcaatcaaacttcgtaagaccactgctacaactgcggtagtgaagaatgtcctccagagaagggcattcctccacctaacgatattaaaaaagtgagacataatcttttccaaatggatatagcaatatacgcaaaccgtctaaactctacactatgtatcacttagatttcctcgctcactaacttccatttgcataaagaagtcatgttggatacattatgttttcaactagacaaacatggtgaccttcttgcacttttgcattaagacttctagctggggagaagcttcccctttcagagtctgtctactacaatgactagacttgcataaggtatcactccttggattagttataaggagttagagagaaacagaaaataccatgaagcagcttcttcaagggcgaaaagcactcctccaactggagcacggaaggcagctgctacaccagcagcagccccgcaagtgatcaggtctcttctgtctctatcgtttttgaagaatctgagccacttccaagtcaaccggtactttttggaaccaccttgtccaagtaaattagcaatgcaagcaccagtatgaaccataggcccttcttttccaactacaaatccggcagcaactccaaatatagagccaaagatctaccaatacgaaatatttcgtatcagaaaaggccacagagatgaacaaagacatcaatgctaaattcaggatgaacaaagactgcttggaaagttgtttggggatcttaccttaacaaagagggtgcttggagctaatattgaataagcatctataccattgagatatgctttaacctcaggtatgccagatcctgccgccgcaggagcaataaaagcacagagtgaagcagcagcagttgccaaaattaagttacaaccagcaaatgcaaaaaatgcctggaaatatctgcagtatttgagaaacatccgatgtcatttatcattctgatccacacatatatccctgtgagccttaattctcataacagtattaaccattaagaaatttagatataatcagtgaataaacagtaactgaaacaggatagaaagtgctaaaaaatggcgtagaagcagagataaacaacaaaagctagacttacttttccttgagcatgagattaccgatgagcaagagtttaaatccagctatattctcaacaccaaggttattcaaaaagccaacaagtccagtagctaaaccaataagaaaagcaagcgcccatttgagaaacgtatactgaagtatctcaatcttcttcctagacctccagtcttgcttgaaaaaatcattttcgaagatcctgccaaataaaaatcccaagtcaagatcctgatatgtttacataagctataatcattcacaccaaattaggcaagacaccagtaggagacacacacaaagacaaaaagtcaaattcagtctgaaactatgattgcatcatcataaagaccccaaaaagatttgcacttttctcaatctaatagattgtatagcatacctattgctaggtgaagtggctatgatgtctctcaaaagctaaaagcttcaatttttacccaaaagtattaaaaatgaaaacattatgatttaaaaattatacatgggatgggacccaaaatgttacataatccaaaacttcatagactcataatcaaatttgagatgaagtttaaaaactaatcgaaaacatttaagcatattaaagtctaattgccaaagttaaaaactttatccagaaaaaagaacgaaacatcaagttatgtgcagaagaaaagagaagagggagaaaaaggacagactcgtaatcaaggctttcgatgggacaagtattagctccgacaatagcgatctgagaagttgtgttctttcgattcctagcgagaagaggctgtcgaaatccgacagatccatcgtctagaatcccagatatcttcctctcgaaaccatgtaaagctcctccttcaacctctatatcatgatggtctccttcgtgccgatcatccatctctcctccacgatcttgtttttttaagaaaataaaattgtttgttttcgatttccgatcagattacaaagccacagaaatggaaagctatataattgggcacgagattcctggaatcatgaacctctcgcgctcaagcagatgctaaaaagtcgatttttttattgtttttttttcttttttgtttttttttgagggaggtcgtagagtggtatgggtcaggaattttgtttttttatttgatcctaatttaggcaaaactaaactctctttctttgttatgattttcataaggatatattcttctaaataaataaaaaagtcaataacaaaaaaaaacttgcataaataaattatctaattatgaaaattttcatagtattgtttttgcccaacaaatttgtatacaatcgtgatattttatgggggaaaaaactatttgttttttatatatattattttgaattgatttttcataaataatttctctcaaattttacaactgtgtccgatatacttatataaaaataatatatgtatatttttttcacatgatcttgtaaagtttgttttgattctaactcaattacagatatttttgaaatcttacttctcatgtgtgtttatttagtttctagatatgaaaattttgttgttaaaattttataatgatttttagttcccaaaactggatttcaacaagaaaccaaatgagcccaaactagggtagacatcgtccaattatacgaaccactgtgtatttgccagacttgttgaaacatcacacaattcaagagaagaacaaaatctattggatttaacattaaaaccaaaacaaaaaacaacatctattggttagaaagtcttttaaacttttatgagaggtggctactggctagatccaatcaaattaagatgtctttggtgtaaatcagttgatccttctcttttttttttttttttagttattagatcaacaaggtatgcattcactttttaacaattcttcttattcatgcaagatggagaaacacgataaagaaatgcagatattgttttcctttagttatggaacctgaccttgacatattttattattgcaaaaatttatggggaaattgatcggatccaatcgtttattgtctcatcaaaatcatggtttcctaccgaattaatttcttgattgtgttgtaatacacatgttgaattcattccaaggaacactctcaagttttaatagattgtggggttagttttaaaatctgccacaactgtataattattaatcaactcgatctttgttttgatggtttttcaacatttgataggccagtcgacatcttagtgtctccacttcttttattttgagtataatggtgaaagccacaactaagatatattaacatccgcaatgagttaatgtactcacgatagttgaactttgtttggaagctcctaactctctgttttttttttttttgatcaagcggaagctcctaaatcctatctagctaaaagaccatcatctccaatgtatgttttttactctagaatatagtaattctaaaatagagtaggggttttctcaaatgtatcattttattatattttattctaaaaagaatagagtaaacattagagttactccacatatatatagagtaatcatatcctttactgtgttttagaatgatgtatagagtgtggaattaaaaatgattttactctaataaatatagagggaaaatttaagtggagttgaagacaccctaagatatctacaaaaaaaatgattgtgttaaaactatagaaatcttcgttgacatgttgcggaatatggatgctagtggtacaagccataacctatatctttgtatacaagaaaacagttttatggaatgcttttgaaatcaaatcatatgagtttggatttaagggccgttcgcgggtgagagcaagcgacgggcacaactgcaagagcaccgtgggaatatcctgaatattccaaaggccataccatatacatggttgcagatctgaaggatctaggatttaaacttttagggtagttgcattaataacgtggacatcaaggttctaggatagaattttgaatcaatcttcgtcgacttattgtcagactaccattatttatcaactacaacgtgcatttactatataaaaaatagttttctagattattaatatagtgtagtgaagtcttaaacgcaacaatatatagaacagaaacatcatcaatataaaattaagcatgtttaattaaatgatacatcgtcggaattattttttatgcatcggataaacgtgtacgcatgagaatgaacgtttgcgtcaactttatcccaaacataaagaactaaagaaggattcattatcctttgcacaaaagaaaagaaacaagaaaaaaaaatgattcttttatccattagaaaataaagaattgagcagattacactataatgcaatccatataatttagtcctatacttgtaatcatcaaatatatgttaagaaaattagggatggttgaagctagccgtacttagataatatagtggatgatatcattgccataaataaattagcaatgactaactaatgatggtttatttctagagtattggtccaatgccataaaatggtttcaacttaatagtaataattacaaaatttgaatttaactagatttctcatttcgatttcttaaatggaggaacaaattgtagatatgtcatatgtaatctaatttgttcgtgcagagtttttgagcaaaaagttatgcatgtgattcttgaattagtgagaattattaagggcatctccatcagtgagatattttcttggtttctcaaaaaagaaagatattagtattttaataaatattagttatataattaaattttaacaataaaataatatttgaccaataaatgatatacaagtgtttttatgggtttctcagagtttctcacttgagagactaattctagtctctctcatactttttgattatattttatttttctattgaacagtttctaaatgagaaaccattgatggagatggttaaaccaccaaaaagtaaataagtttgcaccaaaaagaaaactgtcaacctctcgggacgcaccatgtgtgaggggaaagagagttttcctaaaagactttgcaatgctcaaattagaaaataataaaaaagggttggttaaaggaaaaagcaaacgcatacaaaatgatttggatgtaaacaagtgtggatgtaaacaagtgtgcaagtgtttgtgagaattttgaaagtttcttattctagagataaatattcttcttgagagagataataaactcaagttcaatcgcctctttgagtaaagttcatagctaagttttgcaagtcttatgattgctaatgagcttagtaattaaattgctttagacataaagacattcggaaccgctctgcatgcccttgtgggttaactagtcaaattctacatttaaattcaaactaaatcataaataaattaatcataaattttataaatatttgtatattgatgtcgtttacaaattttagtgttttctgtatgattgattattcaaattaatctctaaagttcgagtttttgtttggttaaaataattaaatagtaaagtaataagtatattaaagagacaaatataaaaaatatataaataagttgttacttttttaagtctatgtttatttttcgaaaatttaattaattttgatatgaaactttctttaaaaattggactattctacatacattatagcatttggaataatgtatatacatttattaattaaattagttacataaaaatacgcaaaaataaaataaaaatgaactattcatttgacagagatcgttagtttgagtggaaatgaattttagatatctagtgacagcatatacagataaattattagaagctggatcgagcttaagaaaaatgtatggacctctatcgaaatgtttttaaaaatcaatcaaaacaatcatcggtggtggatggtggggggtttgtgaacaatggatgatgaaatggtgggcatgtgaacggtggatggtagtaacttacatggtggatggctaaatcacgtatggtggattgtatatttttggatggtgaatcgttgaatggttgattatgaatccaatttttcttcatttggtttttctttaaaaaatctcatttagtaaattgcgatgttttaaaaagtggtagggttaagcggatggtgatcaacgcctaaaacaaataattggagtttaaactattttatgcggttaagcatttacaacataaaagggatttttttttttttttgacaaaaggcttcaattaaacttaaaccataatcggtacaattgttttgagggcacatttcgcgatagcatccgcttcacgattgtgatttctagagatgaaagaaaaacttgagtgatgaaatttagaagataattgcaggatatcgtggaaaatccagtggagttccaaaggaggatccttcgagttaatggcttcgatcagttgttttgaatctgaagcgatagataaaaggttataaacataatgtatagataaacgttatacaaacatccattagaaaaataaaaatattaaatcattaacaagaattagaccaaaatatttacgtcgacgcgattttaggcggtttaagctttacaccaaaacatttacgtctacatttatttctcacttaaacccaaaaatacatatttctctagttatttcaaaaatcaaaactacctaccgacatactaaattttaaaacctacctatttgactaaaccacccttgtaagaatcactagatgccttgatgcatgcacatctagaaacacatgtttatgtttatcccttgaatggtggaactaccttgtcaaaattatggaacgataaatctgttttgctgaaaaagcattaaaggttaaactttccacagcacaagaagcaatagttattaatcaaggccgtaatgtacggaaacaatgagtgattgcatcataactgcaaaatgaatctatgacatcattctcctgcaagtatagtcgaacaaagtctggagtgtgcttttggctgatgcttcattaggtaagctcagaagcctagaaacccgagaaaacccaatatcatgtttcattgaagaactaggctctagttctggttcttgttgctctggttcaagaccaagttgttcctgtttttgactggtttttgtcagtgcccattgcatagcccatattgcaaggggacgcatgtaagtcaatgatctatactcatcaaccgtgttccaagattcaggcgtctgaaaggaatacctgttttaacacagtatcagttactatagtctatagagagaaataacaatatcaagatcaagcttacccgagtccggtttcagaccaggcagcttcatagataccacttgcagtctgaaacgccatttcaactagaccttcttggatcattgttgcagacagtgcatatgtaacaccggaccatatctctcgtgattgcattgacgctgtatcaactttcccattgggatgcatcccatttacagctccacgtttcccatctttaatcttcatcacattatagttataaactttctccaaagcagttcttgctttgtcttcatctactataggcaaaagccctgatgctctcgcgtacctgcaattgtaatcataccacatcaacacttacttctaacaaaaaaccataacacttacttcttaaagaaaagtagggaacaaaccattgaccagctagttgatcagcttggatagttgagctatactgacttccactattatcatagttaaagtaagatccattccataacttcttctcatatacaacttttgctttctgaaacttagaccagaaataatcctgagagttcttgtcacccactacgcgtgccaatgcagatgcagcttgcagtgcagccacccaaagtccaccacagtaagcgcttacaccagacgccgaccatgtatcgtaagtctgatctggaaatccttcgttctcaatcattccgtcgccatctttgtcaaactgagccatatatgccattgcaacatacactgagggccagaccgctgatgcaaacttcttatcgcctgtggcaactacatcccggtacacctggaggacaaatttggggttcaaatctttccaacgatccgtattgtgaagagtatatccattaacttcaaaccaagggtcattaatgcctaagtcatgaggaactgcaccaagaaccttcctctgaacccattgtccctcactaagagttttcactttagtaggatcgtgtagcatcactgcagcagcaaagtctctttggatactaagttccagttttggaaacagcatcaccagtgcaaaagatgcatagaaatgaacatcgtaagtgttccacatacgatattcaatcccttctaagtaaaggaagtgcccaatgttctcttctccttcttcaagtaattttgtgccaaatgcagagtttgacgttgttgatgcatgaagttcctcaagcgtagaagccatcttttcaaggacagagacagctgtatcattctgatgcggtacatcgatatcgttctttagaccgagttgggatttatcaagtgagaacttcttttctctgactcctgccaagctatgtactggggatgatccatctgtaaaacaatatggactaacatgagaacatggcgtcataatgtcatgacgaaagtaaatagtatcataagaaatttgtccaaatctacctgtccaaagagttcctcctgaattaaggtaataaagctcgttgaagagagtgacagggtacctaaaaacaccaaacaccaaacacgtttgtgataactttatgagaactgatatgtcttatagaagctgaacaacaagccttaccatgcaggcagtcttttgtcttcaagtattggtctttgccaatcttctatccaggactcccattgactatgtcctgttccataaaatacttgtcagtggaagcttcattctgaagtgaaccaacaggaaaatatattttaggagattaggtctttaccaagaatagcatcatgtgcaatttgtgctgcagcatcaccattattgccataaaactttgtgtaacgcctgaaaagattctgtttaataggttgcctttagctatcaccattcagaagaatctgtagaaaatcttacctagaatatattttaccactaggaaactgcacttcagggcagtcccaagccagagaaaatgtgacaatgcgtgactctcccggtaggactgttacagaggctgctactgctgccccaatggatgaaccgtgatctgactgcattgacgcctcagaagcctttaagtgatcgaaagaaccattctgtaacaaatacaagggtggatatcaaatctcatggtgaagaataatacaattatatccaaggcctcttaacaaatggaaggatatatcaaacctctttgacagcctgccacatatcttttgctgtgattccatcctgctttccagacactatgaaaaatgggcaagctgagacactaacaccatcggtggcctgagctgaaattgcatatgacaatgatggtaatccgtttgctgttctgtatcagaaaaaaatagagtaacaaagtttgaacaatcagagcctgatacttaacagccacaaaagattagtttcttgtcttagtttggtgctttacgcaaagaatatggaagaacttacttatgatgtaagagcacaccctgaactccatcattcatcctattataatcatcaacatcacaaagttaaaaaacttccaagtaacatgcgagttcatatagtaaagccacaaattcttggagtagagaattataagtatttaatgtatacgttatcttggagttgtagtggccacctgagaactcagagtctcctccaacagaattctgaaccaaaacaatatcatcataagtagtattgtgaaaggaacagtaaaacaaaagcaaaacaatatgacttcattcaacgagtatctcaccgcccaagtgaagagcaatgtcacatccgcggtagtgtttccgagattatgaagctgatgaatatatgtacaaactcatcagtagttcagtaccatggtaagctccacaaaataaaaacaaaaaaacaaaaactagacatactgtgaaagtgaaaacagacactggaaagctgctttctttgtagttgtgaggtataaagggtgaaacttgacgacaaacaatcctaagctctggatcaggttcacctatagaccatcaaatattaaagtttcaggctcctaccatagacacatcaatacttacaagtgtgaagctgtattcaaaagcatatatattaccctcatacattgtccaagacctcggatataaagcatggtatgtagacttgtctcctttcagattccagtcccaagaaccaatacctgattccgaatcttgtctgttcgaatatataaacttcaatcatctcaaaaaagaatattcactgcaagctaacaaacaagagagagtactgcagtggcttacttgtcaagctttgggttcctaggacataacacactcgagtactttttaccattagcacgtgaaacaaatgcctgcatcaaacaaatccaccaacttagtagagaccatggagagaaatttcaaacagagcataaccatcctgaaactctcttctatcatcttcctcctgcaaagtctatatttgtaacttactgagaattgatttgctaacactggttcatcttcacattttggagggaatagctgccatctctggaattcacctttaaaactccttcctatgcttccagctctgcatgtaaccatagctaaataagtattaagagaacttaccaatatctttacagtaagttctgtatgacaggttacaaatatgatcagagagatggatttctccgaacggttgtttcaatgaaacagttattacataccaatgtggtaaagttgattggatataaaggaaacatacccaatacctccaagtggaacaccatgggaagacgttacagagtgcttggagaatggatctatgaaggccaactgtaatcaatagattattacaatataactgtgtaccaaaaagaaaaagcatatttcaaagactctttggtaaaactgaactaggaaaatgtgtttacccttcctttagcagcttcttctctgcaaagaaaccataaccgaatgccaacaggagcctaccggaacaaaagcaagtctcaaaaacatagttttgacaatcctatcaaacatcctacagaattttaataacagttatatcaaaaacgttttgttttccataggtgtaccagctggaaaatctctttaacactcagattgaattcccgtggagcttttacgtcactatctatctttctttgccatgtcaaagatgcaggtactgccggatcaacctgatttgataagtgggaacaatataagacatcaagccacctttacttgaagattcaggtatcaagttgacataaaataagttacaagtattgtttgatgcagatttaaggactcgaaagatgatggatacgagactaaaacagaacccagaagtttaagctatccaaattagtctaatatatctcaatgaagtccctcaaaacatgaaccacatataagaaatatggaaaaaagcttactttagtatcagaagagtttaaaggttttacatcttcaccaatatccatgatcttttcctcaaacattggtcctaaaaaaaacacagaaacaattcagtgtacaagtcaacaatttcaagtacttatccatctccagttgtcagccatgaagaggttaatttaaggaatacaaaaactggtaatgagaaagtaaacatagttaatggcaaagtagagaataagttaatcacactaacaattaccgtacacaataattcagcattgcgatcattcatgaagacgaaagaaattaacaaatatagaaaacatgagactctcatgatgagagtacctgaaagcaattgctctgaatcgtgattggttattggttggattggatcagaaaaatatggtaaacaagaataaaaccgtgagaattgttgtggcagagaagaacgatcaagccgaagaagatagatatataaactttcgtaaagtgaatttgaaaagtcgtgactttttcaacaaagcttttttttttgtgtgtgtgtatttgtgacttatgaattttttgtgtttgagattagaatttaataaaatatctcctgaattatttgtactaaccagatatggtcgccagtcgccaccacaaaggcacaaacaactatttaaagatcaaaatcgtcttattaatttgggtcaaaacgtgtttttctgattttaaaactttactttaaagcaattttaatatttaatgtaacacactatttgtaactaccaaaaatctttttattaaagagattccctgaccaaaaatctttttattaatacagtatggccaaaacatcttaactacctttttgatctcaaaactttactttcaagcaatgtaaaactaagatttactgacaaaaataaagaagtaattattaatactaatgaaaactgagagtaatcattaaactcatgacgcaattacacaatggtgttatttaggacaacaagtaacaaagtagtgaaacaatgtctgacacgttacttgtgtttgcaactttgcatcatcatgcttgatatgtggacctattagaagaacttgggccttgcacgattgcatctttgtttttaattagtaaagtgattaaataagacgcaaatcaattaatgtccttaacaaaacataccgacatgactttgaatagagcaagcatcacgaaacgaactctattccaaacgtgtgtttgacagtttcttgcttttgaatctccggttcgaattaatttgtgtttgaaccgtgttccgaatggtttatgatgggccaagttattttatatgagaatgttgggctcaattatacgaagcccaaataattataaataaatgcaaatcgaaaggtatatgttaccaccaccaaccattttctagaaccttccacttcttcttacttagcttcccacatagttttcttctccttccttcttcttatcttcttcttcttcatctacctaacttaggttttatcaatctctcatttccaaccatggcttcctccgccgcccaaattcacatcctcggcggaatcggattccctacttcgtcttcttcctcctccaccaaaaacctcgacaacaaaaccaattccattccacgaagcgtcttcttcggcaacagaacaagtcctttcactactccaacctccgccttccttcgtatgggacgaagaaacaacaacgcttcccgatacaccgttggtccagtccgtgtggttaacgagaaagtcgtcggaatcgatttaggcacgacgaattcagctgttgctgctatggaaggaggtaaaccaacgattgtgactaacgctgaaggtcaaagaactacaccttctgttgtggcttatactaagagtaaagatagacttgttggtcagattgctaaacgtcaagctgttgttaatccggagaatactttcttctctgttaagaggtttattggtagaagaatgaatgaagttgctgaagagtctaagcaggtttcttatagagttattaaagatgagaatggtaatgttaagcttgattgtcctgctattggtaaacaatttgctgctgaggagatttctgctcaggtttgtgttgattttttcttaaagttttcattttgagttttgggtgaatggagctttgatatgtggttgtgttgtaggttttgaggaagcttgtggatgatgcttcgagatttttgaatgataaagtaacgaaagctgtcatcactgtgcctgcttacttcaatgattcacaaaggacggctactaaagatgctggtcgtattgctggattggaagttcttaggattattaatgagcctactgctgcttctttggcttatgggtttgagaggaaaagcaatgaaactattcttgtttttgatcttggtggtggtacttttgatgtctcaggtatttttactagagttctacttgggatcgcaaagtccttggcttttagtttctttttaggtattggagtattctaattattactgggtttttgtttcttggaatgtagtccttgaggttggtgacggtgtttttgaagtgctttcgacttctggtgatacacatttgggaggtgatgactttgacaaggtgagtcaaaacacagactttgtctgtctgaaatgctttataaatcatcttactcactggtagatacgacttttgcaatgcagagagtcgttgattggcttgcttcaaccttcaagaaggatgaaggtatagatcttctcaaagacaagcaagcgcttcagaggttgacggaggcagctgaaaaagctaaaattgagctttcctcactgactcagacaaacatgaggttcacttttccctctcaaatctatttacctcgttcccattggtatgtaggatattaactgatttcgattctgtatccagtttgccttttatcactgcaacggctgatgggcctaagcacattgaaaccactctcaccaggggcaagtttgaagaattgtgctctgacttactcgacaggtatatttcagttattgtttatatggatgagatcagaacctgccatgtaaaacatggttgctgtttgattcaccatgtgtgcctaagttttgtttctctgcattcaaacttctagggtcaggacacctgtggagaattccctgagggatgcaaaactcagcttcaaagatattgatgaggtgatccttgttggtggatccacacgtatccctgctgttcaggatcttgtaaggaagctgacaggaaaagaacccaatgtctcagtcaatcctgatgaagttgtagctttaggtgctgcagttcaggtgtgttcttgttgacctctaatcttcacacattgtagttgtaacagtaaattgacattctacttggatgagccgtatcactaaaatgctatttggcctctgattccaggccggtgttctatcaggagatgtgagtgacattgttcttcttgatgtgacgccgctatcgcttggtttggaaactcttggtggtgtcatgaccaagatcattccaagaaacaccacacttccaacttctaagtcagaagtcttctcaactgctgcagatggacagacaagcgttgagattaatgtgttacagggtgagagagagttcgtaagagataacaagtctattggtagcttccgtcttgatggtattccacctgcaccacgtggagttccacaaatcgaggtcaaattcgacattgatgccaatggaattctatctgtcagtgcttcggacaaaggtacaggaaagaagcaggacatcaccattactggtgctagtaccttaccaaaggatgaggtgtgtacagttatcaaacttggttcacttatgtcagatatgtaattttttttcttcttcatatcaatgattcatattggttgtatgatgttgcaggtagacacaatggtgcaagaagcagagaggtttgcaaaggaagacaaagaaaagagagatgcgattgacacaaagaaccaggctgactccgtcgtttaccagacagagaagcagcttaaagaacttggagagaaaattccaggtccagtgaaagaaaaggttgaggctaagctccaagagctgaaggagaagatagcaagcggatcaactcaagaaatcaaagacaccatggcagctcttaaccaagaagtgatgcagattggccagtctctgtacaaccaaccccaaccaggtggtgctgattctcctcctggaggtgaagcttcctcgtcgtctgacacatcatcctcagccaaaggtggagacaacggcggtgatgtgattgacgctgacttcacagacagcaattaatacgaattggattcatacaaggattatttatggggtttgtccatgattttgtaggaatgataatgtgatttgttggcagcaaatgaatggtaagagtcaaattttgtctttttaaacacatgattgaagcaatattctggagcacatattgtcgataaatgcagtgttgttacaaaacatgtacaataaaccaaacctcttgcagcctttcacagagaagtagagacgttctctgttagcatatcatgcaggcgcacattagatacctacaaagttgaactgtacaacaaacacataaccaaatatatacagatggttgcaatgtaatgcagcatagcatatcagaggcggagtccatggttcctaggactttgaggaacgctgcttgctcttccccagaacctgcggtcatcattgcacccgtacttgccattaccgccacctgagttatgtgtggttgtgtatgattggtcccaaccgatgcctctgggaatttctaacggtgttggtagtcgtggcctacacgttaagtagttagtaggaggctgcacgtatgcattgtggttgtggttgtggtagtggctgtgtggctgcagctggtgtgagatgttgggactgctatgcactctatgcattgggtaaagccggctcaattggtagttgttctgaaaactcgtttctggcggctcgtgactgtatccatcaggtgattctgatttgggagaggagcaagtagagacggtgaaggaaggtcgtgttttgatgggagcacgaagagcagtagcactcttggatgtgcgaagaatgccattgatggcttcaatgtagcgttgctctatggtttgtggctcgatggggcctaactgactctcaagaaccactgggtttgcaggaaacaagaaagttctgagcttgggtgtttcatgacggttatattcctctatcatgtgtttcacatcttcatcagactttacagaaactaatgcatcaagatcttctggaatgatctggtatttgagcacaatatcgttctctgtgattgccgtaagtttcttcatgagttctacaattgaaaccatagctcgatgataagaagacgtattgtgagattacatcgattaaaggaagagttggttaatttaccggagaaggagatgtcaggagatacagcaacgacgcgagtctctccgccgacatatttgagaacactgtccgatggtctagggaggattctgccgccaaaactgcacatgaacttcaccttactcggcgatctctcctccgccattgatgttttgtagcacttctcttttggcttttggttattgtttggaggggacagagacgaaatcaagaatagtttgaaggacaattttccctcccaaaattgcagattttttttttaggttttggtaaaatcaaatcaaatagtaaaatatggaataaaagatcgaatgcaaattgaaaccccgatacttaaaaattgatgctcttatctcttccttcttcgtgtaagataatgatttggagatgtttgagataatgtagaaatgtaatagttttgatgaagaaggaagaagaaagaggagaagaagagaggtttgatcaaattgtaattcgcaaattatttctgagttctctacaaaacaagaaaaaatgaagcagaaaaggttttaaaagcaaaaaaaacaggagtagaagaatccatgccgtaggatttaaaagcttattttgagattgttttcagctatttatggattttactgataatgaaatgtattagttcataactagagctctctttagccaaaatttactaaattttcaaatcactttgattctgataatatttgggctgtaacatgatgtttcgtttttgcaagagtgaacatacaaagatatgaaccaatctgctatatgtttgtaaaagccttcttcgctgcaacgcagcagttacctaaaacctagctatgttgttgtttcccgcttttcttgcccttcttctgtttctgcttcaactgcgtcaaacctgctgctgtgatcttcacattcccgacaagagcagccatcagctccggatccgtacaagctttcatcaactctttctcccttactgacgcctccgacatatgtgtgaacagattcattgcagtttttgcagctgtccaaacacaaaagtcaacatcaatacagtccaaaagctctacatttacaactacttggaagagaatgtgttgttaccttttcctttcttcatgctgcctggaatcgctttgactctgtatttatatgactggagagcattgtaggggccgcacacggggaccgcatataaaaggatgtcggttggtaacgggttaccagtaaggtaatcgacatcaatcagtttttctttctcttcgtccccaacttcatgaatatcgtcttcttccatcaccactttgtccatgtctgaagtttctttcccatgacaatccctagcaagatgtccaaccttcttacacctgtaacatattttcacagcatcgtctgtctctgcacagcaacccaaagcaactatcagtatcatatggttccagtctaatggaaagtgtatgcccggaaacaatttcagaagaaaaaagacaaaattgaaattttttaccttcagaaggtttcttcacttcagtgaccgcggtttttgcattctgtgattcaacatcagtcttctgtggctttccagacgactgcaaaggggagacaaattaatttaccagttatgaagtactgataagagaacaatgatggtctatgacaaaaaatggagaatccaagggaagtacttactgccaacaatgccatccgtatttttctttcgtcttcatcttgatcagcatacttctccttcattttcttaagtttacccctttgcccacggctaactttttccccagctggcttgttatcaggtatgctcttggtagcttggcttaaagaagaaacgtctttttcctttcgttgctgcttttcttgcccagtgttaccatcagcagctgtgttgccgctttggcccatcttaagctttcttctttcagcttttgacatataaggcttatctctcactactgcattcttctcttcctgtttcatcttctcttccatatcatcttttgatgtctctattgtatctttcttgcctgccaccgttgcagcaccaagaccaagggttctatcaagaagatcttcaagctgtgaggtggctgatgcaacattttcttcagtaataccagatgaactcatgtctaaagaagaagtatcttggctcaatgccgtacttgattcctgcaaatcaacttctcctgaggcagaaaccacttcattcactgcttcgttctctgactcagtatctgaatgctcatcaggagcatgtgtttccatgactacatcattcattccttcctcttcccctcttacccttctctcattcaaatgagctcccaaggagctctcgtccaaacgaaacaataatccaaaacccatgatgagtgggtgtggtggaagaaagtttttcttacctcgtatcatgaaacttccaactgtaaggtattccccagtaggagctgttttagtgacctgatgaggataaacccaccatgcactagtaacaatcttggaatcccaggcctgactatgacaaacctgcatcatattatatccaaaagtctgccatcaagacattgcaccatattcacataattcaaacaaccaaaatagtagatgaaattgcttaccgtaaaacatccagcttggtttaaagtgagaggcggtacattttgttcaggtttatgattctttatcacagtactagatgctccatgaagctctgcgtgtacatacctaagaaagcatggttaaaaacttatcatcatctttgaatatttaatactaacacaaagactagataaatagttctatatattaaaacttacagatctccttttgacatgtaacgtttaactatcatctcattttgctgagcatcacgaccactgatgaccaagtagttttcactgctaatgaaccaattaaatttctcaaaccagtggacttttctcatgtgtgaaatcgttgcaaccactttttcctttcagccagaaaaatgcaaatgattagttgactgcgaggaagaaacattaaacaagattaacagcgacgaggttggaagcttacctgagaaagttggtggcgggtctttttctcagctgctctaaaagccttttcatgggcagaaacagtcttctcctgtttggtttcttgcttcttcttcatttcataccagcgcctagcattaccatgcgcagaaagtgataagtcaacctccacctacaaaaccacatcgtgctccatatgtcagaacaagaaagaagatgagctttgtatattcaatcaaagtgaggagagatcaacaccttttccactggaaccgtcttctcatcatcatccatttcatcgagattgttgcacaacaacaaggtcatgcaattcttctccagataaagtctgtcaatgactccagcaacaggatttcctaattttttttcttccttgaccatgcgagctagatcatcccagcccataccctttgcaagtgctacacgaacagctaatatggcagcatctacatcttctaagttgtactcgattaattccgccatattaacacaatggttgacttctttcttcagaatttgaacacggttctcctaaaacacaagtatagaaacattgcaattaagataagtttaaagaaaagttttacagagatatatggaaatggaagttccaaaccagtacattaataaatactacaaacctgatcttggcgaatcttattgagtttcagactggcagaatcttcttttgccttttgttgttgttcagacctttggctctcaattttgctgtagaactcatctaaagccgcatcgaaagtttcaaacttttcatacactcttgatttgaattgatttagtaagattgaacagaactcatcatacatctgtaggcaaccaggcaaacgaaaattcaatacataaaatccattgccattaaacaatacaaaaatgaagaagcatagagtaaaatagtgacctttttaacacctcctgattcagaagtcgtgtcatttgccaaaatttgtttttgcattagaatataaccttcaggaactttttgaccatttataatatcttcaagccaatcttcaaaaacgatcaccgcttgaaccaataactgaatctcattatcatctaatttcttgtcttctgaaagtttggtagttggaactagaccagcatccagaataatgtgctctgagagctgtggcccatagcctaaagcgtcaccaagaatattcttcaatgtatattgtttggcacccgtagaatcatttgacttcccaccctttttgccaccattctgctccttcggttcaatctgttttgcgtcatgatccttaagcacgaaagcagtaagtgattcctgaagctttgaaacagttgttctctcaaagactcgacatatctctatcgggtaacggtgacgagacataatagcaaaacccttattgtcatctctacagaaataaaaatcaatcattcagtataaaaagccacacgaacaaaagcactttgagcagttcaaacatagcaaaaacaaacgatctgataaaagtagagtaacaaaaacaaacctatgagagcggaggagtgtcatgatcatatactcagaatcagtaagaattatgtttccttgagcatacagctccaatataacatagtgagcattagcacctagcccaaactggaagacaataatctggtacaaacaacaaaagttaaaaccaaaaaacgcaataaatggcaaccaaacaaaacacaatagaaaactccaagttccataccctatcataaccaagctgtcgaacatcctcaagcctcctagtcctgatatgtttcctcaacttcaaagtaaacccagatggagtattactcttatccctacacaaatttgtgagagaaaaaaaaatcattactttactacttccccaaaacaaaagctcaaaatctagagatgggtttttacctgacataagctgtggtatgtaaacgaacaccactttccattaaaagcaaaactttctcactttcaccagattctgtgataccgctactattcaagagcttgaacatatacgtctgtagaagaaattggagcaaaatcaaaacataaaccctaatggaaatcgaatcaaatgaatcaggggatttgaagcttttcattgtagaaatttgttaccttgggagatatatcatagacgttggagcatctcataccgattaatcgcttcaagcacttgacttcggcggcgacgtccgccgtgttcattcgtaccttcaccatatcttagtctctctcgaaatttcgtgattcagtgtcgaatcgaagaaaggttttaatctgtttgtcaaagttagaaattaaaattcggtctgtgctaagctgtgagaaaagaggaagaaggagaagagaaatttgtgagctattcatgtgtgttgggccgactagaagggcctataagcccaatataaaagacgatcattagttatctaaaccaatcaaaattacatgcttttttaaaaccggttagtctaatacactaattagagaagtttttaatttgtctcagtttgaatattgataattgataaataatccacatataacagttgtatgtattatttatgaacaataaaatctatgcagcaaaaataaagtaactaaaatattcaactcctattcaagaatcaaattgatagagtaagctgcaatttatggtgaaagtagttttaccataaggttttctcctaattattttaagaatatatttatttcccacaattggttaataaaattgtgaatgaatacattttttttgtctacaacttgtattattgggtttagactcgaaaatgacacattgataacatttgcacaaataactagatcatatgtttttgtcatattttgagcacaatttgtgcatatttcaagcaaattttgaacatatatcaaatccgtcataaccaattaatgttattattagtacttgttttcattataataatgacgtcataatcaatactgaacgtaccagcgaaatgatggtacatatcggctttaaaatagtattcaccaaatattgctggaggcttgtaatcttttttgctgaagacaagtcaattagggccatttccatttgactaaatctatttgtgcctaatggaaaaatagagatatatactttaagttgatgaagcttttcgtttgcttttatgttcctaatggcaacggtatcaactcgatgatttagactcttaaggaactttaccatatctttatggagaattaggaagtttgtggtgttggataaagggtagaagggaggaaccgcgaaaaagagtgttcttgtgaatggatacacacagaaatactatggattcgggtttttttcctgctcacaagatgaacagtgaatagaagtggtagagaatgtagatattagttctgttaaagctgaatgtgtacaaaacaatatggaaagttagataaataagatctttaggtcggaccaattgttagaagccaaaaataatctctaaactctctttattaaaactgagaaaatgatagcgtaacaagattagagtaaaactcctcaaagagaaactacgtcctcttctcctcggcctaattcgacagaatcctccaaaactctcaattgcttggatgcttttcaaaaacgagactacatccttatttataagtaaacgtaaacaagcattcaaagaaaataaggaaaaataaaaaattataggcaacttcctaaatctaaacagaaacgttgattgttttccaattcacagattgacttgttcttgattattctttttccacatacgtgaataaacaatccacggtttagacttctagaaacattcatatcagatacttcagttttttttttcactttttttttgttgttgtgcgaaatcagatacttaactatacgacatatgcaactatgcaaatctgaaatgtacttacagtttgttgtgaagacgaaaagcaagatcacgattatgattcttgaactgatcatcattcttttcttttcctctgcttataactaatggctcaagtttcttcattttggtttatgtgtattattttattaaattacgatagaagaaattaggaattaaagtctaactactagaatctgcaaaatcagatcatatattgttttcctaatttagttcaaggccaatctctactagagtctgcaatattagtgtgcaggaggggggaagtaatcatttaaaccagcaaacagtaaaacactgatgtgtcgtttttacaagaactggtaaaagaacatcctgttttgtccaaaacgaaaaagaccacccggttattgggactcttagttaaatgagaattccaaatatcaaattaatcaaccagtttggattaataaccggttttaatccaattattgggactgcttgtaaacctcataataaaactaatatgatcttttaaattaataggggttaaagagcgacggaaaatgctttggtcaatataaaattttcccggtttacgcaataacattatgcattgcttgcttgaaattcaaatcgttgatttgtggtgaagaacgatttcgaatatttgtttaaaactttttatttccaagaaaatttaggggagacagcttcatatcccaatttattgcttctactagtaactttccaaacccaaagttaaaaccattttaggattgatcaaaaaaaaaaaaccattttaggaatgcttttaaacctcatagcttcactcgctaatagacaaaatagtaataaaatgtctattgatttaaatacatttggaacaaaaatttgcaaatatttacataatttataaattaatttgtgaaaaagtgttcacgcaaaaaaaaaaaaaaaaacaataaaaaaactttgggtgggccttgtaacacaagacgccgccgataaaaggaaatctcacgatcgtatcatctccgaaacaaaaactcgtggaggagatatgcaattgctgacgctaaatccggcggccatttccaggacgccgccgcaagccatagacccttcctcatcctcgagtcttcttcttccttttcctcaggtgatttttgactttttctcctccttcgatttttaatctcgttctttgttcttcacacgcttatttgtttatgtttactcattgtatcgatgtctctgctccgaattcttttggcagattttgagctcccaacgcgctcttggtcttgtagctaggccttgtaatccacttcgacgaggattatctaggtttttatcaagtcgacagcttttccgacgatccaaaggtcagactacgaatatctccgtttagaaagatgtctcgatgttgattcgattactcatcgttgccgtcgttattgtatccttctgagcgcatgggcaaattctatgaccaaagatcaaatagttcaaaaattgtccttgaatcttggacttctaatgaattcatagagagtttgatgtagattatactcgtaagaatattttacaggtaaattatcaacggtctcgtttatcatctgaactttggaagctttgtgattgaattgttttactcaatctcaaaagggctctgacatgacaatttcttcattttcctatggctgtcttctgtttttatttgggttgcattagggaaatattatttcaactctagtttttgttagaatcttgaatttgtaatgaactatcagagattttgatgtatatagttggttagtgctcagaagaactttcacagatttgaaaaccaactgttctagtttagaatcagatgcttttcttgtcttactagtctccgtgaaacttgggaagctcgaatttggtgttgtgattgcattgcgctgtgacgtgacaaattttgtttcatatggctatcatcggttattgggttgctttaggggtatataatttcatatgtagtttgtgaacgaatggtttctggtcccatctctctatcagacattatatggttacaacgtttccctaaagttacagtaaaggttctcctttcctaagtttgatatccatttccattgatttgaaacgttatcattgcttcttctgtgtgtatcttctcctggagagatatgtatttaggtttttatggttgatttctggatttttgcagttgtcaaggcagtagcaaccccagaccccatcttggaagtacctttaactgaggaaaatgtagaaagcgttttggatgaaatccgaccttaccttatgtctgatggtggtaatgtggcattacatgagatcgatggaaatattgtgcgggttaagctgcagggagcatgcggatcatgtccaagttctactatgacaatgaagatgggtattgagcgtcgtctaatggaaaagatccctgaaatagtggctgtagaagctcttccagatgaagagactggccttgaactgaatgaggaaaacattgaaaaggttaaattttggtattagctctatgctgcttaagttctttgcatatgtgggtttgttctaatcacttactcaatggtgtgcaatatattgtttaggtgctggaagaaatcaggccttacttaatcggaacagcagatggatcgcttgatctagtggagattgaagatccaatcgtgaagataagaatcacaggacctgcagctggagtcatgacagttcgtgtagcagtcactcagaaactaagagagaaaattccatcaatcgcagctgttcaacttatatagaaacaacaactcttcttgtatgctttgtattagctcccttgtatagttgttgtgcatagattatgtgttttgttgacatttgctatttgtcctcaaataagttttcaacatttttgttttacttagaaaaaaagtccttattatttacttgagagcagagacttatttgattcttccatcgttttcataatgagccgatatttctccttcttcttcttagctctcttcctccattatcgtattatcgtagcttctccattcgaaggatttgatgctgaagaagacgacgttaccgacgattcctctcaccttcttcaccactcactccctccgcctcttctcactcagtctcactcatcactctccgatcccgatccggagccggaaccttcttccgccgaatgtaaatccgatctcatcactgaatcagatctcgagcatcaatccgattcgaaaactccctcgtctacaccatttgagtactgggacgaagacgagttcgaaggactaccagttgagatagagacacttgaatctccattgattacagaaaacggaactcatgctgatccaaagacgccagatctcaagacttcatcggaagctcaaggagacactaatgatcaaacgaagaagaagaagtcgtacgcggtggagatcgcttgcgtctgtttcttaatcgcactcgcaatcaactacttcgttggtaaacgtgagaacgagagtctcgcattagcttgggcggcgaaatttgcttctaaggatacaatattccagaagaattttagtatgcttggagttagtgaattagaggattcgccattgttgttaaaagaagccttaaatgtgttcaaattctacgcgagtggtcgtaggtattgccatggattgttagctactatggagcttaagagtagacatgatttgatctctagggtgtttaatttggttgttccttgtaaagatgagatcacttttgaggtttatatgaatgaagaaactatggatcatgttgtgtttgctatgacgaagaagaaggctgcaaaaactatgcaaaaggagatgagggatttgcaaagatttgctgggattgtgtctcctcctgctggaaggaaatgggtgtcggaggagttcgccttgatctctgaatccaaggaagttgctgcggatttgatcactgacactgttcttgatcaggtgagaaaagttttctttttgttctttctcagattcttcatttgtttgatgattgatgatacctatagtagaactgtaaatgtgtattcgctggggatatagcgagctaggatcaattattagcagagtgagaactggtagtcacagaatttggcagttccaatatcagctcatttctgagttcagtctgatttggagacttttgtagtgtacttgaatggatcttattgttttcgagtgagtgtaagatatgttgaaggaagcgttagtgtctttaagcattcagtaatggagttagttaggatatggtaatcagctggcttgaattctatgtctgtgtctctgtttgtatctctatgtggttaaatagggaaatcaatcacgtccaaatctccaatgggaaccttagtttaacattttagatttggcttaacgttgcacattctctatctctatgatactatcagtaaccaaactcaggcgtgtaggtttttggtgacaaggctgtggataagtatgggaagaatttcatgtcgatgcatatatctgaccaacaccctggcaagcacaagaagatgatgcttttcaagttttctttacctgatgctaaacatatggatgatattgtccggttggtggcgctaattccatattacatcgacttagtaggacgatacagactcagctcgcaggtaaattgcaaacttatgattagttataatagtcttgttaaaagtggtgaaatgctgagtttaaagtgtcttgatttaatgaaggcgcggaacaaaactgagagtggtaggcaaaaggcagcagaggaagcatacaaggaacttcataacgcgaggcaagaggcattgcagaagaagaaagcagaaaagaagaaaatgatggaggaagcggaagcaaagatgagcgcagaagtgataaggaagaaagaggcaaaagagagagcaaggcaggtgaaaaaggcagtaccaaaaatgaagatgagccgtagtcactagctaaaagcttaatcaaagagagccatccagaattaatgcattaaaatcactctccagagttcaaactctaaaaagcttagaaaacatcagcacgtgttttactcgatggctgctttgcttcataatactctcccttaaagtagtaccatgtttgacttgataatggagtttttgatgttgaggtggaaagtcatgcgagagctttgtatagtatggatggcaaatggctaattgtacccatattgtctcatagaagaaagctgatctatgcacactactttgttctttgcatctatatgttgagccctgagagtttgtataacattgacggcaaatagcttattgcaggcttatctcatgtagcttacagtccaaagttattaatggcataagtcatctactgtatatagtttactttgcactagtagaatatgatctctatttttctacgagctttctgaatcttctcttaattgaaaacaaaagtgcaggtcctactagtggccacgtcgtgactatagcaatgtatgccaatagccaaatcgatttccggctgtatcttgaaagctgatccactctcttcttcaaaggaccgagtatattgttataaacttgaggattattgtccttgtgtagatgattacttgtctttacataaatttgagcattatcctctggttctgcatcagctcttgttgtgtccacttcacttgcagcagcaaccatcccgtgttctccagcatccacgaatggtccctgatcaatcgaagatcccaatggttcggggatgatctgcatatgaaatatatgatgcatgtcttagaagagactaagagtggataatgtcatggaaatggactaaaactcattttcatcataccttgtgtcttctgtctgcaaaggggctggagagtagcacttcaaaatattcgtgtacaacccttgtccacctatacattacagtttcacatttttcaattccactcctaagaaagtccttgtgaatagaaatgtgagatgagtttctaagactgcggatttacgcagattgattaccacatgcttgacgctgtcaacccttcatagtaagctagatgaccaccatgtgttgtggtagccagaactatgtttttgtttgccctgcaaaagttgagacattggaacatcagtttcataatacagggagacccatcactatgcaatgcagaaagatacaaccaagaatcgcatcaaatttttcgccaacgatgcctaaagccgttcacttcttaatttagccatgcatggaaactcaatatgacagtgaaactaccaagtcagtttaacagaagaattaccaactcaatttagcaaccgtaatcttgtgaaaacttctagagcacccaagaacaaaaccaacaacaaaaccagataagaatgactttctagagcatctcctactatcccatatcaaaaccaattccccaaatactcggatcctgttaaataccctattcagactattgttccctctatctaacttctgaattttagtgaggtgacgtggcattacttaacagctaaatgtactccttctgaggacttatcagtggccctacaaggctacaacataagagaaccgatgtattgtgcaaattaatctagtccatcagctctagagttgaaaactggtggaaagaatgattaaagggtcgaagcatatggattcttacctacattcatcccaaggaatagcttctctagtacaaactggatcatccaaagcactgatgcaaaggagcggaacagcgacattttccacatattgtgaactgcttgaacgtctatagtatgtatcagttgtctgcatcattagagattggaagttttactgcttaaaaggaaagatgggatacattaaacaaagggtaaggagaatgtgaagcaaacttcacctcgaatttggcaacaagcctggtggcgtagttgtcaaactctcgaactgaacgtgactaaaacaagacacaagatgaatggtgaatcttttaagtcaatttacatgatttggcaaatatatagaaaatcaaaactcaccttcttaatgccttcccaatcggctatacgagaaatgatggaatggtgcctgcaggtgcaggtaccaccatgtgttagggaacaagaaagacgtaactaaagctagcaaaagtaggtatggaaacaataagttaacaatataagacaagaatttttggacatacaattgtgcataaccttgtagaccaatagtaagcattctgtcatacactttttgcacgagtttgcggttgataaatcgatcacatatctgcaaagaatattattttaaacagtaaggcatgattgtttttcttttctacattccatggaccaaaaatataactataagtatctcaaggaagaagaagagagattgtttcactattaagtttaaacaatatcacagaatttaagttagagtggaggtgagggtctactgaccaatagatcccaaggagaacacacagcagtagctccaataagaggtgtatttggcccatcctccccaagatattttacctggatgaggtttaaattgtaaaagtaagtaagagaaaccacatgaaagccactcaatttcatcgtagcaataatatatgggatatcaaactaattgtgtgaaatgttatccctttagaacaaacaatggttgccacaatatttcaaccttttgatgcaagattaagggaatcaaagataaaaaaaaaaaagacgatataccagaacgttggcaccaatgcttgttccaacagcaaacaaaggagcctctgggaactgagaatggatgtgagcaattactttccgaagatcttctgtccacccggcagtgtagacgcagtcagactgattaatgatttgaagagccagtcagtgaataattcatatattttctcaatccacatgcatcattcaatgaatcaacctcacaatattaaacttatgagaacaaaattaagcatatctacttaattggtttgataatattaagcatatgtcatggttcaaaatatcacctagatacaaaggatgaaacaaaatcaagaacacaaaacaaagaaactcacagttaaagatatccctccaagtccacggtggttttgcacaacaacattccatccttcctttgccagcctgaaggcaatatgtttaatatactgtgaaaaaggaataaaacaagagttcgagtaagcaaaagcaagagacaaatgagactatcccaacggaaacagaggaagaaagtagataggagtggtgaaatttactgcagcagaagaatcactagtgagccctggaactataatagcaattggagtcctatcagttcctggatttgaggcattgaccacttgagatataccttccacaactatagagaacaagaaaaagtttttaagtccatgaaatcaaaactgaaaacagcaaatgtgttaagttattattcttaataccaccaaccatcagaatgcattaaccaatccaaagcaattgtgccaccatctgttgcctgatagagaattctgagacacagaaagagatacaacactatttatacatctcaaagatcaagtctataggaaaaaccaagatgttatatcacatgaacacataacagttgtgcctagaagatctgagcaagtaaaagatgtggttttttgaaattaccgcttataggagaaaggaggagactttccaaaaagggtaaggaaagctgtttgaagatgagggcttgaaagccagaacgtaggaaagtatctgcaaaattgcaaatctttacataagaaagatcgcattttacgatgatggatcaatagaaggaaggaacccattaccgtccatgaaggagacgacacttggagacaataaacttgcagaagtcagagtttggattgaaggtaagagagataggatctgctttaggaaaatgaatctctaggaagaagtagaggaaaagtaagattgtgaggaagaagaagatgagatagtgagagattgggatgagtaagagcgatttgaagatgatgaggtaaggagagatcaaatcatcctctgtgattgcgcaattcatagtgacaatctcaaagtaaagaccttttgatgattctgggagatttctctaaactcaatgagtggagacgaccaaaatttgtttgaacaaaactaatgacatttgcttctcacttcacaaccaatcaggtttttttctttattgagacaaaaaaaaaacaatttaacagagaagagaagagaatccaattgggtcacgttgaatgggaaactgggctttcttctatcccaaccttttttgtttttgaggcccaataagattcgatgaaaagggttctgatattacattgagcaccttatacaaacaccagctccagaacccaaattcactactgaattaactttgctctgcaactgtctgatgaatcacgtatttcatgggtagaactaaaacaagatacagatttttattgaagagtgtatggtcatttactatacaaataattgtctctgtttcgtagtgactaaatgaacaagttgtggaaaaaaatggggtcttcaatgattcttgcttcttctaagaaaatggtcagaccaagttgcgaaaaaatggggactcaaggtaccatgttacgtcctggagagttcaaacggtcagagatcatctacgggttttgtaagttactgacttgaggcgatgacaacaaaaacatcatcaagggaccatttagtaagcttggatttatcagtagggttaatcacagcttgctccattcccgcaaggcgataaccgattatgatttcttgcctttgacgagcccttctcattatatcataaaagcaaacctcttcttggtcatatatgtaaaactctgcaggtcttatgcacaattcattaccctgcaacaaaaaaaactgactatactcatgagaacaacttcacattctacagaagcaaagcaagttcgtttcttatgtaccttttccgcgaaaagctcttttaaaacacggtttatttgtttatcctctgcgaccatcgcaagagccatactaactaactcattcgagagtacgtaatcactgattcttgacacagatacaaggttctttgttcttgaatcaagaatttcacttatcacaattgatttatctgaagcttgctgcatcttacgaatccaacagcaatttgggaatccagatatccgtaacgcgcttgactttgcatctttgtatggaagccgtttcgactgtttgattgaaatagaatataacagcttccattagtagtcatatatatgttatgagctcaagagacatgcatgcataaagattataataacataactgaattatatgcttccattagaaaagacgtaggacatgtacctgtatatcccgaataaggagaagcgtggcaagagatcgagagtctgaatgaacaatagagttctctagtgactgttctgcaagaattaagatctgcaatttgatttggtaatcatgaagatggtggaaagaaagtggcatatctattctcatgctacatcaaccagaaagaggaaacaacttactgaatcaaaagtttctagagggagactctctaaatgacgcctgatcactgcatttccctgcctatgcacaagttttatattcaccaatttggatatatttagtcctgcatctgtcaactttttctctctttcttgatctggaacctcgttaaacatccataactcagatccaggcgcaagcagagcttctagcacctatacggttagaaaagcacataactagttaacacagagtttgcatggaacaatgtttacactatagttcttcactctcttttgatacatcatgtaccttgatcatatcatcaatatcacgacgccatccacaaaaaagtattttctctggatattttggaggatcctgcattttgggaaaatgacacatccgtacctacatatatgaatatggttctatctttaatcaaccaatatagcaatataaggaaattatgtttgcatgagatggtagtcagtatattcaaggtgtccaagcattgtactaaaaacaaataatgtatgcatacctccggaagagaaccaggagcgtaagtgtcatcatcctctgctataacaagtatttcatcaccttctttcagaacatagtcatcactaggattcaaaactatcttcccatcagctgcaaccttaactccgcaaggaatcgcattaggaaatgaaatgaggacatcttcaaaacagtaaccatcaagctgaggccacttctttatgtaaaattcagcgttctcaaatcctaaaatatcctcccatatctaaaaatggtaaaagaaacagttaaaagcaaaagaataccatgtagacttcaaagtgttcttcaggttaggtgaacaaactaacctgcgcaagaccaggttgaagagcgcattgtatcataaggcgtccaatcacatcatgagctacaactgtttcaatgcgttctccaccaacaagctttaccaatggctcattgtctagatcacacatttcaaccacaacatgtcccttccaaccctcctttactcctgtaagactaagcacaacccttaaggcacgtgcatcgctctgtttatatcatccaaaagtgattaatacttcacaagaaacagtaacaccatagaataagaagtgattgatagcgataaacaaacctgatccgcgttttcatcagatcctagtacaatgatagcacgtgcattcgagactgaaacctgtcagtagatcaaaggttttcagaagcttcaccaccagccaagagttatgcaattaaagctttagaaacttgaccttcttcagatcagctagtataagtggactgccacttctacatataactgatgttcccattaaatcaaattcaaatttagcaatatcagtctccatctcttccttgtctcgttctgctaacacaaccacaacaccgccaccaatacttttatttgctattgccagctgcttcaaaagtgacccctacacacatgatacgttctctgcctctaagctatttataaccaatccaacactgtaaagcaaaaattagtaacataccaatttatcactccatccaagaattagtatatgattactttcaagaacttcacttttccctttccgtagcgaatctaccatcttcgagatagcatctgaaatgagtccaagcattgtagcaaatatcaacataccacctgcacttatagcaacagaaactattcttgctccaacaccaactctatcagcatgacttcccgaatccgctacaaaagtccacgataaccaaagggcttcatcaaccccacagtcactaacagcatacaatgctaatccaccataaactataagaacaacagttgccaacagaagagcaagaagcttagcatatggatacactgaaaaacacacatccaacgaataagctagtctcttcttcaaaggaacgtcttctttcttctgatttgttcgtcttagtagattcttgacatgtgagagatcgtcaagatacatgtacaacaaaaatggtaacacaaaggtgataatgacactgaagaaaacaacagctctagaattagtttcttccatctcattgttgtcactgctactgttacatcttgttagaaggattatattctctgcctgtaacaacaaaacacaagttatcagaaaaacaaccagcttgatctatatgaaccactgttttttgatcttgtaatcagaaaaatctaaaacatacctctagtcttgaaactttagaccgaagaaacatcacataagtaaaagaacatgaacaaatgaatttgagctgcaagaaaacaccaaaattcaatattcacctaataaaaatgagtaatgagtaattgaattcagaataaaacatacacaatgagtgagagagaactgagtccataaccgagttatcctctgactcggggattgactcggcaccggcactggtttttcctcgggattcggaaccgtcgggaggttacttgaatcatcaccgtcgtagctgacagtatctccgtcatcatatctgaaagtgggaatcacaggagaggtgaatcttcgatatgagtttgttggtaacgttttggatctttggaacagagaggttcttctaggggtatgaatcggcatcgggttgaagtaagtaaattgagaaacagagatcagttacaatgattgaaatttggaacatggaagaagagagatctgagagttagagagagcttcttcgtcagtccactgtttgtttagctctctgtctctttttgttacagtttttgaataaacaaatgccaaaaaagtaaatggagggagaaagctttttgatacccaatttagaaagtatctttcttctatcaaatttattatatttcatttgaaatgatacgtaaattagtaatttttctatttttatatacaatcctattatataaaacttaacaaaacatggtttgtgtaaaatttacattgcaaatcattttaccgccacaatgaatgtcccaagcgagcctttaataagtcccatgttaaaattctattgccggagcaaaaatgttaagaggaagagtttatatacatagagagagtgtgaagtgaatcaaaagctggtcttgttcatggatatgaaattcttttatttatgcgatgactgtcaacaacttcagaaattagtttgctaaaaccgacgataactatatcatggtatcccgagtcaaaaattcaaacgatgcgattttgatatgatagtgtgcatggtgttactgccaggtctacttatatatacatattcaagatgagcataatgaagactacagtttcatgccaccagtcatatgatcagaaatgaaaaacaataagcaaactaaattatatatcaaataaaatggagtatctgcagagccgttcctaccgttttagaggccataagcgactaaaagtagataatgcaatttatgcaatttgtttctatctgaaacaatgttcatctggtaatatttcaacttctatttcaaaatcaattggagggatcgatgctcgagattgcatatgataagaataggatttcaaaatcaatgttgtctcttccgaataagattttgatacacctatattatatcaacaaattttttataaatttacataaacaaaaattaaaattagatgatgatacaattaagaattaaaatagttgaaagcaaataaaaaaaaaaaatcctcattttatcttaggatattcgataatatttaaaagtaatttgataatcaattcggttttttttttttttgctaattctttgagttctggttgtgtatacttaataaagtaggataatgtcgtatttatatatatatatatatatatgtttacacttatataacagtgtaacacatgaattcatgttctaatcgattttttcttacatataaattaaaaagttacagaaactattccatttcaaactatagctacagtttaaatcatctaaagaattgtatatattatatctagactctagtaatcaaaatgaactatgtcataggctacatggatataaataaccaaacaaagttggtggcttatttttgagagtttttgggtcataaagagactaccaattaattgttgttgttgtggtgtgggaagtcattgggctaaatgaggaatgtgatacgcagagtcacaacaatgacattcaccttccttctccaatcaccaccactcccaatttctccatctcctcctcaattctctctttcctcttctcctttatcaaaaacgcagcgattcatcactccaagccagggctctcgtctacggactttgtgtaccaaagtcatcataccaaacatgcaagattcaggatcaccaccactctcttatcttactcagcgagaagccgctgagattgatgagaccttgatgggtcctcttggtttctccattgatcagctcatggtcctccatttttctcttcttctccttcttcttctctcccatggtttgctacctgttcgtgattgattttgctcttcttcttctgattgtaggaattggctggtcttagtgtggcagcttcaattgctgaggtaattcgatcactttagatctagacatatgtgtgagacgtttcattgtaggtatctgaatgtaaagctcaaagctttaacctttgaaccgataaacctctaaagctctctcttttccttggatgagtctcacaagttaagaacttcagtgaaataatctgactttattgaacccaaacttgggtatcactgtttatcttagcattacagagttttgtttttgttatgtacattggatttgaagtctacaatgtttttccaggtttataaaccggaagaatatagccgggttctagctatctgtggtcctgggaacaatggtggtgatggtttggtggcggcgaggcatttgcaccactttggatataaaccgtttatttgttatcccaaacgtacagccaagccactttatactggactggtcactcaggtttgtgtaaccagtgcttaatttatgggggatctttgttagctttctccgtttctttactgcctgctgaatttgcctgtttttgtagttggattcactctcagtcccttttgtttccgttgaggatctgccggatgacttgtcaaaggactttgatgttattgtagatgcaatgtttgggttttcattccatggtaactatttttgtgcatgaatcgttagaattcttcaaagcatgaaacaattataagaagtaaattcatcaaacttttgaacagcaagttttggaatcaaagtctcagagatgcaccttattcatttgcatcatgtttcagttggcctttgaaaatccattttttgcacatgtaggagctcccaggcctccttttgatgacctcatccggcgattagtatcgttacagaactatgagcagactcttcaaaaacacccagtcattgtctctgtggatattccctctggttggcacgttgaagaaggagaccatgaagatggaggaattaagcctgatatgttggtaagtcttagccgaaatgcttgtgtttctctttttctcttgtactcatttgttactatctgatataatgaaaactactttataaattgaacatatttactctttttaggtatctttgactgccccaaaattatgtgcaaagagattccgtggccctcatcactttttaggtgggagatttgtaccaccttctgttgcagaaaagtataagctggagctccctagttacccagggacatctatgtgtgttagaattggtaaacctcccaaagttgacatatctgctatgagagtgaactatgtctctccagaattgcttgaggagcaggttgaaactgatcctacggtacaggtataaatcgtttttgttgtctttacttatctgtattgttcgacaaggtaatgaatgagcagaaacttatattgttctcagaaaattagaaatgaagcgtctttgttctgcccaagtcaatttgttatctgatgtaataatactcttttcacttttgctcatttttaatggcttttcaataactcgttcttctagactagtcactgcttagttattgtggttactaattagagataagacatctgtttggctaatacatgtctttcttgttttgcagtttcgtaaatggtttgatgaggcagttgctgctggattgagagaaacaaatgctatggctttgtctacagcgaacaaggacaaaaaaccgtaagtatactttgatatttcaggagatcctcctaccccgtgtaacaatatctcttagatgttatctagcattactgaattataaaagtggaactttatagagctttctgcaatagggtgagatagatctagctatgatttctttgaactagttgttgtctgatatacagcatgtgatacaaaaagtgcgtctgatgtttccaatttgctgcatgatttgcaatttctaacatgttgtttcttattccattctttttgaagtagtcgtaagtatatatgttagtgtctctgcatgcacgaatcttgatcatgggcgaactcagttatgcttgaatacaacttatttgcctgtaatagaacaaccacatatttgtatcaggcacagaatttgccagtctactttctttttcactatcttttctaattagcctgatcatcctacagctcatcaagaatggttttactaaaaggatttgatgagaatggatttgtctggttagtacattctctcccttttctaatgagaactggggtatgcaatctctgtgtccaacctgatgttacttgcttaaattgtaaaatataggttcaccaactacgaaagtaaaaagggttctgatttatcagaaaatcctagtgcagcacttcttttttactgggaaattttgaaccgtcaggtgtgtgtttccatcttctttaacctccttgtgtgttttaggctcttagttaatagtttgcacatccatttatgaggtgcactgtagtaaaatatatgtcctacaaagccaattggccaaccactgatacacaagaattagtaacttggtcgatgaagatcttttcgtagtactaatgtccaatgtacttaaccaggtaagaattgaaggaccagtggaaagaatacctgagtcagaatccgagaattactttcatagtcgtcctagaggaagtcagattggagctattgttagcaagcaggtgccttgtgatctgttacagtattcaaaatatttcatatgatgttaagaatttgctttggacccttacccttcaacttttggttgctatcagagttctgttgtacctggcaggcatgttctatacgacgaatatgaagaactgacaaaacaatattcggatgggtgaattctaaaaccttgtaactcttcaaaagaactcatttttgatttgatgttcttgattgatgattaagaatatgtttttggcttgcagaagtgtgataccaaagccgaaaaactggggaggattcagacttaaaccaaaccttttcgagttttggcagggacagccatctcgtttacatgacaggtacgctctacttcttcacaatttattgtaatttcgatggacagatcaggtgtctagatttcgagaaatagctggaaaaaatgtagaggaaaatgatctcttaattacgcttagaacacataaaagtagccatgggcccatggccaatgtttgctaacatatggtcgtcgaacacaggctgcagtattctctgcaagacgtaaacgggaatcctgcgtggaaaattcatagattggccccatgacttctactcactacctcttccctgtgaagaacatggctctttgtgattcatatcaaaccattacaatgagaataagattttaattatagctgtatagcgatttatcttcttaatgtgactaaattattagtgcttttccattttcagcacttaatactgtgatttattttagcttttgtgtttgataaaccaatacaaagatacaacttgtgtcttgacggataagtagttatcgcagagacgatggtttggcctaaaattttacagaactattggttcctttttggacaaatccttgccacttacaccaaaataagacccatttttcaggccaaaccagattttgttgactcctcttggattttccctgacacttcactcccaaaagtctatggctccaagtccaaaaacatctaacacaaacaaatttttttttaatgtaaattcaatataaaatcttgactataaatatgaaaagataatatcttctacgtttaaatgcttcccaaatggtagtggctaatatcaccgtccaactgaagttgaacagaagaagacatattctatgtaagggacaaatgcatgtaaccaacaaactaagacaatatcttatttatttatgtaatagtatatggaaggagagggaatggagatggaaagttggatgaatggtgaccgtaggatgataaaggatgaaatgatgggagcataaaaaacattggggttaagtggtttaatgagtaggtaagatgatcacatcaatcctaatatctaagccccctttttccaaattatctctaatccaccaccatcatatgtttttgtcaccatcctctgcattatttcagttttggttatgacctttaagaaataaatgatgggtctcttgtcagttgaaaatatgtagtcttttggggacaaagatggcttgtcaacaaaaggcaaaaggagaggtcttcctttggataagaaccttagctcatatctctccaccaccacactttccctcaccctacattttagttacgcgtaccacattttaaccgaacgaagccaaataatcgaatcgaatcaaaatgatcttttcttgaagttacattatagtttgctgacaaatgacataatttaaacagattaagatgaaatatctcaaaattaattaaaaatgggaaagacaaaagagagagatgtctcattagtttctcaacaacaacaactagagagagccaaaagtgcagcttattagaaccaactcagctgtctaactaacaccgatgctcccaaaacatacatccactgttccacctaaccacccaaataacatcttttgaacccaaaaataaaaaaagaaaataatgatacaacaatcttgcattcctcccaagtcccaaccaccatcattcatcatcaacaatcatgtagtgtgcctctgatgccaccaccatcatcatctgagcttcctacacttacccatttcattcccgtcttaaaaaacggaaacacggaaatgctcctcgttctataaaatcgtgacgaactttggtgcatcattccttggaccatcaagagaccgatacatgtataaagtctcgacataatccctattgtcatcatcatcatccgatccaattacttccacaactagattcggcattgctcgtgcaatatccttgcagcatcccttagacaagctacatgctgacatccaaacaaacctcatgttgtaatagcgatgcataccagaccgtaatgcaacatctccaaagggactgtcccttatctcaagtttctgcagtctagggcaaccttctaggacatgtctcagagccatgtcactgtcccctgcaaaagctactgaaagcgtacggaccaatttcccatactcacccatatacctaaaagcttgatctgtcagcaatcccgacactgcaaggcgagttagcttcttgcagtttttaacaatggcaccaaatccctcgtccataggctttcctgttacatggtcaggcctatgtcgacccattatgcacagcctaaacacagtaagctctggacagttctctgacatggctatcacagcggcattagtcatgcgctggcaaaagtagagaatagattctagtttcctacaaccctcggagattgcttggaggcctaattcagagacaggaccttcactgtcttcccgaggatcaaaagggaagatcctgagttcacggagttccttgcaagtggctgcaactgcctgtagtccttcatcacatattgaatcaagggcctgcattgtaaagttcaagtcatgcattttactcaagttccttacacaactaatatcaagtttattcattctatccatctaacacaaacaatacggtcactagagttaagtcacatataacttaataaagccatgaagacatagatcaagaaggatacatacccagaacacctggagtttgtggcaattgagtatgatgggcttgaacatgtcaggagaaatgttagcataactgaagttcagggaggtgagattagcgcacaccggaaagatagctggaagatactccggcatcaactctctaaaccctgacaagcaaactacagatttacaagcacgaaatgcagcagcataatctggttcttgctcactctgaggttcctcatcatggctaaatgaaccagtcccaagactagtaagctgtggagctccaagtagcagacgatgtagctccacaagagacacaaacctgtttagcctaagtttcttcaagaacggtgacctagcaacaagaccctcaagcgccttaaaattgataggagcttccacacagtcaaaagctaaagactccaaacaagttacatcctcagggaaacaagagatccaatccacttcatcatccgtgacctcagactcaatcaaatcaagcactttcagctttctgaaaacaaattaatatccaataagttcataactatcaaaacattactcaaagatagcattttcatatccaataagttgtaacatttacctgcacttgttggcaacaatagagataccactagtaccaaaaccttcacaacaaaccaagataagctctttaaacccaggaaaagagtcagcaagaagagctaaatcatcatcagtaacaaacatcctcttcaaatcaactttctcaagacaaggataagcttgagccatagtagaaacccaaggagcaaaattagcaccccaatcaggaggcatgagattgaaatcagcaaacctaggtttccctttcagcacaagagacctaacacgcttgaatctctgagtcaacctcgccggagaaagagcgtaacagttaccaataaaaacctcagatcgagtcaaagcttcaacacgccaccaagatttgcaaactagagaagcagcgttacggtcacatcttgaatctaggaactgaagaacgttctcaagtacgttttcgagaacatggtcagggaaagtttgagaatttgagatacagttacgagatttgtttggtgaagaggaagatgagcaaggatcagctatggcggtagagggtagatccaacggtggagattgttggtcatcgtcatcttcagacatttctgagcgatcttgtgtcataaagagagaggctttggattcagattagagaagaggaagaggaagaagaggaagaagaagaagaagctttggggtgtgagagagtgggagctttctctctccacttcgtctccattatttggggattattttttatttttaattttctgttttgtcttcttatatttatgtacaaaaataattaatattcatgttttttttttcttactagaaagtaaaatgtaactctttttttctgctttcttgtctccatcaatgtttttacactttacagtttcgtcctctttattttcttcagatctctattttagcaatgttttaattagaaaacaataaaatcaacattatccatttctatagtgtaggacacttgcctacccttttttcgagataagttgagaatttaaccatattggttagggtaattttttttgtcttaaaccaaatcactaagcatagataatatgaacaaattggttgggatcatttcaagtaacctcctacgaattatatgtatagacccgcataaatgatttcgaactagtgcacttttttggattctaacatttttgatccgtagattattattaagtaactcacaatagtttataacttcttataccttaacctaaggtggtaagtggtaaccgatttagctaatgacgtctttaaattttatcagtcaaaaatgtatttatatatgtgccacaaacaagcacatattattctaccaatcaaacaaaacaaatacagtataacacaactaaatacaaaacccattcatcattgaggctctgttttttgtgtgcaaatactcatcgttgtggctaaccatctgttttagacttttagttatcgttaacttcctatcaactagttatatgcaaccaaagaagtgtttaaatggacgacagagaatgaagcacatgaacccctacttatcttcaaaagtatatcataagagtttcaacgtcaaatctagcattacaaatttttgtaggaaattttttttgttatagaattagaatcgaaaagcctccaaaactcacaaaattttctcttttaatcatttgtattaaaacagagcatacatactctagttctaaatttggcaaaacgagtatcatctttaatgcaaaacatctaaacatagaagaaacatcacattaatatttctaaaatgttacttaacactttgggttataatatctagttgcgttttatagtctcctcaccgaatatgcacataaaacctagctagataaggtgtgtcctcctaagggacacaaaactagcaaaacagcattccataaagtttggaaggattttttttcagacagaagggaaatatttgttgaggttgaacggaagagcatagaactcttctgttctcgggtcgttcttgaaagtccagaatctgtcccaccagtgtttacctcggtctttcctgatcgaaccatctttcttgtgaagcgtcgtgtccaacaagtaagccacacatcctcccacaaaggccttggacgagaagggcacattgaccatgtcgttgaaccatcttgccccggtatgaactggaccatagcctttgatggctgtgtgctcgttgaaatattgtggaattgataggcctaggaagattgagaagcccagtatgaataatgtcctgaagctattcaggttgcagaattgcagcaaactcagtcctccagcacctatacaacagtttttgtattaaagatgctcatagctaaaacaagtctctagctctatatgttggtaagcaaaccaatctgaaccaaattgcttcaatctaaaccaagctaaaaaagaaacaatacttacctacatacgcaaagaagagacagtacaaggcagctatgataggagaaggtatggatgcaaatactgccccgaacttccctgcattagttttatttaagacgattacttaacgtagtccacttcaattcttaatgaatttttgtgagagagacaagcttaccaagaattgagaagaatatcataaagcctgcagatatttgaacaactctcctgctaccaatttttgttagtgccagcagacccgcattctcgctgcattcatgtgaaaacaaactcaccacaccattcaaaatcagctcatgtcctagatttgggaaaaggataggaggtcttacacagaaactgaagaccctataccagttccgaacaaccctgagattaaaattgcaactccctaaaccagaagagaacatagttgaggcacaacgttagataaatggccacttgcttgccccgagaaaacctcgagatggtatttgtaaaatgaagcttatgaagtgagtatttacctgccaaccaaccccgcggctgataacagaaggtggcggcattgtggcactagcatatcttgagacggcaataaaagcacctgtggactgttttttgttgacaaacaagtcaacataatgagtaagcaagatgagattaaaccaaagagcaagaaaattcgaaagaatgaagagagagtctcattgactttaaaagttaatgagtatgcaacctatgaaattcatctattaaggacagcctttctatataaatggatatgaaaatctatgcatatcataaataattgtctaatgtcatttaaaaaaggtgaagatgagtgaaacaaacctcaacaagagcaacaaaagaagccatcatcatggcaaatgcttcaccagcatcaaacaatggtgctccccattggaaaggccacggaactcttatcctgcacaattaataagcgtaaaatgctaagccacacttgtattcactgacaggtcattaaagaaaatacttttttgctaacataactcagcgagacattcaatgttcaagccttgttctgaaattcttaccatggagcagcacttataagcccagcgcgatcagtccgacagcttctttgagtatctgtcccaacaccattataggcaccaccaagtgtaagaaagaaagcataaagccatactatcgccacagaaaatatgacagcaaagcgagcaaacacatgttttcctccttttataacatggggcatgtactacaaaaccagcaaaaagtatgacccagatgattagaaacatcaacatactggaagaacacatccggatcaataacttatgcaatgagaacagatgagccggctgcaaattgctaccagttatgaatctttacctacaattacctgtgatattagtatgagaataataagcccaggcagtccaatctcaatacacttagcaacctggccaaaataacaaagaatcaagattccactaggttgatataatttagtttatctgttcccatttacagaacaaagagacttacaccgggaaaacctaactcgtacaggccataaccaactaatccaaccaaaggagcagcagatagtggacttaagaacctggacgaacagaagttcaatatcatattctttaacctgacacagtggaacaagatttgagtctaatgtagctcaaagactgaccttacaacattacgccaaaggccactgaagccaaggataatttgaagagttgaagcaacaataagagcaccttgggttgcccgaattatcctcttaaatcgctgataaggtatcaaaaaggtaatttagagtaaaacttcatattcaagcataactttattgatagtgatagtacactaaatagataataacacaattcaattaggggataagtgtgagctacgaacctcaactggatctgcaacgtcattgaatctcccagaaagcatgattgagatagtaaccgggacaaatgtataagatgctccaataacagcaggtaatctagttccaaacacagtttggagcagtgtgttcaatccagctacaaacaatattgtctggatcagctttgccttctcttcctgccaaaatcataaactttaagtacaatgaaagactgaaaagaataatgtgaacaactatctttctagaaaagagacttaacttacatttctacctcccatttgtggaacaagagccgatggaatcagaactgttgttccaagcatcacaaggtagtgttgaaacccaagcagaacagcctcagctgtaagacaagaataaactcagtctcacatttactaattaagaagctt

SEQ ID NO: 867 - DNA, 64569 bp, Arabidopsis thaliana
aaaacctcatattcaaacaagaattattcaaaaaccaactaccaaattagaaacatacagtaacactaaaaataaaagttagattgaacatatagcaaaaccaaggggtggattaagtttaatttcctttgttagcaaagaatgatcctcaaaacacctagtaggagattctcaaggtaaaaacgaatatttcttaaagagaaaagtaagaatccaatcctcacgttgcaacaaaaagcaaaaagtaaatgataccaaaatcagaaaaagtaaaaatggaagaagctaatcaatcacaaggcttcaaaaccagggatatgcctagaacaaaagctagaagtcaaacgttaagggaaaaggaaaagaagagagaaactaacgccatggaggaggacttgtaatgcagtaagagatatctggaagctgttctttcggcggatgtggtagtggatcaccacccgatttcggagctgacattcttcaacctctgcaacaaaaaaataaaaatcaaaactttaaaccaaaaacttcacataacgagaaagtgactgaaacccaaatcacagaagaagcaaaactcacgaaatttgagctcaagaagcagaaaacaagaaaaagacctcgttttgagctaacccacagttgcaaaaacaataaaaaccaaaactctacaccaaaaacttcactaacccgaaaagtgactgaaacccaaatcacagaagaatcaaaagctacgaaatttgagctcaataagtagaaaacataaaaacagaggtaaagacctcgttttgagctaaacccacagttgtaactttacaccaaaaaaacttcaataaaccgcaaagttactgaaacccaaatcacgaaagcagcaaaagtcacgaactttaagctcaaaaagctcgtaaatgaagaaagaaggcgaaacagaacaaaaacccaacaaaaagacctcgtttttaaagctaaaatcaagagcagagttttaaaaatgattctgtttaagtaagaagagcagagaggagagattatacacagattagaagaaatagaaaccttgtgaagaagcagcagcagaagaaaattggagagtaaactagaagaagaagcagtgaagagaagaggcttgatgaggaaggagcagaggggacagttgtctacgtttcgctatatcagcgttactttgtgcaccgattgacgtcaccacgaaaacaacctcttacctgtcattactcttaattcatttgtcattagtagttccccaacgcttttttcttattactaaatttttgacaatgaagacaatacttatttatttgtttggtaatgaatgaatgatatagatatagtttcattgtggtgtcgccaactgctattattatttataatcagtgttcttaaacacactatacaatttggcactaaacactagacttctaagaaacattattagcacaagcttctagtctcaataatacgttattgttaacttgtgttattgttaatgaggcgttagacccatagttatacaaagagagaagataacctaaggttacaaaaagaccataatggggcaaagaaatgttgactaagctaagattagaccataatggggcaaagaaatgtggactaagctaagattagtagctattgactagatctactctattaaaccaaaagacaatactgaagtagcaataatatcttcaacaaagttgtttctcgactatgcattccaacctaatggtccttctatgggaagtgaggtttatcatagctgaacattggactatatatatcaaataggatgttcctgtcgagtgtagttggttaacccataaagacaaaaagaacagttgtaccattgactagctatatcaaatatatgattagagatgatgatatacgtgaccataaatatttaataagcaactctcacaaatagagcaaaacaagaaatgttgaagaatatggaaaccaaatcatactctttacgtaaattttagcaaccattagatccctaacaagccttcccattttttttccttctggattataaaaagaaaaagaaaagaagcaaggacacgaatcttgagttttgaatgatcttagattggtctttgggaattaaggaccacgtttccttcggaagcataggcaaccctgttgctggtcgttaggaatcatccctcctcccttggttgtgtcaatactctccaacattggtacaacctcatccatctccggtctcttgtccggatttgcatcccaacatcgcttcatcacagctgcaagtgcgctcgggcaacacctcggtatatcgggtctcaggttctgcattgatcatatgtagcagcatattgcatatagattttttacttcagtgaaatgatgaaatggttacactactctagatcacattttttacttcagtgattcctcaagatttacaacaaaatataattgtgaaacaaccaatatgcacatttcaattaaattaacttttctttgcttaatctattcaaccatacctggcggacgacggctgaagtgacctcagagaaagtaaggtcagggtatggcatgtcacagcaatatatctcccataagcagatcccgaaactgtatacatcgcattttcgattatacgggtttccattgagaacctgcagccaaagtttatttgttataaaaagttggtttgttaccaatcttgatgatgcattatcactatagtacctcaggcgccatgtagccaagtgtgccagtctctcctgtcatgtcattagggttagatgcttcaactctcgcaactccaaaatctgcgattttaacagtccgggttttgtctaacaacatattctctgtctttacatctcggtgaacaatcttctgcgaatgaaggtaactcaacctaaaagcaacataacaataaccattagagcagataaacgacttgagaaggcagcgaaagaagggagaatataatgtaccctctagcgagatcaagagcgagctgaacaacaattttaaatgttagttttcttcttctgttcttgatcaggtaagattttaaagcaccacctggaagatattcaacaacaacacaacatatattgtttggcatagctaatggaccactctctgtttgcaactgtaaccctgatgcacccattgttgctcctataaactgcaaaatatacattcattgatgacccaaatcttatttatatcctcaatatataacaatggtaaaaagtaaacagaagtgaaatatgaaccttggtgacattaggatgatccaatttatgccaaacagcaacctcctgagcaaaatcagctctcaaagacacaatctcagcttctgatctatgaccttcttcaccccaatcaagcaacttcactgctcaatttcaccacaatgattagctcatttcttcactttaaatttaataacagtaaaaaagctctttagttactgcattcaagggatctattattcactctttttttctttaaaatttatttcatgaaaaagagagattgagacaacaacagctggaatcacatgaaagatccacaaagcaaaagaatcataattatccaagtagagacctttcaagtagctgaagaaacacttatgatagcaaaacccgtgtcggcttcacggagatcacaagatttgcttctaccctctaaagaaaaaaactcttcaaatccaaaacaattcagcaactttaatcttaaaaatccaaactttttttcaatctaacaagtttcatggtcaaaaaacacgaacacagaactaaactattcaagtacaaagcctgtttcggatccgacatttcaagtacaaatgtagtaatccattcttaaattcgagactttaaactaaacttgaagactttagcattatttcacagttacaaactaataatataaaatgaaagggaaaggtttcgatgagagaaggaagctagaacgacgggaaagtgactaaccggcaacatcttgaccgtcgtagataccacgatgaacggtaccaaaagtgccacgagcaagaacagtcttgatgataagtttagaaggatcgatctcccactcaagtctctgtttcctcttgccaacaaatccgccgccgtttagagtgacaggggaagaagaagcagagccaccgatggcgacggcggttgtgtcttcttcatctttcttcttgttcttctctaaagtcaaagctctgcttaagtgtctctctagttgctcgtctaagctttttagatcaatctgatctgctcgaacaaacccatcctttccttctttcattgtcaagcaaaagatcctatgaatctttttttggtcttctataagttgttgttgattttgtttcaacaagtttcttctctctctctctcagataatcaaacgcagaggaaaatgggaaaagaaaatcataaaaagggaagatgagaagagaagagaagaccgcatgtgagtgagcacatggtcttgcctcgacgctaatgtatctgtatttacatttctttttttcctttcataaaataaatacttttttgttttgtatttccaaaaacaataatcatcacttattatcaaaataagtgttggtaccaaccattttattgacgagaatagtgagtgcaaaagtttggcccattactctggatgttcggcccatcaaagatttgagctccctcgtaaacctaaatacaaaaatattagtatgtgaatttcgacatctacatttttgacgtcgtatgtggagtttatcatacttctgattttggtctttccaacttggtttcacatactatggataaactactaatataaattgatgttacgaagttaaaagatattaggaagaactaagccgatctttctcatcttgatttgatattgacatgaagatatcggttgtggcatgtctaaacaattggacatgcttgttacaactcagtgtgtgtttgaagtacgctttgatgctatgaactcgaccaactcccgagttatactatgtaaaatattgttctattgtcagcatatagagtataatgataagtggatccaatcatgtctcttgacttttttattttttataaattgaaccaaatctattttcacatacgcttacacgtatgggatacatatgataatcaattgatttgaagattgaggaatggaacttagagtggtggttaagtgtattggttgctttaaattgcacgaagcgtggatgattttgttggcgtatccacgtaccaaatggctccatgcattgtctgttgtccctaccaaaaccttcactattcttcttgagatcaatattaaatatatatattctctcaaataaagcatatacacaatggtgctcttcttcttttctctttttttttttattttaaatgtattgtataatcgcatgttcgttacatattaaccaaatcaaattaaaaggtcaaatataaaacaaaagctagaatttctatgccgaaaatatgggaaatgaataccttttgaaatttgggagtggccattagaagctcctcaattttattttattttcgcctttaaggtgtacaaatttctttttaatttaaaatttaaaaataattaacatgatcagctcttcctcaactataactctaattccgtgtacttaaatagttaaattatactataaacccacttagttgctttatctaagaattaaagaatgtgaactcatctcccatgcgtgttttcctttactcagaaggaaattaaatttcaatattctctgaaacccattacaaaacacggtcatgctagaagacttgaagtcgtgatatgtagcatttttaatgcgttttgtgaatatatgtaaactatatagatgttatataagtactctcggtccaacattttggagcacattatactatgatcttgatattcagccagtttattatgtcatatttttcgagaacatttgttgaattgaagaacataaaagatagcaaatcaacatctcatatatgtgtctttatcaaaaaaaaacatctcatatatgtgtattttttttaaccacgcaaaatgagaagagtgttattttatgtgtataaaaatggtggacctaggatatgatgattgctttagagacacacagaaagagagaaacggtggagggtttgttttgggcccctgacaccattaaagccagtaaggattaagtgtatccacttttaattaatcctaatttatatactatacggattagtaatattatcctaatggtttttgtataacttaaatatttggcgtggtaatattaaatgttactctgcttgtatgattgtgagcaaccagatctctcttatctgtacatcaaagatttggttcaggttactaaatcatgggtcttctacatctatcactattgaatatagtttcagatgtctttgattgtcaatgaaaaatatcttgggtataattattactagtcagtgccattttctgacaagagagaacgtgtctgtttcttctgggggattaattaggtttagataattttggtatcaagttttatgattgataatatacgattaagtcattggctaactagctaaaaaaactttttttggctaacttggtaatttttggtgatgcaggttgttcatttgggtttctgtatagaaattatctccttttttgtccttcgaaacttatcttacagtatctaatattgaatttatattttcataatataaattattgtggattggtcataaattatgatctcaataataatgttcttatgttatcattatttgtttgtatttttataagtcagtgagtatgacttgtaccgttcctacttctatagtgaaaacggaagtcttataatgataatgaagcttgtttttttttcttaacactttagtatatatagaaaaatatacatattttggaagagattataataaagaaaagatgaagagcaatcaattgtcttgtaggattttcctttcttcttgttatatttatcgtcacatatttcatcgttttttcactataagtgcaatagatacattttccacgaaagtgttttggagatccatatgaaaatagaccaaccagaatgggaagacaaaacataatgtgaaacccaaagaagatggaaatggagggtgcaaaaaggtaaaaagtaaaagtagaaatgatttggggtttgaacggtcaagccattgcaaacgagagtatttgagaaatgattggaccttcttcttcttcacattggatactttcactacttttcttactgacgatgaacgaaagtacgaaaccaacaaaatacataagcgagcgtcttataaaacatgattgcatgaagtaagtatactttggcttcaaatggatttttttttttgtatagcttcattgatgatcatttttatattatgtgaatgatatttgtgtttcggtggaattgaaagatactagattccgttagctgaatttgtttacatgtgatgaaaagtgaaagtcgactgattcttctttccaaccaaaacaagctatttggcataatttatttttccaccaaatgggcaaatgtatatcttttagccaaatataaataagccgaaaaagcatgttaacaacaatatggattatgagtatatcttactaattagtaattacatcgagaaaaataaacaactatttagattttgaacccaccaaattcagctaattttcccaaaaacatttgttatcggatttggtaaacactgtggcatcacgatacctaaactttaacgcacgcacgcatctctgttatgatgaaggtcactttcgtctttttctcttgtatatatcttcttcctcgctaacttctcttcgccatcactgaaactaatatctctctgcttcctccttagaacttctatttgcttctcttgcattccacttttgtgagtttctattatcttcagttttcgagatagaacttataaactctgtaataatatgcattgtgcatatttttctaggttaagttatttgttttaaagtgttctgtttcttgctagcactaaatctattgctctcgtttattttgcagattcatttgaagtagtgagattgactccagagataaaacaagaaagagcaacaaagcaacagcatgcggtggtggttgtgtctttctgcttatgtttttcgtacagtagtagtcttctgtcgtgtgattctgtaaactgcgatcttacttcagacatagcttttttatgtaatggggtcgtcttttttcttcacattcccttactttgtccgccaaattatttaagacttcgtttggatactctgttttgggagaaggaatcagttggggagaaagtagttatggtttgtcaatcagcgggacagacaagatttcgtacactcaaacacgaacacggtatcacaggaaacattgtagttagagtcattgcatgctttcaacctctccaagattgccaggttattttcttgtttgatgagtttatgttattgcaatatatttagatttttaaaccaccagaacttttttttattgatttcgttttagctttgatgttgtgtattttgcaggctgaatatttccgtcaattgttgaagcccgtcacgtagagtagctcgatacttatcgttcttgtttcaagcctagtttcttctatccatttagttggtaagttccagtctttgcacacataatcttttgacctcccattcttgattataagtagctgatttgtttgagatgatgatgtcctctgttttggatagttgatttgtttagtgttggatgggacaagatcgtgggtttgggtttcctactcagcgcttgtgttccttgtcttccctagctctgtctcatctcgggaagcaagacttgaatttagtatctaaaacctgcggcgacaccaccgacatgttttctactcgtggatcttatcaagtttctacccaagtctctcaatcctattttgatgggtattgtggatgggttcatgggtcatcccacctacagcagcagttcttgcctcctcaaaaccaatgtatgaagcaagtacctcttcaagtagacggtgttatatctaaagctgaggaacaatgtagtcagaagaggttcctagtgtttgatcagtctggagatcagacgactttgctactcgcttccgatatacggaaatcttttgagaccctaaaacagcatgcctgtcctgatatgaaggaagagctccaaagaagcaacaaagatttgtttgtttgtcacggaatgcaaggaaatagcgaaccggatttgaaggaggattcggaagaactaaatgcattgctttactctgaagatgagagtggttattgctctgaagaagatgaggttacaagcgcagaccattccccaagcattgtagtatcaggccgtgaggaccaaaaaacatttcttggaagctatggacaaccattaaatgctaaaaagagaaagatactcgaaacctcgaatgagagtatgcgggacgctgaatcgagctgtggtagttgtgacaacacaaggattagttttctgaaacgttctaagctgtctagtaacaagataggagaagagaagatatttgagactgtaagcctcttgcgcagtgtagtccccggggaggaactggtggacccgatcttagtcatcgatagagccattgattaccttaaatcattgaagatggaagcgaaaaatcgagaagcatgaggttctttgtttgtaggatacctaagacatattagcattggcaagtggacttggtttctaaacaaagtagtagacatattggaccgtggtactcttgtcaagctacaaagggatcaggttgttgctagttggaagataaaccaaataatgtttcggagttgcaagagaaggaattgatattaaaatgcaaattgaatatttcatattagttgatgattaagatggattgcgaaattttaatttcagtcgtttagctgtttgttatatcatgtagttgcttcttctttttctataagattttgtcggtgtggttgttattgttcatctgtgagtcgtgtggccgagagaatcataaatgggaaagttgaataaccattttcaatgataggccaattataatggtaaacacacaattaatttaacttttttacaaatgattaaagatgtttgttttcgtgccaaacagacatgtgatttggtgggatatttggcagtcttttgtcaatatggtagcaatttttgcctattgtttcatgattaagactcttatcacttgtcatttcctgacttttgtgcatagaactagtgacatgtgatatactgtagtcccatccagtttataagttttgaatacatgtctctagccattcagaataaatcttgcagctaaatgttttagaaaccggaccagataccggttcatcccaatttcagccacatgaacgattcttggtctgcaggaccggaccggtccggtttttaaaacattacaaaaataattttatatgcgtaataaaaaaatgaaggaacaaaactgtaatgttcgtctcgggagacacaatccagaaacgaaacgccttttgtgagagagagaagagaagagaagagaagagaagagaagagaagagatcgcaccacacaaaaactacaattttgttttggaaattactctcacccacctgaattttgttgctagagagacaacacttaggttttgggcggagttctgatgtgaaatgaatcggcgtagaaaattttcaggatcctccaattcgtcagagagtgtagcgaggagtgtctgatccgttcgctgattctaatggctggacgggtcttcgaagcctggaagggaagtaatgtaagcttttctttttctttcttaaggcgtctcgatttcgctttactcttttcccttttctggaatctacatttaggttttcttaaaggcgacatttttatgacttcactgtcctagttttaagaaaaataattgcagagaagaatgttctgagtggatttgttgttttgatgagaacaatgtggacatttttgagggaaattgtacttttgtgtgaagaaattagtatcatcatattcaattagattacattggtgagctttattggattcgactgtatatgttgaatttggtggctttaaatttcgaatctttttcaactctatcactgttgatagtgtcatttattgttatcattgcgaagatctaagtttgaacatatataccgtatttgttagatttggtttggttccatgctgatgcatcaccatatttacaacattgatgagctttctattcactattggttcactctccaagcatgaacttgcatttttggtgaactctatcagtctattgtcagattttgttcaatggaacccattaccacttgtgaatgtagcttttgatgcaatgctctatgctgtatttattctgaacatgatgatcatcttctcttttgttggtcttttgcagaagtttctgtttggtgggagattgatatttgggccagatgcttggtctattccttttaccttcctgctcatcataactcccgtttgtttcttttctgtatttgttgcaacacatcttcgccgcgagctcttaccaaacaatgcgggacatgtgttcttagtggcaggagttctatttactgtctttgtaagttttctccaatgcccatttgatatttgatttcttgttcacatgtatcttgtataccttataatcttatcatgggatattataggatcttatcaactcttttataagttttgaatgttgattatatacatgcattatagtatgattcacttgtaattatacgacaataagttaaaaatcttaccaaaattttgaaatcacacctcaataacatgtatcttactgtgtttcttgttatgttctttcctctagcttagatataaagtttgaagtattattttgaatgttgtcactttttgtgtggcttttggattatgctttttttgggcaggtttattattcttccttcatttatgttttttttaaaatcatgtaaatacttaataggtactgatccttctcttcctcacttctgcgcgggatcctggaatcgttccaagaaattcgcatccgccagaggaagaactatgctatgatacaactgtatcaagtgatggaagacaaacacccactgttcaaattcctaggacgaaggaagtcatggtttatggcgtttctgttagagttaaatattgtgatacatgcatgctttatcggcctcctcgatgctcccattgttccatttgcaacaactgtgttgagcgctttgatcatcattgcccttgggtaggccaatgcattggagtggtaagctgattcaaaagcatattaaactgggaagatatgcagttcataagttcttataagcagaaaaatgtgcaggattttctataaaaggatttcatattttgaggatctggtttttctagttgttgacaaaactgtgaactttaattttccatcttgacattttgttttgtgtgtgttgtgggcagagaaactataggtacttctttatgtttgtttcttcggcaactattctctgcatctacattttttcgatgtcggcattatacatcaaggttctgatggataaccatcaaggtactgtgtggagggcaatgcgagaatcaccctgggcggttatgctgatgatatattgctttatttccctgtggtttgttggagggcttactgggtttcacttgtacctcattagcacaaaccaggttagttttgttctgctcagggtatgcgttgtgtaaattgtgtcctatctgatacccaacatttcaatttttcagacgacctatgagaatttccggtacagatcagacaatagaatcaacgtttataaccgtgggtgttcaaacaatttttttgagacattttgctcaaaagttaaaccctcaaggaatgacttcagagcgttcatcaaagaagaacctccaaggaatattacattggctaccacatgggaacgaccagaagaagcagatgaagaaaacagggaggaacggcgccagaaggtggaagacgatctagacatcgatgaagatgttatgaaactgcagcagcgtttaaatgacgaagagggcagcgatacagcgcatcacaagatcgatattgaccaaatgagaatcgggtctaatgagagagcgccaacaattcgatcagaagccaggcatggaaactggggagcaagaagcaatgcacaggaggaggacgtaattgctggttcttcagtaagagaaagtagaagctatgcagctgcagaggagggacggtgatgagtgaacgatggtagtagggtaattattttgaagctttttctttcttactaagtttttattgttttcaatttttcattattttgtgggtttggtttgatttgggagttgtgaacactatttgtgaataagtttagtgtaagcttgggtagaggtcgaattaagttataagtaatcaactttttgaatgttttgccgtgatgatgatttctaatgatgatttaggttactctggtttttgccttaaaatagacagaaccacagttttattttactgtttttctttctaaataaagaaaggcgataagattgaatatttttgtcccctgaccaaagttataggaaccatgacaatgatctatttatagagaccgttcaaactgagaacacactaaattttttacattcttaaattagacttgccattttggtatatatatgacccaaagtgatattgcctcaaccaacaaaagctaaaaccaaaatccgatttccccatacttagaggtcaagagaaataaaatatttttccggcgacgcaatggcttcttactccggttgtttcttcgtcgttactttggcagttctgtcacaatttctcttagccccagcttcagccttggtcaacagggaatacatcgattccaattgccaaagagtcaaaaacaaagccttctgcatccaaactttgaccacctatcctcctgccgctgctgccaccggcctggtactgatcatctaaacacatagttattcagtaataattctaaactaaaacacatctacatagcttttgatggtttgtttcgataagcgtctatggcaacatcatttaaaaggaattcaatggaaaaagtgtgaagaaccaaccatttgttttaagaagtttttataggtgtttaaaaagttcattaaaactttgaaattgcttatgttttaatctgtagttaccattggctgaggccgtggttggccttgcaatatcccactgcgagaagacagctggtttcgcagcagagacagccaaaaaggacgcaacattgaagactcagttcaacgagtgccacgacgcctatgttggtattttggcgtctctaaagagcgctctactggaactcaaggactcaccagacactgccaactacgacgtcatggtttctggcgatgatacaaggcgtgtgaagggtttggtcgagaaaaacactgacactgcttccaagacgcttatggagatgacactgcagatggagcagcttcttgatctcgctgctggagccaccgatgctgctgacgacgacgatgagaacttacatcgtcgtgcttgaagtttgaaactaagttgggttttgttttcggttttcggtttacttttgttataaaaaaatatgaatggattcaaatgacatatatataaatttttatatgtcactgtcactgataattgaatcttaggataatttcaaattgtaatatttgttaatttcgaagcaagtaatttctatacatgcgagcataaatacgtgagagctattaacttgagattttaggtttgggaatttaatggaaagtgcctaatttaaccaaaaaaaaacgtttgctaaatacagtaatttaagtttaaaaaatatttggaagacaaaaatattcaattttatatccagttgaaattaagagattttaaagacatatatcatacgcaaatcatctccagttcgaaagaacatactttgaaataaaatttgagtcattaatcttataagatattaaatattgtccaccaaaagtagaaaatactattatccttaataatttgtatacctacattaatttgtctacgaaaaaattagttaccattttccttctagaaacaaaaattatccgtccagaaattccataaatcttaactggacatctcgccaaaaggacctctaattaacattacttatcataaaactaagtaaagcttcagtttcatgttggaaaagtaggaatggtggtggtacaacgaataaatctggaattatttgattcatacatttataaagttaataaaaattttgggttattcaattaatacaaaagaatctatgattattattgaattatatatttattttattggtttaagactttttatacgtttcttcacaaaatcaagtcataaaagtatcatcaaatatacagattgtttgaatttttttacaaggttacaaaataactaatcaacaagattaaaaagaactctataaaaacagttttgaatcttttatttatttatatttttatgactttcttatagttatcaaaaattcttgtaaactaaaaaccaataacgcccctaagatttatgattattgaaagaaaataaacaaaaatagaaaaagaaataaaatctggccggagaagagaggatatgatgaagtcatgaaaactatatgggggtaagaaagaaaaaaatctcatttgagtcattaatgagttttggccaaagttttgtcaaaacttacacaattttttctttctataaaagtagaaaacaactttttcatattttaatagaagaataaatccaccatatcttccatgtcatgtgttgtgtttgtccatgtttcttggaagaaaaagttataataatcattcatttccaccttacatatgtttatttattttatttttatataagccttaaatacgccattgatctaatattagtgccattgctctaaaattaggtctgttatggttcattcaccaaattctccaaaaaaaagctaacaataagaagattgaccacatattttgatccatctttactttttagtttctatacagagaatgaaaatctgaaattctaaagagagagtaaatggaaagtaaaacttaaagattcgctaattttgaaacaaatgggcatgggggtagtatctaacatacttgcaagtattatataaacctaaccacaattgatgaacaatacaataccaaaatctgaattctaacgatggcttctccctccaactattttttcctagtttctcttgcagttctgttaccatttctcataatctttgcttcggccacaacttacattgacgccatatgtcaaagtgttaccgacaaagccttctgcgccaaaactttgaacgcataccctgccgcgggctctgccaccagccaggtactaatatatatcttccaaaaccaatagatataacacttgtggttgggaaaaataaaaaatatatcatttgttactttccaaaggttatagaaaacaaaaaaaaggttatagtttcgtgatcagttacattttttcttaaacgaaatctttttatttttttgaaagaatgtaaaaattaaaaaaaaattgttttaaggtttttttttcttatttcttagattatttgttttttcctccttaaattataatcaacagtttggagttatggttttaagttgaatcaaacatatggtgttatcataaaggtgttttgaaaaacctaaagatcaggattgaaaatgcatttaggattccaaaatcacaattttgtaatatcaagtactcatgtctctttctcaatcatagagtcatagacagatgattcctttttcttctttctttcaatttgtagtttcaagcagctacggccacgctcaacctagccatttcttatgccgataagtctgcgggtttcaccggaaatgcggcaaaggagaatccaaccttgaagacgcaatttgcagcgagtcaagatgcctttgtgaccattagcaagtctctcaagagtgctgcttcggaactcaagatatcgccagacactgccaactatgatgtcatggtttgtagtgacagcatagcgacggtgaagaatttggtagagaaaaatacagacaattcgtcaaagactgttatgacgatgacattgatgatggagaaacttcttacaatcgccgttggagccactgtcgctgttggcggataaagacaacgataattaagaacatgtacataccatctttcgttttaccctggttaaaggttgtggttatttattttacggtttttacccaataaaaagattgtggttattttacttctttatgatgcaatgttttgttttcaagatccatacattttttctttcgatggaacatctgtatgtgatgaaaacttgcttagtgaattttaagatgatttggaaaaatctaaggaccattatatgttattgggatcattgattttaattattctcgaaattatgtgattcgtttaatggtttttaattactagttgaaatctgattttcaattaagaaaatgttattcatgtagtgatttatcattaaggttttgatttacatgtatttcaaaagaatgtgaacttaaaaatacaaaaacttattaaatccgaggataaatcatcttacttcgaaattcatatatttaatcttaaaatcattgatgatttccaaattgtacgtgtacatatccaagaggagcttactggtagaaagatttagaatgatttttttttttgttttgggattccagatttacattactttatgaattctaagattttttagtaaaatctactgttactgatttcataacttttaaatttcattgattttttttattattagtaaccaatcatggagttattttttaattaatgtggacaaaaaaatcttttcttactcaaaaagtttggttatcattaattatagttctattaagatatacagtagtttgattattgacataagaattcttacaattttataaattaaacttaactttagaattcaaggcagttagtcactgtataaaactaacccttcatggggacttattcacacgttttttctaaaaattcatgcatcagtcttcctcttgatgcgctctttagagttaaagctttctctgggcctcgagaacctcgtctcactcatttttgaccatcttttttgtcattatacttatggaaaagaaaaacaccgtattcttactattttttcactatcatgatcactaaaatgtgggacactactgaagagcgaagaccatatataattcttttgctaggtgttaccagtgaatatttcctaaggttttttcaattctttttggttttaaaccatattggagcgtcggagagattccaaactaccatattttgcttatttttatagaaattacacataaattagtttgtgtacacacgacttaatcttactgaaacataaattacacaaataacattgtaaatagaatgacaatcaatgtgtactttatttgatataaatatgacttcacgtttttttataacattttatgattttggtaaaacaaacaaagtccaacaataataatattataaatgtttggaaagaattaattatatattagaatattggttaccaattatagcctaataataagaactggtcacagattatccatatgtacttttttaacttcatgaaaatatagaattataaaaaaaaaagagtaaatggaatcgttgccaattttgaagcatgtgactatgtgagtaagaggtagtatttaatatgcatccaaagtattaataatctatatagagagtaaaaatgataatgtgatgagagtttaggaattggaagaagttatatttactatcataatagtaagctttgggttacatacttacatatgtttatatagtaaaatggtttcctaaactaagatagaactaaatctttacatatcaatataataaatatactatatcttcatattaacttctggatcttctatatccttctacagaaaatttgaaatcataaagagatagtattatatataccaatgaccacaattgatgaacaatgtacaataccaaaatctgaattctaacgaggcatggcttcttcatcctacggctttggtgtcgtgtatctggcggttctgttaccatgtctcttagtccctgcttcggccacaaagtatatcgacgccatatgccatcttgtttccgacaaagccttctgcaccaaaaccttgaatgcttaccctcccgcgacttctgccaccagcacggtactaatatatatacaccaaaagtaatagatagaaatacatcacttgttactttccaaatgttttggttgctcgatcaattatttattttttttcttaaaaagtttgttctacgttttttccttaaattatcaatttaacttttgaagttatggtttaaattttaaatatatatacatggttttcttataaagtgtaatgaaaatcctacaggtttagaattgaaatgtggttataaaataaaatcataatttcgtaattgcaagtatatatgttcatgtctcaaactaaatcattgatacataatttattattattttaatctatagttcgaagcggctgtggccacgcttcacctaggagtgtcttatgccaataacgctgcgggtttcgccggagaagcggcaaaggaaaatccgcagttgaaggagaagtttgatgcatgtcaacttgaacttgcgctcattagcaggggtctcaagaacgcttcggaggaactctatgatgacactgcgtactttgacgtcacggattgtctcgacaacatagcgacgatgaagaatttggtcgggaaaaatacagacaaggcttcgaaaactatcataacgatgacattgatgttggagaattttatctttctcgccattggagccacctcaactattgatattaaaacataagactttctgaaggatataccatatgacattctaggatctgttaataaaccttctgataattataaaataattaaaaattcatgaatctctagtattcatctatatattttttccaaaattcataaacattcttttcttataaacattttttttccaaaattcataaacattcataaaattcaatgaaaaagaaaagaatgatattgatctttctctttttaaaaaaataataacaaaatccaaaaaaagaagaaggaaaaagtaaataaacagataatgtaatcttattctttgtaatcaaagtaacttacttttagaggtcaagaaataaaagtaacaaaaaattatctataaacatataaaatttttttatccattaactaacttaattatcgaagtctttggaaatacaaaccctttaacaaaaaaaaaagtctttggaaatactaatttaacaaggtgatataatttttttaactgtgttcaatattggataataaatatcagttattatttttccaacatatttttatagttgatggataaacaaaagcctagtctctagaaggaactaactggttaattagttcgttcgtgcaatcacataccaaaaggcttttccttttatacggattgatatggcttttaatgattcaccgatagatttttgggagccaggtgtggcaaaagatctggcccagacctgactaatgactatctttccttccttctccagctttgaagtagtaaaggcaaatgtaaggatcacccattagtgtggcaggccgttatttatccaccacgagaacagttataagcattggctaaattcatgtttcgcaaatcattgaaaagaacgaaaaatggatatcggaagaaaagggataacaaaatagatttacaatttttttttctcatttcattctatttacatttttatttgattttttttaaaaggtttttactaattatcctaagggtaaatcatattacttcttatatcataaataatatttatttgatatttccttgaagttttaaatattttggctttgaaataatatatagtactggaaattagaaaataaatagaaagtggcaagtagaaagcagataaaagagggaatgatatacattacgatccaataacatattgttaatgctaaacttttggaaggtatgtttttctatttaaaatttttaatgtattttgattatactatttagcagctgctagattttgcgaaattaattattgtcatctaaagatttttgtctataattattttttctccaacctaagaaactttatgaagtatatataaattcacttttatagcatttaaagaatactgatatatttctatcataatcaaattttagtaacttgatcaagaataatatgaaaatatattttgttgaacgagatacctttggctctcatcttaaagttcgataggatagaaaagtataaacggaaatctaaaagattgagacccacctaatctaattctactattttttctaaagcgtagtgcccctcctatatggcgccttcaagatacataaataatatatgactacaaataacaacggtaacgagtccattcaaaaaaatcaaaaagattctcctgtgaggaaatggcttctttttcgtttccatggcagttctatccgaaattctctttatctcttcttcgggcttaacctccacaaaatatattgatgcgctatgccaacatgtggaaaacggtaccttctgcatgcacatgttgagagcctatcctcccgcggttactgccaccgatttggtactaatctttaagacacatctattaaatttctcatgtttctgttttaaccttaagaaaaaaaggtactgtattacgttttctcttctttctttgatatcacaccaaaagtttacatgcaaaagtttcagttgagttcttaaacttatgatttgatttatcattacacaattattctttcgctcttttggaattaaaaaaatattgtttagattgttaattcacctttgcaaagttgatcatttttctgcaagcacttggacacttgtaggcaaaagttttgcaagatgtaacataaactttttattttgcaattgtagttatctttataatttattttcagttcattaacatcaaatttgtatgattttgtttagtaaaccatcaataactgtattttctaatctatagttttccctggctaacatcgtgatcaacctcggcatatcctacgccaacaacacgggggcttttgccgccgaagcggctaagaaagagccaacgttgaaggtgcagttcaagtcattccagcatgaatatgacggtattcagttgtatctaagaatggcaaggggggagctcaaggaatctccaatgagtgcaaactatgacatttttcgttgtacggatatcactatgtacctgaaggatgtggtcggaggaaacagagacaacacctctaaaacgttcatggatatgacattgcaaatggagaacattatcgatgttgcccttggagccaccgtagctcttggcgggtgaatatgaatcgtggcgttgtcaaaagctggcttaggtttttaatttgtagtttgcatttcctcaaagattgtaatgatttaatcctctgcaataaaaatcaatatattttcaaggtactctaagttttgttgtaaaagaagtacaagacaaaggttgatatgtattaggtggtttttttcattaagcgaaattaatgattttaagagttagctcaatcacaagcgaaaatctatgagccttcaagaattaattaccaaagtgcaggtttagtcaacaaaccgaaaagcaaatatggctcaaattcatgagaactatgtgaatttggttgagcagaaggacaacggtgaaaacaaagttgctcattaagcttcaagaagcagaatgtcaaaaacagttgcttatgtatgttaagtcttttgatatttgacatatacgactaaggcatatgcattatatatctatttgtataataatcaatttgaacccgaattcgaaatgtaaaacaatcccaacttattactttcatttgtcaacctttggtttcggtggcttgactccaccgttaagcccttcaccgtgccatggtgcgtcgggttaatcctatcactcacttgttctcctccctttggtataatccttttccgtggtgccgccggtaattgagcattttgcttcttggagctaacgcccttgagcatatatcacagtagtcttataaacttttcgttaataaaaatctaaagagttaccaaaaagtaaaaaaaaacttgaccaaaataaaataaaaaactagtcaacaaattgtatagactgtactaagatgaaaaataaggaaagaataatctcaacaaaccagtcagatttcctagatttcagcacataatgaaaatgaaagaatataattaataccagtcagatttgtttttgttttttactaaagatggtgataaatttcatgacttccaagaaaagttcccttgcacataaatatgactggtataaacaataaccacaaacatcaaaaagcaaatccaaaagttgaatcctaatttaacttataggttgagagaaacaaaacgttctcccacgaagaaatgacttcttcttctcattgtttcttgatcgtttcagtggcacttctattgcaagttctcttatcccctgtttcggccttaaccttaacctccacaaaatacattaataaattatgccagatgtcatttgtcgacaataaacccttctgtttgcaaacattgagtgcctatcctcctgcggcttctgccactggcttggtaatatctgaacccatatctccaatcaaactagtttttgatatttgcatatattttaattttatacttttatccaacgtttacgtgtcaattgaattttcgaaaatatgtttcattatcatctacgttttcttattttattttttttgtttaatcatggattatcagtctaataaaatttgaaaaaaaaaaaaaaaattgaatgtatggtttgaaagaaattagaaccacttttcaaaacataaaaaaaatcatatatatgtttttatttatgactcattcttaaaacaatttctttttataaataatatgacaaatatagctcccacttgcgtcagccgtgatccgcggcattgtcctaccccaagccaagaagtctgcgagttttgcaaatggagcagcgaaaaaggagccgagcttgaagacacagttccagacgtgccaagaggcctttgtaagtattggagattctctcatgagcgcttttgaagaactcaagcgcgatccacatatcgcaacctatgatgttatgacttgtaccgaccatacaacccaagtgaagaatttggtcggaaaaaacacagatgtggcttcgaagactctcatagagatgacaatgcaaatggagaagctcattcctcttgctcttgcatccacacaagttcttggcgggtgaaaacgaaagtgataacatatatcatcgtgcttatcttaatatatgatttaaagagtaccatttataaaacaatcttaattttaagagttacatactaggccatgattgtttgtactttcgaaaatggttcggcttaaaaacttttggggccttaggcttttggatgttttaatgaggctcaaatattttcgaccgtgagtttatttgggcccaaatgaactatctaggaaagatctcctgtggttaaaattaatttagatgtatatattcggacatagcttttggtttgtgtgacaactttatttccatatataaactagtcaagcctctaaagagagaccacattccgaaaagtacttgtttattggtgttattcatcgctgctcaaggtggcaaaccaaggagaacaagaagagtccagggccaatgagcctgagggtatcaaatcagtgattgatgacatctacatttttgaagacgaccctgtggttgataggttcaataggtttggcacggagatgtctgccatggtctcggccttgacacaggtggtttctgctcgctctcagactgaggctgaaggtgctcactctcagactgaggctgaaggtgctcactcttcttcctcttcggctggacataaaagaggatggcttggaatcgattctgctcctattccctcatcatttgctcgtgtagactcttcacataatccgatcggtgagtctagatgttacatttcgtgaaccgtctctatagcttttatttttgatatgtgttcttgttctcgaatttatttgcttaaacatggactctaacatctcaaagacaagaaataaaatttggttaattgtttctgtctgattaaaacaaaaaaattacacgtcaaatcataaaaagaatcgctattttgtacagaagaatccatgagcaaggcatttccagaggaagcaagggagaaaaaaaggaggtacagaggagtaaggcagagaccatggggcaaatgggcagctgagatacgtgatccacatagagccgctagggtttggctcgggacgtttgatacagcggaggccgcggctagagcctacgacgaggctgcactccggttccgtggaaataaagcaaagctaaatttcccagaggatgtaaggattcttcctcctccccctcctcttcttcgttcaccagctgacacggtggcgaataaagcagaagaggatctgataaattattggagttatacaaagttgttgcaaagttcaggccaacggtcatttctcgagcgaggacaagaagagagtagtaacatatttgaacattcaccaatggaacaacctctgcctccttcaagttctggtccaagttcctctaattttcctgcaccttctctacctaatacatagtttcacttttattaaagctctacaaatacaattaaatacatagctaaatgaaaatgattttcttgtctgtataccttcttaagtgctaaacaatatattgtactctttgttttccttaactaatctctctccctttttttgttgtagaatcttttttatcatccaaaattcacttcccacacgttttagtttcgtatctcagttacgtctaacgaattatattggttaaatgaaacaatactccaaatattacctctaaaagtttagtatcgaaacacttctccattgtgctccgaatcgtatatgttcgatttttttgtaaaaaaataaccttgaaaacaagcagagttaggccagtgacaaaaattaggcaagatgcagcaaaagagtcggcaatgggttagctcgatgtcacgtacatggtacattttgagctatcttgacaaaatctttccatgattcttgtcttggaccatcattcatttttccgaccttttgaaattatattcatgattcatacatgtcaaagagaaaacgttaggtctacgagacgacgtaactcaacttatgcactctttaattttaaatcaatacttttactagccgaagaaacataaaatagaaatcatggaggcaagaaaaaataagatttatctttttatgtcaattaaaattttacaaaaatccattaaaacagtacatttccacgtcgaatacaaagtcaatcataataaatatttatgatggtgtaagctattaattgggtcattggctcattggtttccttctatttgtggttcctttcactgactttacttttcttattcgagtgatatttttgctccatcttctttaaacgaattcttaagattttgtttgacgttatctgaaataacgatgtcgttgaggtaaataaagaaaacaattctgtcttgaatccttgggatctgatggcggaacttagcttgtttgacagtcatggagattgtttgagtctgtaaattgtcttctttttaaccgaacaagattagtaagatctttgccattttgatgtaatctatgagcacatgaccatgagctttttgtatatgcaaacctttgtatcaagttccccatgaaaaatgcatccttcaaatcagtttagttgagtggccacttcttgttcatcgtaacttagaagaatttattcattatgattgtaatatctttcccatgtactataaccaccgattgatcgtatggatcactctttgatttcatgagagaggttgggtgttcagtggtgatatatatgcttcgagaaggataataacgttgggctaattaatgtttagattttaagattaaaggtttatgaatctcaacgagtcttaatacgataataagggtttaggatgttggcaggaccggctcaatgaattcagaacaaatcttaaaaattggggtttttatactaaaaacaaaaaatttagactctcttttatgttaagaaaatctttaaaattagtcctttcatactaaaaaaaatttggaccctttttatattgaaaaaatctttgaaattgtttttttctttacactaaaaaggtaaatttggtcccttaaatttatcccaaaaaatttagatcctgcacattgttccacttgcacatgtcaagagccgcccctagatgttggggttggagcttagatttcacgacacagaggttagattgtttgatatgaaaagataagtcttcatgtgaagaagaagaacagtataaggtaaacacaaaagtttttgaagaatgttaaagttttcaaaagcttactaatgtaaaaattagcttgaaaaaagaagtttgtttttattttgggttaaagtaacatagctagtaacgtgatacaatatgttgtggctgacacatatcaacattgactgacttaacttagactaaagacgtacatttttgtaacttaaacttgtaagtttttatgttactatatcgtgtacgtacaacgggaagagacgtacatttttgtaatcttgcaaggagtttgattcatatagcaaaacacgtgaaggaaaagaagagtgataaacgaagccatcttgaaacactttccctttcgggggaaaagatcaaaaacgaaaagaaagtagaacaacacactcgttcatagaaaatggaaaagtaaggtacataagacaaagcatcgagcatgtgtcgcggactgtggagaacggttgggtcccatattctgcttgacgtgccgttattctcttttctttgttagcataacaatgatcaaacttataagatgacattgcatataaagttgtaaaaatacgcaaaaaattgtttgaatatatattgtttgagaatgaacgatatatatatgtgatgaatacgttataaaatatgaatgaaaatctttagtaaaagtacgagtataatatttgcttatatcccgtaaatctgacattttttagtaatgtttctttattatcgaaactatatgtttcactaacataaatgtttcagtaatatttgttgtcaagaaaataaaaataaaaataatcgagttacatcagacccaatttcatgatttcctcgcattagttatctaaaatatataaaacgtaagtttcctttttctttttgagaatacaggataaaaaaactataaatcaaataatgaacatactgcacttttatttttgcaatttcgttagcacctagtaattaactaactaatatatagacactttgttttggttataattaacaacattacgagtacaatcaatttgattgctacagaaaaagagatatatagggggtcatacacgtaaatttgcataaatcattgaaaagaatattgggagtgattgtcgtaaaccggaatactcatttggcctgcggtgacagtaattattttgactccaccgtcaaagacaaagaccgcactcattctctctcgttggtcgagtcaaacacatttaaaactgttccttcgtttcacgctcttctcgtgttctgcttcggttacaacttctcttctatccaatacttccaaatctccacttcacaataagaacccattattgatttctctacaagttatacattacaagaaaaaagatgggaaactgtcaagcagtggatacagcgagagtggtgatacaacacccaaatgggaaagaagaaaagttaagttgtccagtttctgcaagttatgtgatgaagatgaatcctggccactgtgtttctctcctcatctctaccaccgctctctcgtcagcatcttccggtcatggagggcctcttaggctcacgaggatcaagctccttcgtcccacggatacgcttgttctcggccacgtctatagactcattaccaccaaaggtatatatattagagtaacatgcctaaatctactccaacatttcaactaacaataattctactccaactctatattcttgcatctcgattacatatctcgtaattgaatttgaactatatatttattagtccgtttgataaatatgttacatatatctcgtaagttgcaaccctaggaaatgaatgagctatttccgcatagttagcatttgattttctcaaactatttgtaggcgctttagaaaacttacttaaccgtacttatacttatgttaaaataaacactctcttaaaagttatatttatatacgtttttggggtctaatctacaaattttgatactatttggggtgaaattcagaggttatgaagggtttaatggccaaaaaatgttcgaagttgaagaaagaaagtaaaggctcggatgataagctagagatggtgaaagcaataaactctactaagcttgacaatgaagatcaggtaatatgtgattacaaagattaccatgtttaattatagtgataattggttttaacttggatgaaaaacgtctatagctgcaaatgaagaaacaggagaaagaaaggtcaagaatctcaagatcatggcagccatcattacaaagcatatcggaaggaggatcaagctgagcaaattctaaaactttggggaatattaaagagaagcttcagaatttaaggatatagtttggaaaatatgaaggcatgtgagtggctaatgacaaaagctggtcctttggagtatgtgatattaaagtgaaaaaattcgaaagcaatcattcagttttttttgactgaagaagactcattacttcttctagtagaataatacaaaaattatcaaaagttagcgttacaaacgtaaccgaaagcatcgagcgtgcttgaagctgatcatgtattagataattgatccaatgtactccaaaggagtattattaaaacatctaaaaattaaaagagaaacgaaaaaagtatgtacaattaacgaggatttgaacggcggaaaatttttgtcgctaatccctcgcttatatacaacagattttgaagatagacatatcatatcattgcagtcttatgtccgttgcaaaattgtgatgactaaaaattggtaaccaatgttatagtctcttttatttcttactgactccatcaaaatcttgcttgtaaactttggacactatttcgaaaagcaaaaacgtattaattttggaattattaaaacattaatagaatatttaatatgtataaatcaatagaatacattaaactaataaataaataatacaaaatatgaattttaaccatacaaaaaatctcaactataattttaaaacccctctaatagctaaaactgtaaaacatatactgagttggtctctgatattgctcataaccgaccgacctaacctaaccacacacgggatacgctcgatgttcccattctccacggtactccaacactggcatacaatacaaaacattgaaggagacagtaatgccacgtgcacggctctgcaccataaaatttaacgcctctgatttaaaacaccacacattgacaaattgacataaccaaagctacatagagaaaaaacaccaaaaatcaaaattccatcaaaggggcttttaaaattttggacaagaacaaaaaaaaaagaaaaatggcaacgagaggagctgttgctgctgctgcatccacaatatggaagcaccgaagaaacccttctcttcgatcattatctcgccatttcaatcccaatttcaatcatagaatcatcccaacaggtacaatttcattacaattctgttctaagatagatacatgaaacataagagttgtgtcaaaagttcatatcaatttagggtttaaagtcaattgtggtgtatatgatttttccttgtagggtttaaatatcaagttagggcgatacaaggaacaagtactgatcctgtcattacaccattaaagaacagagaggaaccaaagccacaaaactggaaaatcaaaatgctttatgatggagattgtcctctctgtatgcgtgaggtctaagttagacctctgtttcttgtttatgtttgttcataaagtgtttttgatactgaatttttgtctttttattggtgaatgaaggttaatatgcttatggaaaggaatgaaaaacatggaactataaagtttgtcgacataagttcaaatgattattccccggaagataatcaagggcttgattacaaaacagtaaatttactgtcttttaatttggttcaattttgtttcatcttctgtttgatgttcgaactttcggatttgatcgagatctttattaggtgatggggcagattcatgccattcagtctgatggtaacgttgttaagggtgtggaggtaagcttattagcatcattgttttacactaaccatttcatatttatcattttggtgtaacgttttcaggcatttaggagattgtatgaagaagttgggcttggatgggtttacactatcaccaaatttgaaccagtaagcttttctctctttatctcctagtgatctcttccattgtgttaagttccgtattcatggataacacgcgattacttgcagatagggaagttagcagatgttgtgtatgatgtatgggctaaataccgacttcaagtcacaggtatataaaatgacctgaaaaatgttgtacaagcttacttgattatttgtgcgtctcaaaaactagatctctttgttgattagggaggccatctatagaagctattcttgaagcaagaaagaaagataaggtagggaacaaaggttatcgattttctgtcgtagtaacctttgctcggtaaaaccaatcaatgatatgattgtgtttgcaggtagagacatgtggtgaaagcaagaactgcaagatatgaattttctttatactctttgaattgttacaaaataccaaaaccagtttggagttacaaattttctttatgtgagtgtgagaatttgtatatatatgatacacagccccattacattagccaaatcatcctgatgatacattatacacatgaataatttcagcaaattttgaaactgttaagagttttatatttggtaatgattttgtaaaggttagcttactaatgttattgaaatatttgtttgaataatgaaaatgaaattcaacattgtagatttgttcccagtcaccaaagaagaaaaaaggttgtatgtgaaaaaaaaactttaagaatcaatagaatatgagatcaatttgttcatttgttgaaaacaccaaaaaaatgcactgcgtctcacatattctctctctggggcatttaatcaaacaccttccatgcaccaaatcgcacacatttcttcggaggagatttcactacaaagccctctctaatgccaccgtaagcacaacagcttcatgtttcaaaactctcagttctagccaacaggaccaaatccatctctacgttgatacacttctccaatggaaccaggtctctctctatctctcgacccttttgctagataaacatgttggaactttggaattattcgtgggcattatttgtttgaaaagattcgtgaatttctaatcaaattgaaagctttagaatccaattttgggtttaatggttggtttaagcttgttgcccaccaagtatttgttataagtccttactgggtcaaagcatgataagtcgaatgcttttacctgcacaatgaaaaaaattcaatcttgttgtcccttttttggcgcacttcactttaacatctgagtgtttggtttgttatatattcctacctcaaactcaaactgatgttactcaattgaaatcactggtgaatgtctatgttaccagtgggtttaaagtatgtttttgcttgggaattctatgtgagtttgagtaggccttgtgatttatgtgcagaaaatgaaccttacagcaactaaagaagctgatgaagtaatggagaggcatatcgaagattctcttgcgatattgcctcctataaagacttgttacaacttacattccagtgatttgtttgatcacatcaatttaatcgatgttggaagcggggctggtcttcctgggttggttctagccattgcatgcccaggtgctctttaattacatatatgattatgcaaattttgtcagatttgcttgttatggtattccagattattaaaaatgccaagttcttttgttcagattggagagttactctactggagtctataaataagcgatgtgttttcttggagcacgttgtgaatgttaccgggcttacaaatgttacaatcgttaggggcagagcagaggtacagttttagcccctttttttctttaatttttgtgatgagtttgtgctataagcataagtaggttcactttttagttgacttgtctactatctatgggtaactagatgcagtttcttacattctgaaataactgatttttttttgtttttttttttgtttcaaagctaagaacttaacttaatactccaaatgcatgaaatagttagagagtttcctgagattagaatcggtttccattaaatctatggattagactgtataattagagtatattagatgatggtatttatataaagcttctgttggaaactatgattcgtgatttggaaaaacttttcctaattctggaattgctataaatatctctccccttagctgtgatcctgtttgtgtaatgttgtaatgacattaatagccagtaaggtgattctaaattacattgtcctacttttgttatagaacagagttgtgggcacgatgttatgtacagagagaagtttgatgtggctattgcaagagctgtcgcggagatgagagtcttaggtattatttacaagtttcaagtagggtagtgcaagaaacaaagttgcttattagttagtgttcaaagtggatctgagttgtttgttatgaattttcagctgaatattgtcttcctctggttcggattggtggattgtttgtagctgctaagggtcatgacccaaaggtacgagttctcatttgacactttgtttttgattaatatatgatgttagtgaatattaatttttccattgggagatttgcttcttgctacttcatgtaatgactgtatacaaatttttgaattctggcttccgttctttaaaaccttaatgtttcatgaatttgtcaaaaacaggaggaagttcaaaatgcagaaaatgctgttcgcttgttgggtggttcaatactacaaattagtccaggtgtgttttctttgggcctgtatatatgttcagaagtttatcagaagacacttacacgtctcgcattataccatagcaaggactaaaaatgtttttgaactttattgaaagcgaacgttataacaatactactgaagatgatacatctcttgctaagttgggaaatgtttggttttcatatgccaaaatatcacaaaattttattcataatgttggagctaaatagaaaagatgtaattgtgggctgagttagtggaaataaggtagaaaagtgtggtaaaattttggtaccaccaggaaacctgctaggtaactatggataaacggatttattactcgtttatggctttcaataatcaaaatctgcaaatatacattaattttgttgtgtcacaatatgatgcagtggattcacatagcccatacggacagcggacaacggttgtttgtcgtaaagatcattccaccccacaaaaatatccacgtgaagcaggtactcctgctaaattaccgttgtaaataatgtccaaacccttccatgtaacattgatctgtaagagattgaaaagaatattatatcacttctcttggagttcactttgaatattttttataattagtattgattcttttcatattacgatgatgccatctgttgaaacataagtttattttggacatattaaggagaattttgttcaacttcaaagaacaagttatatgtgaccttagatctagtacgggaaagtagcttgtcacaagtcctcattgaattttttcctcgatactttgattctctggtcagaagatcccatgtatgcttaccaattggatacttcaaccgcattgattacatcatcgtgggtgtttgtgatggactataggcatttaaaatgggtagttcgctatattttgaacaattttgaacatccagttctgtgagacagaatagaggagtgttccatcacttgataaggcttaacctgaaaccgcgtctacatggtgaacaatgaagcctttgacttggtttttaaggcattaaacactttgctaaacggtcactaatctttggcatcatagccaaatgcatgtactttataccacccgctttttcttcaacgacgacgtcattgatcttccacacacatatcttttgatcttggtgcgctgggaagagcttctcagcctagattacccaagatttcactgcttctgttcctcctcctccttctccttttattatgtcgccactgcttgatacttctgatagtgtttcaaacgtgcttgcattccacaatctgaaaactctgtcgttggagcctgtgtaaagtctccattctgcaagggttagagatgaaatgtaggaggataaatgaccaacaagagtggcgatttttgaaaggcaaaaaaaaaaaaaacaagagtgccaatacattggtcatttggatgaatcgatagatggaagagattactaaaatcgtaaagaaaaataagaaaataacaatatatttaaaacacaagagagattgataggcgatttgaaaatctaaatatatacttgtttacaaatcctagttcatataatggaatcaaaatattttttttttcttttttttttataatgtgatcatatttacatcacatgcaactaaaaagtcttttacgaattttggcgcgtttttaacgaacaagccatcgacctaattatatcatcatttattacagttttgtcgatttgacatttggttctaattcacaaattttcaaatttggaaatttaaccaatctttggcatttctatgttatgactcctttgtgtttgttagaataaattttagaggtataatgagatcttaggatcttacaaacgatctttttgaaattcatttgtttttccagcttcttaattatcaacggatttttgcgcataaactatatttgattttactatgcaactattttaaagcaaaatactctataacgatttgaatgtgccacaactttcatgtgcaacccgtcaattcgttattacaatatttttagatttagcatgcataatttgtttaggtagtagttagttatttttatatgcatgtgaacatctctctttttttgtgcaccaacttttcttattcaaactagaaagatacatcagaattgagcatattaggacaaacccgaatagcaggcttaaaacataaagcccaagagctaacagaaataaaacatagagacacaagcttgaacaaggttgatagggtaccaagaagaacgtcgaaacaaactaacatgaacattgtcttgcttgaaaacgcattcaacacacaatcatcaattggtaagaagatagtcaccaaacaatgtgacgttaagacgagtattaaccagcagaggtggttctaggttggaagcaaacatgagctgtctcaaccgcatgcaatgataaaccggagaagtacccggtgatcaaacttcgccgcaactgggcggaatccgaaccaagaaaagtagttctagatcggaagtaaacagaccctgccacagatgcagaatttgttacactagggttcgttaagagtagagataatttggttaccttttagagattagaaaaaagagtttttgttcaaagtattttttttcttgaaacaaagagagaagtaaaaacagtaattaaaaaatattcttttatggaaataattttatattagacaacaagtgttttgactgaaggaaaaacataacagagaatataaaatttgtgaataaaatttcttttaccaaaaaaaataaaataaataaaatttgtgaatacaacatgttcatgaaatatataccataaaaatttgtgaatatataccataaaaattaatgaaatatataccataaatgaaatatatttcatgtacagaaattattgaaagatataccataaaaatttatatgcatgtattaattctcaatacaacatgttcatcgttagcctataaattttatctcttgaagttcttacttcaatgttaaagaagaagaagaagataaaattgttctttctccgataatcacccacaagtctgaagctgttctacctcactctaaacgcagaggtatgattacagaaatctgctttgatatatagctcgtgttatttagtttgattagtttgattggaggattcttgtctggattttggtgggatatatatcagatattagggaactttttctttggtctctattctatgcttggggcataagaaatgacatcatactatgcattttatgaatgaataataagcttgtgattagaactatttgtgtttgtagatgtttgttagattccatttaataagcatcgtgatcctaaaatttagcaaaagatctttttgaaaccaaatctttttttcaacggaattcaccggcaaactctaatttcaatttattatgcaatgaacttgatttcgctcgcaaattctgattggatcataaaatttgtaacaaaacttcacgggcaaaccatctattattactgcagttttacatgagttaattgttttaagagtatttatttctcttaacaagtttgatgcattccttatctaagatttcaagatctaagggaaacaatacttgaggaacactatcttaggatcttaaaatctcaattctcaaccttgatattaaacgaactttggcctgaaaactaactattcaaatatttctttccatcacttatgttttcatagatttggaatgttatttatctaagctgtgtttaccggataaagttggtataaatgcttcaaagatatatttgaatgatgaaaggtattcttggtgcaaaaggtttccctatttccactttctgatcaatctttttcttttgcaggatcaaaaccaagagtcactaaaagaaattgtgtgctattttagcgaagagatgacgcaaatggacgcatcaaggaaagagagcatccaagaagaagcacgaagagcgaaagcagttgctgtggagaagtataatgcgggtgatcttgttggagccaaagaatttgctgtcaaggcacacagtcttgatacagaacttggtggtcttcgctgtctcaatacaattcttgatgtgcatatggcttatgagaagaaaatcaatggtgaaggtaattggtatactgttttatcggcagacccaactgaggatcttggaaccatctcggtacgttataaaaaattagttaggaacatgatctatgaccgtgacgactctgttggtggggttgatgaaacacaaaagatattggttgatgcatggcgctacttgagcaaagaaaagttggagcaggccaaggcacgcaaagtaattccaccttcacgaagatgtgttaggtttaattatgttgaaactccattgaatgcttcaggtcctgtaaaccaatcaagtagcattagcgcaggagaaagcaaaagaaagggacctccatcaacagatcagtttcatgttcacgagttaacaagaatcgacaacgacgcagggatcagacatgatagtcttgagcttatgccaaatatgcttggaagtgatttggttgataaggctccaagtatgatcaaactgaggattaaaaggtctggttcttcttctctagactcaaagaagtacgatgcagcgaaaagagtaaagattaatgaaaccaagaacactactcatatggtgaatgaggatgagtataatgtggtggtaatgagtgtgccggatgctgattactacaacttcgacaaggatcggactctagcttcgtttggagaaaaccaggtatgggctgcttacgatgattacggaatgcctcggtggtatgcattggtccataagattgtctctcaagaaccgttcgagttgtgtatttcttggcttgatggcaagaataagggatatacgggttcaatgaagaagtggattgattcagggtattacaagacgagtgggtgcttcacaatcgggaaacgtaacagcaacaattctctcaactcattctcacatagagtccaatgaacaataggtgagaaaggattggtgtacatatatccccgaaaaggaaacgtttgggctctttatgcaaattggtcaccatcttgggatatttcaacttcagtagaagaaatgaacaagtatgatatggtagaagtgcttcaagatttcgatgaagaaagaggtgtgacagttgtaccgctagttaaagtcccaggattcaaaactgtgtttcgtcgccgttcgaatccgaggacatacccaaggaaagaactgttcaggttctcgcatcaagttgcttatcaattacttacaagtaaaaaatgtaagaatgctcctacagattgcttggagcttgatccagcatctttgacacatgagcttctcaaagttctcactgaggaggatgagagaattggaataaacaaagaggaggaagctgatttggttagtggaaactattaacaatgttacaatgtattatgcagcaatatgtaacacttttcttggaggttactttcagtccgtgtaatttataactaaggtattttgaagagtccatagaagcatggcctaggaataaataagtaaatcctttttttataatttgtttattcaatatcctcgttcttctcatattattacgatgatgttatctgttgaaacttaagttgattttggacagattaataagagagaattaaaaaaacaaaaattgccatacaacttaattacaatttcatgacctatgtaacatatctacacataaagctcaaagtatgcactaaagcttaggatcaacatgctactaactttgatttattattttaatcaataggttttggttctctatcattcttcggttgtatatcctatataattgtcgctggcaattagtaacataatttgttctaattttgagcaattagaaaaatgttagtgcaagccagcacattattcaagtctctaatctctttgtgactgctctacttgtatccatacgaagaaaaacgatgttttatctagaggtcaagttaccaatgataatcttggaaatgttgataatgagttggatacctaacttatccatttctaatttatttgttttatgtcaaaatttagagaatcctaaaagaagacacaatgtgaacaaaaggagagtaggttatagtcacattatattgtatgacatcattttcccacaatctatactttctttactacgttttattcctttcctgctcgtgtggcctccaattgtctatcttgtgtttaataaacgtttttgtctttttagttgaaatcgtcaggtatttgaattatggtatccgatacaaaatctagtttcttatacccgtatatgatgttataaaatagagatcacgtacacttcgggtcattgttttggtcattttgcatgcatgcatgttgtgtacgatcatgtattttacgagccgtaaagtgaaataaaacttcacatttaatacgcaatttccaatatgggtagtaatttatcaacctaaaacgaaaaagcttgagttttctactttttagcctcatatgggtgggtgcatgttccacaaccacaaggaacgaataacaataacagattttttatatgtaaactctactacttttgtctaaagcaaattccataaagagatggcttttacccttaattattctttaaaatacttttgaatgaaataatacaagattagacaaactacttgtcttcctttatgtatattttatacgctatttgctccaatagaatatatttctttaacaaagatgttacctacttggttttaatagattatattgataccaaattgtccgcaattgtattgtccgaaattggacaaaaaaaacaggggaatggcaatattatgatgtgatagaagccctcttcttctatccaacgaacatagtacatcacatattacacactcattcacatattatcccaaaagatgaactcatatacaaaaactcataaactcatcaatataggaaagaaaacaatccaaatgaaataattaagtaactcttttattaggccggcaccaaaacctgccaaaccttaacttgagagtctagtcctccactataaatatgataagaagcctcatctgctttacgcgaatcacgaaatgcccctgtcaagcacttaaccggtcctaaatgtccctctaacatagccaagcatgaataatccttggctgaacatttccacaacctcactgtcttatctgctgagccactacaaagtatgtccgaaacaaccgcgaggcatagaacagactctgtgtgacctctaagcattccaacaactacaatgtctccaccatcgtcacgttcccacaccaatatcgatccatcagatccaccggaatgcaaaagagagccattagtaccgctcaatgccaatgcgttaatacctgaattatgttctgacaatattgcaactaaagaatgtttcctcttcttctttacattctcttcattgatgttcttcctccacactttgattctttggtcagaagatcctgtatatatatcaccattttcggataatgcaaccgcattgattgcatcatcgtgggcgtttgtgaatgactctaggcatttaaaatcggtggttcgccagattttaagcgtcctgtcccatgagacagagtagagtagtgttccatctcttgataaggctaaacccgaaaccgcgtctacatggtgaacccatgaagctttcttatgcctccttatttcaacttggttctttggcatcaaacactttgcaaaacgatcgctaatcgttggcatcgtcgctaaatgcatgtactttttaccacccacgtcttcttcaacgacgtcgtttatcttccacacacgtatcttatgatcttggtgtgctgtaaagagtttatcagccaagattaccaaagatttcactgctcctccacctcctctctcccctgttattacatcgccgttgcttgatgcttcggctaatgtttccaacgtgtttgcattccataatctaacaaccccgtcgttggagcctgtgtaaagtctctttcctgcaagagttagagatgaaatgtaggatgctgtgtgacatacaagagtggcaatacattgatgaagtggttgagaagaagatgttagatgatcttcttgagaaaaatctggttcttcttcggattcttgaaattgtatcatttttgcttatgaaggaagattgaaaccaatgagcaaacctttggagatgtaatataaagagaaaaagatgaagtttgggggaaagtagtcgtggaaacaacgattggctcctagacttggactattctaatatatatcaaatttggactctttacgttgtgagcaaatctgacggaaacgaaaagaataatgtgatgggatgatgagtaggatgcaatatatatttaaaaatgttatatttattgacacaatcttgtttggtagatttctttctcacaaaagtggagaaaaaagttgaaggatggccctagattactattttatttgctaaggttgggatgtgtttcatacgtcgtgagttatgacaatattattgatttaatgtgtaaaacttttacacgaattagatgtgtcaaacactaccaaaccaccgccaatagaaacaaaattattataaaaaaacgaataacccaaatcaaaaataatgcaccaactttatcaaaataaatgaataaataaataatgtaccaaaatcatgaaactgaaaagtgaaaagggatgtaaagtagtatagaagtcttctttttttttttttttttttttggaaaaatggatgtaatattgtgcttatgttatgtcttcttctataactaagccaactcctagcattgttgttgcattgtgattccagagaacaaagttcccttttccatcaaaattttctacctcaaatgtgcttgagttgattacactcttaactcatggtcttatatttcccttaccatatattccagttgaactaatgcctttcagaaccctcagagatggacaatgcaacaagaatgcacggatgatctcctcacaagagaaatagtcacaaaaccacaaaacaaaagatccctaaaagtcaaataagattctttaccatttgatgtcgtagttctttccttgttttctttgattttttaaacctaaaacacttatgcaaaaagcttgttcagccttattcaaggctctgatataaagttatatatcgttgttgaatcgatcactcacacgcaaatttctcttgaactcgtttgtagtttgctgaaagtaaatgctcgagtcgactttacgagctccccgcaaaatctcaggtgtatacaagaggaaagaagaaaaactaagagaagatacaaggcttttggaagaaggaaggtataaaatgaagcacttggtctatgtttctgttaagttctctgtttctagacactccaacggtcagttgggctgcctcaactaactcggcctggttcaacaattttgaagcccactcttccacagctcaatccaactgcataataagcccttctgaaccgagacctataactgtatttgtaataaaaccggatataacccgaagaaccacaatttcataccggtgctaagatataagtttcggtctcatttaagtcattgaaacattggtaaaagtttgaaaacgtatatatacatcaatataataaatttgtaatgtaaaaccaaaatttgcaaagaaagttactaaccatagatcgtgtaaagctagaaaataatttatgttttggtggtattagaaaaaaatatgagagagaggatgagattgtagaaagtgggggaaacacgagaggggaaaatgctaggaagaagtaagaaacatgttgatgaaagtgtgcaaaggagatggggaacaaataatgggtcccttatttacatttttgccgattttaaagcgttttaattgttgatgagtcaacttcactgtctcctttgtttatctatcaagtaattttgaaattctaaactcgtaatttacacgaaaagtaatattcccgcaaaaaatatctcaaataatcacttcggtattttacatatcactttagtgatttgcgtgttaattaccaatgtcatacacttatctttcgaaaagcattattatcaaccaaaaaaaaaaactttcgaaaaccatagactattgtttgtggctttgtgcttgatatctctaaagtttcaacacaatgaataatcgcgtctaacatcgatgagacatgatagaactaacgtaagagaattccattaccgtctatgataacaattaaaaataaaatcttaataacacgatcaaataagtcttttataaaaaaataatttatttaaaaaagtgatccttgtttcctcgattaaacaacgatatttggaagatatgattccttctcaaataccggtttaagctaaatcatttaactcttttttggatagtaactcaaaattttgagcaagaggcgatcttttacacattttttttttgatgatccatttacgatttctttgttattttttattctttgtactatataagcataagatagattaacataattcttagaactctatataatagttgtctactacatttgtccttccaaaccatccaacgtttttgtttctttgttttgtttttaaaatccaggaatactaatattgttacttatatatgtatatttacgagttatcgttgaaacttgatcgtgtggaagacagagaaataagctttaattatggccaaaaaaagttctcaaatcagtggttggatagaaaaaaaaagagcaaaacgttgaggttgattaaaatggtgcaaaatgagtggttctgtttgttaaaatggaagaatgcacgagtctcatcatgcttttccttcgttttgtctttttattgggacattcttccaatattttcaagatcgctatgagtaaatcttatttttccctttttcctcgatttcacgtgtggatcacttcacattctccactacctttgtctggatcggtgatactagccaatttcaaactcctttgcatcattttacaatttgaagttagttctcaatcgaattctactcgactcaacaattctcttttaaacgttttagtctctaattgttactttttatttgtattattgataaggatgaattttcgggatttatcgaatgataaagtcgtcggggttattcatgggagcacatatagatgtaccatgatgtgatatcgtgatcccattaacctcagagagccaaaatcaccgaaagttgtgtctttgtcttaattggtaaattcaacagatgtttgtataatggtggtaattggtaagaaggagacccacatgttttaattattaaattatgtgtatattttcactatttgtatgatttaaattcaaaatacataaaagaagataatagaagaaagtaaatataaaattcagagtatatgcactaagactacttacatggccatatgttggttatttattttcgaaaatgatggatgacctaatcataaataagtttggatcatttagtacgaatgtttttaacaaatagatcttattttaaaatagtatattatttaagtcgacgtacaatattatgtgaaatcacggtatccgtttataacaagcttgaaatatacttcacggagtacaatttcgtcaccatttttttttattccagcaaataagtctccatatggtcatttagaaaacccaccaaaacttaactatagtaagcattttttttttccagttattagttatgcaatttattatatttcttagtaatagacttttaacttttatttatcatataaccactacatgttggtggaagagagagtaaataagatctttaccactttgtattggtctctccgtagcacgcgtggtaggaccttgatactctgtcatacaacggtatcaataccaccagaaaggaatgctcgttagcgtctaagtatagtccagaagttgaccagacagtgaccaattcctccacccaaagagatggtattgcgccattacttatatgtacttgttttaatttatggaaaataaaatgactaacaccaaaagagatattctgagagggatatataacaacgtttaaaaatctaatattaatcacatttattctacatcattttcaatatatctaattatttttgtcaattcatatcttacgaaattttcaataatataagaaaattaatgctagaaaatacagatttactgactctggaaaaatacatattaggaattctactcaagcaattatatttgattaacggaaacatatgctacctagttttatacatatctgatcaattttctgaatttttgataacatcttaatttggataaatatgctacctagttacgaaaattacactatatcatactccctctgtcccaatatattacatgtttttactaaaggcttaaataataaaaaatattttttacaaaattattatttaataatttaatttaaaacagctcaaccaatcatagaaaatactgtaaaatataataaattaaattcatttatattttgtatacaaacttgcaaaacatctaataaatttaaataaacaaaaacacccaaaatatctaacaaaatgagacatagtgagtattaaattccgacaaatcatatcaccctagttctgaacaaaaagattatgattctcatcatatgaatttatagttctaagaagtattttggttttgtttaggtgactattgacatttgaaaatctatatatacatagtagatattaaaaactctaagcaattaacaagttaagaactactaagttgtgaccaaaacattaatcttccattttttatagtcttcctagtttgtgttatatattatcattgatgtatcattatccgaattcaaaaccctcataatatatacttttgttggaaacaagaaaactaatatatggcattaaatatgtctacgtttggtgaaccaaataaaaaatatctctacgtttaagtcaacaaattatatggcaaaaatatctctatgtttattagtatatatattttcgaaagaaaagatgggataagaagagacaaagtaaaacaagagacaagtaataatgaagagaaaatacaaaattggcgggtgttcgttgtcaaagaatgcatgcgtgtggaggaagctggtccaatgttccccaccgggaaagtgcgactctccttctataaccactaatttgtatttacacccatcttaacatttttcgttactttcatgatacctcattaaaaagataatataagaaatgtaaatatcttaaatacttgaataaagcaatcaaattaccatccctattaatcattcttccaaatctatcaatcaacaaacttaatttaaatattaccttaattttaaaccgtttgtcagaaaaaatttgattgagtcattttttttttttttttttgcatgattgatgttggtatttgttattagataatgtcaggagaacaaaaaagctagatcacatgcttactcaaatcgataagaaaacaatatccgaaaagcttcaccaaactagaaatataaatgatacaagagggttttcataagtggaatataacaggtagggctacgcgtaagcctccctaggatttggaatccagtattaataaattcttacactaaaagattacaaaaacaaaaacctaaaccttggaaaactacggtttatgattcctagtggcttttggtatgtttgaactcatttcagtttcatgtgtttttctattatagagttttttttcctgcaggtaaatctagttttcaaccaatatattgtacgttttcagttatctgactcccaactcttacagcctctattgtatttatgaaaaaataaatgagtttaaacataccaagtagtatatatgtttaatatatctgtggactgtgttattaattgaattcattagtttgattaaaaatttacatactgttgactttaattaacagcttatactaatttcaaaagtaacgtgtcaaaagcaaattaagatttttgaaagaaaaacatccatgagacaaagttttttatttatcatttttttttttaaaactactaaatcttttgtttttatcagtagatacaaactctgtgaaagtaaagggttggtgatcaaaagtaaaagaaacttaggcgagtactcgtgtgaggtgttaccatcgagcaatcaagtaattacttactttaattccattttttttttattgaaaattgacaacaaacacacattaaagtatatgtgtatatatagatacgtgtgtgcatgggtctcctctatatgagtgatcaaaaattgtattggagttaagctacaaaatcttctcattcgattttctctctttatttctctctctaatgaagggaactctaagatacttagcaggaatcgctgggccaaatgggtttggctcaagatccacagctgaacaagttacacaacatagcttttttccttgttcacatctcactgccataatcactggtttgtctcccctcatcacttaaactaccatttactatttcagtctttatagtgtttttgttgagtagatatttgtgtttctttccaaatttcttggatgttccgggagggacattctgcgttcgtgtgtcctaaggaaggtttcaactttcaaatattgtaaaaaccaaatagttgtgaacttacatgatcgaagcacatcgccgataattcccaaaaggtttatatttacacaaggaagaacaattacgataattataaagtcctcaattaatctaatgttttgaagatttatttttatcaaaagcttctgatactctcatagtagacacttatatctttttttgtcaaacttagcagacacttatatataatatttcacttattgtcttgaaattgcattacaaaaaacttagtcttgaaatgattattgttataatttcataaaaacgaaagtagctaggataagagtcagacagttatatgataatttataagttgtatcttttttttccaatatacatgggaaagaaacttttcaggcaaaagaaacgatatgtatattaatattattatcaaacgttatgagatatgtgttttgtttatgccggcgacaatatatcaattttgtctccattgaaatttgaaacaataggtatggttggttacagcatatgtccatatacaattgatttgccttttgactttaacctttgatacatgtctcatcgttgcaaaacattactttatttaattttcttaagggatcagcctgcccaaaacgtactttatgccatctttatgttccctaatttgtcggttaaaactttatgcaatgagggtcaatgaattttaaagtggcctctctttactctctctttatgttgcaaagaaaaacaaaaaggctgcttttagagacatcaattgtcgaaaaccaattccactacccaattgtagtgaaataatctggttaattatgatttcagttatgctggatctgaatttaactgtggactcttttttattttttccatatacacacataatttggagaaaatacttaataacaaataagtttcacttttgttaaatacacttgctaaaattatttttatctaagaaagtccaaaagcaccatttcaaaattaactgatacgaagtgaaatggttcatgttttttatatactagattgtatttttttatgaaatgtttgatgcatactactttctaacaggaggaacgtctgggatcggtgcggaaactgcgagagtgttagcaaaaagaggggtgagagtagtgatggcagtaagagatatgaagaaagcagaaatggtgaaggagagaataataagagagaatccagaagctgacattatattattcgagattgatctgagctctctatcttccgttgccagattctgctctcaatttctttcccaagatcttcccctcaacatactcatgtacgtaagattcactctacatgttacccatgcacgtaccaattttcatatacaaaatgagaatttaataattctaatggttaaaatgaattttgcagaaacaacgcaggagttttctctccaaatcttgaattctccgaagaaaagattgagctgacatttgctacaaactttttaggtaattttgtggaattacatatgatacatgaatatatctatgtagagtgaaagaaaattaatgatggttagcataacttttcaggacattacttattaacagaaatgctgatagagaaaatgatagatacggcagagaagagtggaatcgaaggacgaatcattaacctttcctctgtgattcacaattgggtcaagcctgattgtttctccttccctaaattgctccatcccattaggtaatttacattcgttttccattttttacgtgtggaaagtatctaagaaaaaatctatctcaaaaatatatttattatcattaggtttgtgtaattgtgtttaatttgtaattgtgttttgtaatcgtgtagtaggtataacgggacaagggcatatgctcagtcaaagttggctacaattttacatgcgaaagcgttgagcaagcaattaaaggtacatttgaatattaataattacattctttcttttttgtttcattttttcacgtaaaataataatcagaaatatttatcactgaatgtgcttacaggacaggaatgcaaacgtgacgataaatgcagtccatccaggaattgttaaaactggaattatcagagcacacaagggtctttttacaggtaaaataaaacatttttaaccatacatatatatagaagtgcaaaaggaatctaataagtaaaaaaaaatattaaaaaatctaaaacatgatgtggtctgatgatgcatgcagattctctgtttttgatagcttcgaagctgctaaaatctataagccaggtaggtgtgaataatacatgctttcctttttgtctaaatagtacagttatggcccaacatggcaacaagttcatcctcttttttctgacactagattcctttttgtttttttgcatcccaaatcaaagttttgtcatcatcattattcatgcattgactcatttataataataacatgaaatttcttaaaaatatgctaatgggattagggcgcagctacaacatgttatgtggcattgagcaacgaaaccaaagggttaagtggaaagtattttgcagactgcaatgagaccaattgctcagatttagcgaatgatgagtatgtggctctcaagctctgcacccaaagccgtgccttaatccatgatcatttgcatgaatttcaaatacatgcccttcctaatttatgttttttgtaaatcatcttaataattcactttctgtcagagaccatccttcattttatttatgtaaagcagtgttttaaacaagaccaatctccttgtgtgtatacataaacaatgaatctattaagattaatagtttagtcatcatacaggaattgcttgtttaccacaagtatttatcgcatgtattttgaacttttgactccaaatattatttgagacacaactgagaatcgataaatagcacaactaaaagatcaacatgacgcgagaacatgcttataaaatatagactgaaattgtagatgaggcatcttattatacaccaagaattccactcatcacaattatcgaaatattaataggagcgtagacacgatgtattttctgtaggatagtcttttgtctgttccccttatttatagaatataacttgtcaatttgcgataaattagtggtatagtattcatataatcttaaaatattgttggaatttaaacaaacaatagaggtttgtttgtgttttttttcttattagttgacttttaaagaaggaaccaacttggcttgtgaacattgcaatctatgtcatgtgtatagcgtgttgttgtgccttaccaatggcatatgcaactatatatgtatataaaccatttaaggtctttgcatagttaatatttcctatagaagttagctttaatctgcccaattgtttgtctatacaattttggcattatatttctatctaataaatacatgccgaaaagaaacaattcgtatgccaaatctcatcattgctattaatttgagatcaaatagaatcactacttgaaatgtgccacttaagataaaaataacattttgtccaaaaaaaagataaaaataagttaggctttgtataagcaacgattacagataagaaatcactaggggctaattaacctagtgctttagtcggagcctaaactattttatgcatttataacataaatactataaatatgatattatgcataacaattatataaaaatattttttagaaaaataaaaatgctatttcgtaaacaaaatttaaacagtattttatatcaaaaattatatgaacgtttataactatgtagataaagataaaactaagttaaaaattagaaaacatattaaaacaaagtctatacaattttaagctgtcaaaacagttgcgtagacgtcatttaagtgcctagtgcctagtcaaggctttagtgaccgcctacaccgcttttaagaaccgattgcagatgatatgtttttgggccaaaaaaaaacttgtctcaagaaaagaagactttgttagcagactattgttgttgttgttcggaagaagacgccattgactcttgggttttgtaagcatacctcatgcatatggttgcacgttctccacataacatacaattccataccttatggaaactcttaggaagatctatcgaagttataaatgtggatagacctttatgagacactatcaccttgctttcactcaccttttttgctccaaaaaatgcagacttcattttattggagcacaactaattttgtataacgaactataaatttggacagaagaatatcgcatgaggtggacttggaagacctttaatccaaacggagtagacttggggtttaataggcagattctaagtcatgtacttggaccctttagtatagtccgccaaaacaaaatgactttcgtatgacggtataaggttatgcacccggccctccaccaaggaagactacactttctcgggtcctagatttttctatgcatgtgaccaaattatattatttaaacttatatgatccacagtgcaaggaagcatcgatggaaggttctgttttgtacattaagaagtagagacaaaacggtggtgggacggagacgtccctatgaagacaggctgccatgaatctatccccgaacatcgtttcacggtcaatttgtaaggtatcttcgagaaaagaagaaactctggaacaactcccaacattatatgccaattatcaagattcagttttgttttaaagaatctacatttctgaattttgtaacgaaaaagataataaataataataataataataataataataataataataataataataataataataataataataataataataataataataataataataataataataataataataataataataataataataataataataataataataataataataataataataataataataataataaagaaaatggcattttcgttacacattttttcctttcaaccactaaaagaataaaaaaaaagtaatactattttcttgtattataaaagctttcactcaaacgtaatttcaaaacattttacgcccaaaactgcttaatgaaaagatcaacgacccgtgaaacgaaaagctaatacaacccgactaagtaaagcaatttcttccagagtatacatggattgaagatggacacgtcatcttagcatgccacaaaaccttagatatagaaagttataatcaaggtcaactagggaaaacgttaataagtgttacttgctataaaacaagtaaagttagcagaaaaaaaaaactaattattttagccagtgggttagattaaacttctacgaagacgtcgaagagagcagtggttgacctgagaatactatttatagagaaccctcagcgactaaatgtaatcataaaatttctctgttgaggaagataaacaaagaagaaagttttctccagcccttggaaactacttgatggccttaccaatgttcggcagtatcgactttaccaattggtttcttaaaaagctagaggaacaagacgagagctttgggggaacgtttttgcacctagctgtgaaactgggaaatgaggaactcgtgaagaagatagtcgagattcacccttccctagtcagttccactaacaccaaaagtgacacacctctccatttggctgcgagattgggacacacaagcatcttgctgctgatgttagagtccacagcggagtccatagaaagcctagaggagacagtgccgaatgatctaaaacttgcagaaatggtgaataaagatggttttacgcctttgcattgcgcggtgatgaatggctccgtcgaaaccctgactgcgtttatcaacaaagctcccttgtctttcgactcagtcacactacaaacaagcgaaacagttttccatttagctgccagacacaaaaagatggaagcctttattttcatggccaagaatgccaacctaagaagacttctctacgagctggatggagagggcaatactgtgcttcatgctgccgcctctgtaggctttctctccgtaagtcttctccttcgtctttaaatttttccttttttctgtgttttctatttgtagcaaaaacaaattctgtgtgctgatttttataactagcaaaaaaaattcctcttcaaatttgaatcgggattctcttgtgggtgacatgcaagagtagtacatagtttctacaaagcccagtctagatgaaatagtaagcataacataagccctaagaaacccagagcagaaacaatcttgaacaaggctaataaaaagcgaagcccaagaggcctagaagatgaaggatttttcaattttttgaaaaatcttttgttaatctatcggcaaactgttatttctcaaattcatcatcatcatcaattcatcatcacctgttatgtttaaggagtttttttgttcaatgactatgtaaacagattctgatctaataaaatgacgttaagaaaaagaaaaagaaaactatttgatttaaataaaatatagaactacagaagcaaataaatatccttactttattttcaaaaacacaacgttaatttaaaatatcatcgattgcaatcttgcatatttgattaatcatcatttcagttttaaggatccatttcattaaaaatatttcatgtacaaagattataaaccgaccatctgcagttctgcaatctttgatagattccttacatattacatatctggtattttcatctgaaattctctaatatattaatgtattacagctggtaagttacatagttcatgaaataaaaatagaagtcaccacccagaacgataaaggttttgaagctgttgatcttctcaataaagatgatgaagatttcaaaatgatgtctatgattttggggcatgattcagaaatagttcaacgcgctgcttcaagtccacgagatgcttatacaccttcaacacaaaccgaggtggaaaattccgaaatccaccatgaacaaggactagtagctcctgaaataaaagaagagaacgtcaccaacgagaacaataaagtttttgaagcgattgatcttcctaccaaagaagatggagatttaaaaatgcttgctgggactgattcagaaacatttcaactcccttcaagtcggacaggaattttaacacctgaaacagaaaccgagatggtaatatcaaataccctccatggcataagacatggtcttcgagagagtcgcatcaaggaaaaagagatgcagtccgaggctttgcaaaacgcaaggaatacaattacggttgtcgcagtcttgattgcatcagttactttcacttgtgggttgaacccgcctggtggagtctatcaggatggacacttcatagggaaagcaaccgcggggggaacggtggctttcaaggtcttctcggtaagcaatagcatcgcgttgtttacatcactatgtatcgtcattcttctgctcagcattataccatttaggacgaaatcactcaagacattcttgattataacacataagatgatttggctggctgttatagccatggcaagtgcttatgtcgctggtacatgtgtcactttaccccattctagaggaaacaaatgggtactcaaagccactctggttattgcttgtgtcatgctaggaggtatgtttatttttctatggtttaagctggccaaccatatgtcaaggaagaagaagatgagaaaaaatatgatgtccaggatagaaaccctgaataaggcagctgctttcgtggatggctattacagctattaaaattattatatattatatacatcctactatattatttgggaagtacattttaaatgtaaccttatcttttataagtaattacataggtatgccattagaaataaaatttaaagagtaaaatataagctggaaaatcctaaaattgacgggtttaaatcgatattaatacaagatggtatactacaagtgaaactctaaaattaacaatcaaaatacaagtgtatatttttaaacactaaacaatataaataatatcaacaaaacatatacaactcgcagtttactatacattttaaatcaaataaaataatatcatatatttataatcatctttacaataaaagtttttagtttaactaaaatataagcctacctgcggtatactgcaagttaaaattataaataagcagattaccatcacgatgtctgtaccttctcacatacacacctatcaaaaacttaaaacctttcaaaacctcttggtatattcaaattaggattcttcattcatggaatcattattccaagggttttgggatgtcttatgaaatgattttggcagaagaggatgtaattttttttgaataaaaagtagtcagcaaaacatatgtttttttgggagtttttagataattaaatcagagaataaggttgggcatatgagtaacccattcgagttcgggtagaacccgttcgggtttgggattaatgggtatatgatttactacctaatagaataattctaaatattcggttctggttcgggtcggatccagttgggtttgggtcagtttgcacaaaacgtttcagaccctaaaaataccaaaaaaaatagaaacgagaaatttgtatgtagatagcgggtctccaaacaaaaaaaaacttttaaatttgttaagttttaataaatttaattatatttgaatatattttactaaattttgacaaacataacaaataatttgaatagtttagttgttttaaatatttaggtccaaaattaattgatatatttagatttataattataatcttagataattagataatattacgattaaatataattaatattttggatattaaattaatgtttggatttttgaatactctttttgggtaacgggtaatttacggaccaatcggatatccacgggtttactaaaactctacccaataaggaaatttcctaaaattttaacccgccttaacccggttttttggttcgggtattaggttggttatcgggtccgttctttcgttagccctattaaagataatctaatataggccccaattaggttcacatatataaccaaaatactatataaagactaattctaagttaagccaaaaattatatcctttaatacaaagaaaacatgtttcttaccaaaacaacttgtatacaaattttacacatttacttaaaattacatatgttgtatttattataaaaataacatttttaaacaaagtcaatctaatgcagcattatatgcaaagagtacaaacattgaaaaatattatgacattatttttatactatactatttcttgtgtaattcgaacaaaatatacaatttaatttataaaaaatattaatgcccgtgctgtatacagcacgggttatgatctagtatatgtttatcctttattattattattattattatttattttacatatgttatccttttactaaaggatttgtgtcgtttaatttgtattaattttgattttgttgtttatcacttgtataaataacttatatcaattagttaaaataaatatgcacaacggttattgatataattcatatttaccgctttatcaatgtttttaatatattttttaacgtgattcaccggtatttttgttgtattttttatcaagtcagtattaagtttcttccattttagaagttctcaagaggataaaagttaaatcgagttcgctttccaatagaggttatttcaagccaatcaaagctgcgactcaagagttatggctgttttaatggacatatatcattttggagcggaaagtaaattaatttggaaacatccttaaaaaccaaaatgtcggagcagttgacagaaaagcaagccatcgaccatgtgatcgatcgatcaagagctagagcagtagaagattccaatcgaccagccggtccattaagagctcgattggaggatggccagcatcttaggcaaggaaacaagccaccgccagatagatcgattactttgaagacatgatcaatctaatgttcgattaggcggtcgattacaattaatttccttttgttattttccgagtttcgcccagtttatcccgggtcgacccgaatcgcattctttttttatatagttgttttaaacctaaacataataaaaatatggatctgagacctgtttggaattttcattttcttttagagaatttgcatgtgattttttgtgttttatgcaaaaaaaaatgtctcttttttttaaagtttttttgtttatctcctgattttattatgattatgtttcgaacctacgacgtttggtgcattaataggtgtctcgaacctaaattatgatcaggtctcgaatttacgacgtttcactcatttatggagctcattaccatttgatcgacaactatcatgaaaacgtcgtgatttcgagacttgatttttacaacacttaaaattatgttgttttaagacataccatcaaatacgtgtcatttgacttaataaccgtaacagttgactaatacccgttatttacgaatttgaattagacaccaaatgtaaagtttgggtttgaaattcaaatttttttgggtttgggtataaattaatcttacaaatttgttcaggtacgtaaacacactttgaagattgttaatgtatgaaaatatcattttcccatgctttgtattttcgttgtgattagtgagaactgagaagtatcttttgatcttttagttttagtagattagggtatttcttggttgattcgagatgcttagagcttagttttagtagatacttaattactatcaaggtggtcttaatgctagattagtcttgccaagttcggaagcagaaggtgtttgatgaaatttcccgaaagaacttagtgagtacttaacattcctagtctataaaaattgatggttaaggtgctaggtagttagttaggcttgagatcaatgcatgttagtcttgtgattacaaatggaatctttgttaatagcttgaaatttctgttttaattattaacagaaatgctgatagagaaaatgatacaaacggcaaagtggaatctaattaaggacgaatcattaacctttcctctgtgatcacagttgggtcaagcttgattgtttctccttccctaaattactccatcccatcgggtaatttacattcattttcctttttttaatcttttatgtgtgaaagtatctacaaaaatgtatttatcattagattactgttttgtttagtaattgtgttgtgtgatccgaaaactatatagttaaatctgttaccatacaacacggatggaaaacttgtaaaattatttatctttcattgatgcatatatcaattctgaaaacatatgtttgaaaagtatgatgcccgcctaagttacaatattttttatgtcaaatatatgctttttcaaaaattcatacggtcccaaagattttcccacatattcaattcaaacccaccgttatcgtccccagtctataccaacatttccgaatcagcaattctccaagtcattttcatatctgtctcacttccttggtttgattccgatatataacagtgtctttttcttctgtttctacactcccatgtctatttctacctttactcttttaaaatcttcatgtttactagaaccgtcggaataaataacaatgtataaaaccttgtttcctaattagagcaatcaaaagaacttcttgtgagctctctagctactgaatatttgtcataaatataatttttaactttcgaattaaaattaatatagatatttttttaaaagaaaaatataaaagttatctatttcatcacgtcaaaaaaatacagtagaaccacaaactgttttattagtaacagccttacaaacaccaaaaaaaaaaaaatctaagaagaaataaaaaatctagtaacagaaaaataacataaattcacatcaaatattttttatatttctgtttgggtgagtcaaggacaccttgggttccgaccaggccctccatagtaaaaataagtcccccatacattgtttttgccttgtctgatgtcataacaagcggggtgatcggccaagacatggagattcttcagaggcaagagattgttgtcccagtcaacaacttgtaaattcctaaagtaggcagctttctcaaacccttcatctgcgaaatggccgcttcccatctgtgttccggtgtgagcaccgcttgatcggctgttcacaacttcgccgccaaattgtaccatacttgcatgactcctcaagtgactgaacaagaaagctggccagtatcccacaagaagtccattccctagttcaagccaccagtgcccatgttttggatcctacattaagtttaaaatgaccacaatataggcaatagcacatttagcttcaagagaaaataaaagtatagtatagatgatttctgtaagtcaaacgatcgaatttttcaaaacctgttattatatcaaaaccaacatatggctctgcggcatggatacagaattagttaaacactatatatccatcattatgtatttttataactagcttcatgtgagttaccaaataaacttatgtttcatatttttagttatacataaagaggtcagctaaatttgcgcatacaggtttctagttgatgtacattaaagatttgcttttactgcaggagcagtgaagtttctgtcatcaatttcatatacaatttaatgctcttaccaaatccaacctttttatttattaacaatgttttgaaaaaagctgaagcgatctttcctttattggttcagtttatgaaattcgaggttggttgctttctttattgtttctccaagagttataggtattcaaagtacctacagtggcacacgttgtaataactaagcattgcctcggggtgattttcattcatttattgatgagtcatagtattaccttaaattatgattacgttacgtgagttcttttttgtgacgtgagttatgtctataagtacaaattacagctgaaattctcaccatgatgatttggttttcaaaattttatgtgaaaatgaattaggtagaaataacatttaaataaatgtttgtagtttactaggacgtataatagatatattatatacactatcattttatcttcttttttttggattttctgttaagttatagtatatataatattcatggttcaaaaaatatcttaagctatagacaaaattgtaacattgatatatgtcgttagacctataaattcttcacaaaaacccaaaaataattttctgaagtgaaactacaataaggtagatgaaaactgtatattaatatatttaaacaaacaatgaaagaatggttggacaatttgctctaatttataatttcgtggaataagctcatgcttaatgtgtcggttgattaaaaaattttatgagacatctgcgtagcgtatcaagtgcgttattgactttatatatgtcggtctcagtactttaaaaatgtaatgttttgtcttggtggacttatctaaaagaaatcttaagtttcaagcaatcatatagcctaagcattaatgacacaactatttttaattttattctgggtcagcagcttcttgttcttaatagtatctagaaagaaaataagaacagaacacctattaatgcgctaaattacacattccaattaatttaaatacttatcgaagttcattggtaaattcaaaaacataatgcacgtacaactgcaacttgattctaccataattttcaacaaatgatgctatgagtatttgtttcatgttgtttgaccaaaatcatcaagtatgtacaaagtgtcaagtattttaagttttcaggattttttagtccttctttatgaattgaatatgataaaaatatggttagaagtgtggaaataaatggaaggaaatgaagactgaccttccaaatcattaaaccgatatcaaactgtcttccattataagaggacctcggggaaatcgctgcaccaattgcaattttattgttggtttgtacgaatccagagcagagtaaattgtagcacccagttgcttggtatgcatcagtctgcttttccaaattttcaattcaatatattattttccctcatgatattaaataaataattcaagcaaaaagtttgaaaaaagtagtgattgatcttaccgtccaatatgtgaagaatcttggataattatctccgtatagttcaggactaacctgcaaaaggatcaaaatgctatgtaatcagtaatcaccaacctaattataattggaccctatctatatccccaccacatttcttttgcaactcattactgtatattactagttgatttgtctgccggttctctgtttagaaaattagaaggttgactaattaagctcctgattgattcgaaagctaatctttgtgtttttataaaatataaacgtaaacatcaaacacaaaacgaatgtggtaaaactattatccttttgttgttttgtggcgtttgtgcttataatactaacaaaaaaaactttttctgtttaatatgatgaaagtttcagaatcatatgaaaagaattcacacttaaaccgacgaaaaatgtttataaacaatgtatattgtctagtgattaactattactcggatgtttagtaggtaatattacatatattgacaaaatattctctttttctattcgaaaactagtggcaaataattttgtaaagtgtaaagtgaatggtacctgccaaccagcttcaatggtgtttaggtcatgaccaaaggatc

SEQ ID NO: 868 - DNA, 64136 bp, Arabidopsis thaliana
cagagatgagccaaatctgagataaactaaactcataagcatcagtgacacgtggcgcccacacgttaatgcttgctttagctccatagtattgttctccatttacaaacaccaccgcatgctgcatgtaagtttaaactctattaagctaagtaccattaattaattttacaccataaaaataacctaagttcacactttatcttcaatatcaagaatatcagttgaacgaagactctttaatttctccatctcgatcgaatcattttttttattgtatgctttatagtatactttttggagaatcagatgctttattgaacaaaaaaaaaagttaaagtaaagcataagaaaacattattattctctcgcatgatcgagtcgtacgatacaagaggtgaagaagaagttacctcgtgaccacctccggatgaatctcgtctaatgggtcttcttaatttccgaccaaaccgtcgaactgaatttgcccttaaaacatcattctttgttgtttttctaattggtattgacccaattggacaactttcaccggacatactccataactgattaaaactttcctcatatgttgtttcatttcctttacttggcctgtaaggtgagtcctgcatgtttatattaatagaattacttcttttttatacctaaaacttacaaaagaagtaaagttaaagagtagattcattacaagtggtttctggccttgtagctgaggatgatcaaatgcgggttgtaaatgagacggtacacattctattacatctccgtctgggctctacagtttcacaataacaaaaatgatcacagaaatggaaaaaaaaagtagattaattccataaagggtttgtttggttacgtggattgttttgatggaaggtttgttgattttgctgagatatgcttccactcttctaagcttctgaatctccctgttgggtctgaatgaagtttggtttttaagatgaatagctgatccgagtaataagtctagttgaagagagagaagaagcataagcccaataaatttggatgtgatggttgaagtagttgaagaagaagaagaagaagaagccataactagagaatgtacggcttgtttggtaatgaaatggataggtttatttgtctccttgtgctttcttgatttttagtagcacacaagaacaaagaagaagaaggtggaatgagaatgagaagttagtttaatcccaatggccagactccagacagaggaaaacagagagcaagcaaacaaaaaaactactaatgttattttcagtttgattttatttcctcttatttttagggggtttcttggggtttgtagaattttaaactttatctctcaagcttttgttttaaaataaataaataaaaaagagagaaagagatgaagtaagtggctttggggttgtgtttccgacatagtctaagctttgacaggcacgaattaccattcaaaagagagtgcttagaaggtgggccttttgccttttgccttttcccacgttttttacccataacctcatgtccatttaaccattttttacttcactcttgatggtgataagttaataatgattatcatcttacaaacatgacgaggatgggacatggatttatcactatactaagaaagattaaggttcaaaactctctttcatcatcttattcatgagtttacgcaatacaagaaagatgaataagctagaaagtagaaagtgaaggaccatagtatgtcgtccaatgaattgtaatagtatcgtcataatttgggtttatagtagttagatacatgttaaatagaaagaaaaaaaaaaagaaagaaaggaatcactgtattccgatccttatcaattggtttagaattggaaatcaagttaaatacttaaatcagtagttctttatgtcaaaggaaaaaatagtgtaagaaagtaaaaagttaattttttcactttatttttatattattatttgggaatattattcgaacttgttcaataataatcttccaccgttcattcatctttaatgtatttaaattttttggaataaagtgtgaattttgttaattctctagttttcatagaattttaaagctctttaaaaggtgaaagaatattaatacccttagctaccaaactaaaggttgatcatatatctcctctattaatttgcttcaggatttttttttggtcaccattactttgctttgaattgcgttgttttagtatttttttcagtgttaacaaaaaagtgtattggttgtacaagccgtattaccttatatgtgcaaacgtcgatgtacaaatttgaaaagtatgtttgtatatctcctgattttccatccaatatcttaaagacaaactttggtatacttacaaaaaaaaaattacatataaacaaagccgtcttcagtggaagaacacgtgcttaggtagtagagcaggatgtttaattcgatttttaaagtgaaaagaatggtccttttgatatatatataagcaaatacacttttcgaaaaatataggacacaaaactaaacaaaagctcacattcacaaattgtaattaaaattctcttctcgacctaaaaaccatgcgtccattcttgtgcaattttgattatgtttctggatctttgttctgtgtgaaaataacttttcaattgatacaatactttcacatcttattcaagaaccggacaagaataaaatggagttcttgttacatgtgaaatattaaattacacttaaattaacccaaaaaaacttataagtattaaatgatatactaattaatattagaaacacaaaaatatatccactatttcaacaacaacaaaaaaaacaaaatatttattattttgtctagtttgctgatatcttgtgtttttgttggttttttagcttcgtctcttttagtttccatcattttgcattcatgtttaggtctttaggtgcatgtttgcattgcatttctcacttctaggatcttggagtggaacatggaatttggaagcaaatagagcaagaaggagctaaaagaagtgaagaaacaaaaattcaagaagaggtcgattgggactaatccagcctctgatccacaaccaaaacttggtcgattgggtgcttaaactgagttgacccggtttattttcttttctctataaatatgtttaaacccctaaacctacttttcttaatttctctttgtaatcaactctaaagtcttgtgattccttcttttattcaagattttatttatattcatctcttatctatctctttaattcttcttctaacatgaatttttaaaaattaaatgacaactccttggattttcatggcattaggtgtattcatagtatttcagatctctagttccatgcggatttgagtcttaagtgctataacgataaccatgtttgtggacttagaggaaatattaacaggtagaaaatttcttaatcatttttattaaatcaaaagtgtgtgtacgtaaaaatacatttcctatttatttacgttttcgcacttccaatacagaaatgtaagcttccactgcattaacgatcgaaatggaaacacaaacattccaccacagttcaaaactagaaaggcaagatttcatcgtgtttctgatatgatttttttgtcatacaaccacgcacctctgtggtgtttccttatgcttttgagagctaattaaattccgattaattatgactataaaagctgaaatcgtacttcgaaaaagcctccatgcaactgatgatttatggttttgttctaaatgtaaataaataaataaataaaaccaaaaaagagtttgacctcttagctaatcaagctccttatctgtggtatctttccggaatcaggttagaatttagatgattaactaatcatataaatttcatactttgacatgaaatctagaaatgtagaacatagaacacattacaacttgattttagaatccatgattgttttaaaattttatgttatttttgagaacgtcagtgccccaacaaatactagaataccaccacttaggtacaaacagatagaaagacgacgatgatattttccttacacattggtgacgtatctattatattgcctatgtgaggacattacaagtggctgtaatggagcactcaaatcaattatctatgactgtatataaattccctactaacatatttggtgccaactttggggcgaccaagatggatgatgatcattaggttcctcttttgcttttttgaacttttaatatggagaccatgtgctttgtcttttttcttcaattatttcagtgctttagctaaataatatatatcattgacaaaatttctatccataggatttcagtataagtagtattcacagggttatatgttgaacttaaaccaagaatagttatccacaatttggacctatactgaattgtaataaacgaataatatgtaatttcagcaacattagatgagataatatagaagcattttaacattacattagaaaaaaagagaggataatatagaagcaaactacttaatatggtagtttggttcaagattcgttatactagtcgatgcaagcaagtgagtcccgcccatgagaccgagtttcgtcgactgcagcggcatattaactactttcaagtgttacttccactatcaaaaacttcaaaaaatgttataagataatttgattataaaaccattaaaagtgttttaaaaaactaacaggatttggatttcgatataagataatttgattataaaagatagaaaaattaagaccgaagcatcaacttttatacattgaaaagtgacataattgaagaggacaaatatttgggttgttgactgtcacgtggttaccgactactttttcattgaacataaagtctgctttacaatggtctgcaaaagagaacagagtgtgttaatccaaacagcttacttctattggtgtactcactaccaaaagggctaaacatgatttatgtatatattgtttctagtttctgttgtctttcatttcgaatgttttgatctaccaataaggcggggtcgatcatcattaaagtttccaccaattttgttaaatttttgagcgagtgaatgcattagtcttttgtaattattacgcttttggaagaaaaaagggaactatatagtccatccgattaagcgtcggtctaaatttccgaacgagaaaattagggacttcgaaagtggtatgcattggctaatggaagatgttgctccaaccgtaatcaagtagttagagcactcagatcccatgtttcttctccacttttgacaatcttggtaccatgtaattattaggttttacaacatctcaacacactcttattttttttaactcatttatgatttctttatgaaagaattagtgaaaatgaaccgtaaaagtttgaaaaaaatattttctggacccttccaaaacattttaaaaaaacaaatctttctacagagaaatacacgattacctttcgcagaagataatattacgatatttaaactatcaagtacatttaaacaaaagaaaactaaaagaaaaaacaaaaacaaatacacaaaacaaaactgtacttgtaaaaataaagatatatcttcaaaagttttcttttgtaaaagtattaaaagtgcggtgtaaaataatttattttctttcttttctagttcaagcatacaagtttttagaattcaaattcaatttataattagattttttattattcgaacctcagtcgatcgatgtagagaacgactctaaagagagagagagattgatcagtttaggagagttaatctaaaaaacttcagcaatacagttgcgaaagaaaagcggagcggagcatatactcataaacatatatgaattttatatgggatagttcgtttgatgtacgagtaggtaagaaatgttcaaatagggaagaaaacagaaaaaatactttttggcatatatgtaactcctgattcaaatgctaataaaattcatctatctttactcataacaaggtttactttgttgatattttagaggttgtcgtagtagttaattaggaaaatttctttataaattaatatttcctaatttatcaaaaaattaatatttttataaattaatagaattttgtggtcctaatattattaatttataaaggtttgactgtattccgcataacccatcatccactaaagaggctactcaaacatcatgatcaaagaacaaatatataatgaaaggcgtaataagacacacttggtacttagtacacatttgctatatacacgcttgctatctttcctaatgaaagtgaaagacactggaaaaacaacacacaggctttgataagtatgatgggcctggaaatgccaaacttgtagctagcagatctaacaaaaacaagcttagcttgctacgtggtacacactctaagtcccaagtcaatccgcttactgaataatagttcaaatggagctaaatccaaattatgggtcccaaaaaaaaactcaggccaaattcaacggcttggaaaatggcaagagaatgtgcacaggtaaatcgaaaatcgaaaactaaaattgtaattacccttagtatttgcttaccgataagacaaacataattttgtcgccaaatgtagcatagaaaaaacaaaatatcatgttgctctatataaagtacttcataatattttataagtatctggtagaaataatagagcgtataagataatgaatctatccatggctgaaaaaaaaataattcatagaaaagaaaatgaccaataattcatttttcttcttcttctttttgcgataccaaaaacaacactactttgaattttatttgaaattaatctgttatttgtcttaaatggaataatattcttctaaagaaaagaattatgtattgtatataatccgctatgaagaaattcaaacacacttcttctcaccaaattgactatactattttcattgttgtcgatcgatgaattcaaatgaaaagagcatgcacaattgcaaatagagtttctgtatctttaaagttgtcctgcccacttagtgaattgtgaagaagaaaaagagaaggcgtggggaatatagagtaatatcaaagtgggccgtgagcaatgaatcatgttggataaaacttaagagctggattggtccaggacttgttcaaattggtttttgagtttattttgtgctgttttattaagacgttgttaatcaaaagtgttttttttttctcttactttcacaagaaactaaagtaagccacaggaaaatgcctactcttctcctttaatcgtggctgtcttttccttgtaggaatttttgccacattagcaacaaattttcttcaaatctcaatcacacaacagctttcacactcatttagatatttctatctatcaaaagaaaaaaaaaacattaaaaacatttagatttattattccatttagtttaacagaaatatcttgtgtcttaacaagacaaaacacttcttactatcatgaaaatgccaacgtcactaagacactaattttttcatctttacttttctttcctttttcaataaagaaaaatatcaattaccacatcgaagggaaaaaattataattaattactactatctgtgcattttttttttgttagttacacgaaatattatcttttatataattacaatgatgacatcggtttttaaaaatatgtatgttttagaaaatgctttcaaatttgttttttttttttgatcaaaaatatgtatgttttagaaaatctgtatgtaactaacccacaccaaaaagtaacaaaccaatgatgacatcggtttttaaaattatgtatgttttagaaaatactttctcaatttttttttttttaatatttaaagctgtttcacacatgttaaagaatttttaatttttatttattttaaactaaaaaattatttatctaaatataattcagtcaataaaacaacaatctgcataatataaattgtcaaaaccaatataaaaataataattaattttatgtttaaatattatattttaaaattttcttctaaaacaccaaatgaaaaatatggagggattatattacaaacctcatctgtccaaccgcgacaaaaactgttacttatattaaagaaaattaaagaaagaaataaacatcatctccgtgaatgtcattgcgaaaattggagaaaaaaaagaaaaacaaaattaaagatccgacccaaattccataacaaacaaaaccaaccaaaatttaacccagcccaaaacaaatatgttaaattgaacccaaccacctacataacccaacccgaccctccccaaatgacataaatcaatcagatatattttactcgatgtaattagtaatttcataaggctcacattcattgcatgtatacaaatttaactaaattgaaaggaaaaagaatattcgtgtgcgacaatatggtcatattactcccgactacaataacatatgtaaagtagtcataagatacgaacttgaactctctatttatttttgttcataattaattttattggttttcaattatatatatatatatattttgactagtaatctataggttaattcagtaacgaataaagatagatgaacggatggaccattaatccactacgacgcttagggaccaactttccacaagtgaggaaataggaccgcgactaccacttcctacacacccgtgataatattgtcaacgtcattcatgctttttcacctaaatttctttatcttagtggactaggcaatcaatttgaaaactctactacactgagttccaaagtttaacaaaaccataaatgaagagtgctacaaatatgtcatgtttcgtcgtacaacaagtttcccctttggctatacactaaaaaaaaccaacaattttccctgattatacactaaaaaaaactaacaattttccctgattacggtcaaatgctagctgatacacagtgtattttacacacctcgtcgtaatgatgaaagttagattcttgtttcttgacagtcgacttgtcttcgacgtaaattcgtcaaaaaagtcaatttccaatggatttctaaatgttgtatccgtcaaaactcagaaatgagttcttttattgtaatatatatggttatactatagagttaacaatcgtaaggtgttttattaacatcggaaacttttcaaggagttccacccctctttcatagtccctcatttaaaacacaaataacataaaacttgtcctaaggaaacctaaaatcgataactctatagaaaacacaacacatctttttctgttctttataaactgaaatttttcaattgggaacaagtttgtttacttagtatcatttggtaaaaaaaaaaaaagatgctccaataaacccaccaacatcttgggttggtcatttagatactctttgaattatatcagagaaaaatatcttatggttggtatggcagacgaccgataagaacctgtatagtataaccatatccgacaatgacttctctgttatccgaagacatactagacgatcaccaagaaaaagaatttgaaggtaaaacccataaaacatcataagtttgatgtaacaatcaaatttttttgtctctttcccaagttataaggacaacgagaaaataattcaccgaaaaaaggacaacgagaaaataaaataaacattaacttttttttactcataaatgaagtgtcctggaccatgaagaatgcaagagaatacggggtagggagcatttctagggaaagacgggcgacaacaaaacgtcaaaacctaacctataaaaatattaaacgcgaatcatatatagtgaaccataatgaaacaagaaaaaattaatagtgaagaattcaagataaaaccaagctagctaccaaaaacaaaaaaaaagataaaccaagctaatgatgagtcttttgaaaataacatagtttcacatgtaacttaacacacacaaaaatatgtttataatgaccaagaaataaactgaaataaactgaaataaactaagggaaacttaaatgatttcttaggacatatacatgatgaaaactgaaaacgaacaaatgctaggaagtgcattagcaaacaagagattcttaggaaaacatgaataacttagacattttggtaaagaactaaaactcccaaaagtcattctttttgggcataatctataaagtttaagaacttaagaataaataaataaatcataaaataattgaatacacagtaaaactaaaatctacatctcttgatagttaaaaagagagttgtgataaggtggtggggcctttcatttggccttcttttttttgagtccatatatagagaaattggaagaagttgatcaaaaggttcaaaacaaaaccacttttcaaacattggaactatctaagtattgaacacaaagatggccaaagtgttgacactacttgttcttcgactactcatgaacctcttacttatcggttggatttctctctggatcatcaaacccacgaccatatggatacaatcttggcgtcaagctgaagataccgccagacacactttcttcggctattacggtaaagtatatatgtacttaaaccacaaatctctcttattgtacttaaatataactctgatttttgcatttatgacttgtaaggtctcaactttgccgtattttcattccctcctattgctctctctatcgttggactcatttacttgagtttactgccacaacatcatcatccaacaaggtaaaaatagtttcattccctagtcaaagttgaaagtaagtaatgatcaaaactttgaagtagtgttttgtcaacttgtagaggagggaggggtgcagctattactgtctcaagaccagccattatcaatagcttcattggaattgtgtcttgtttcgagatacttgctcttcttttgttcctactctttcttgcttggaacttctatgcccgtgtctctaacgacttcaagaagctgatgcctgtcaaaaccatgaatcttaacttgtaaaacttttctccaattccaaattgtgcagtctttctatatagagttgttaaatattgttcacttattattatatgttttcagatggcagcttaagtactatagagttgctacaaggtttggtctattagccgaagcatgtctctctcttcttcttttccctgtcttgaggggactctcgatgttccggttacttaacattgagtttgcagcttctgtaaaatatcatgtgtggttcgggaccggtttgatcttcttttctttggttcatggtggaagcactctgttcatatggactattactcatcacattgaagaagaggtaaattaaataacttctttttttttataacaatcttaaactagtgtcctaactctaattcttgtggtaaaaacagatttggaaatggcagagaacgggtcgggtatatgtagctggactaatcagccttgtaacaggattactgatgtggatcacatcacttcctcaaattcgaaggaaaaattttgaagttttctattacacacaccatttgtatatagtttttcttgtagctttcttgtttcatgccggtgatcgtcacttctactgggtcctcccaggcatgtttctctttggactcgacaagatacttcggattgttcaatcacgatctgaaagctgcattctttccgccaatctcttctcttgtaaagccattgagcttgtcttgccaaaggacccaagtaagaaaattaatttctccaagtattttaaacatataaaaaaacgttccttaactttggtgaattattttggtattttgcagtgcttaactatgcaccatcaagttttatattcttgaacattccgttggtctcacggtttcaatggcatccctttagtattatctcaagctcgagtgtagacaaacactcattgtctattatgatgaaatgtgagggagattggacaaattctgtttataacaaaatagaagaagcggcaaattgtgaaaataagattaacaacataatcgtaagagtggaaggtccttatggacctgcctcggtagattttctcaggttgctaaaacactctctacatcagctcaatttcaagaaattgttttatatattatataattattgatttgtttggcaggtatgataatctgtttcttgtggcgggaggaattgggatcacaccatttctaagcattttgaaagaactagcgagcaaaaaccgactcaaatctcccaagagagtgcagcttgtgtttgcggttaggacattccaagatcttaacatgttgcttccgatagcatctataatctttaacccaatctacaacttaaacctcaagttaaaagtttttgtcacccaagaaaaaaagccttccaatggtacaacaacactgcaagagttcttggctcaatcacaagttcagtctattcacctcggaaccgacgaggactattcaagattcccgattcgcgggcctgaaagtttcagatggcttgccacattagtcctcataaccgtgcttacgtttctcggcttcttgataggtttaagccatttctttataccttctgaacacaagaatcattcaggggttatgaagttagctgcttcaggagcaatgaagacagctaaagaaaaggttccttcatgggttccagatttgattatcattgtctcttacgttatagctatctcagttggtggtttcgctgcaactattctacaacggagacgaaaacataaagaagcaccaagaatgtctaaagaagtagtaattaaaccagaggaaagaaacttcaccgagttaaaaccaattcctattactgaggaacatgagatacatatcggagaaaggccaaaactcgaaggtacttgttaattaaaactactatcttcttgagtaataatgtctataaagtttcatgtatttatttttgtaacacagagataatgtcggagtttgagaagaacttgagaggatggtcgagtgttggagttttagtatgtggaccagagtcagtgaaagaagctgtggcatcaatgtgtcgccaatggcctcagtgttttggagtagaagatttaagaagaagcagaatgaagatgaatctaaattttcattctcttaatttcaacctctaatctaacaacattttctaagtttgtatcgttagtttctcattctcctgtattttttatcttatagttgtataatttttgggtctctatcttattttaatgtttgcagtttgatcttttttctcaaaggagaatttgcataaaatgcatatttgtttttttttctttatctagcattttcttttgaaatttaaatagaacaatgtaaaaatagcttcaaacgttttcatttggaaaagttaaactaacatgtaatagtatagcaaagtagcatgataatttttgaaaatcacttataagaatttttgcatatagatatagtagttgtgtatttagtttgaaaatttatttttgaatatgtgagggtattttaatcctaattttgcatttataacattttttaccataactcatgattaatactgatctcgagatagaaatttttgcttttgtcacaatttatgtatttattataaactgtcaaaatttgatctctcacaatatggttacagtttgattttgtttatgatctctatcttaccattatgtttgcagtttataatcaattttctcaatggagaatttgcaaataagcaatttgtttttttgttcttaatttcgcatttctcatggaatttaaaaacaatgccactaaacctgcagtagtccagtaattaacataacaaagttttaataaccaaataaactgactatgttttagattatttgtgtcaacaagaccaaggcaagataggtttcttccggggaatcaccaggaaaaaaaacgcaatttaagcaaacgttctatcaatccggccaactttaaaaacaaattaaaggttttgtggcccaaaaatacgtgtaagacaaaagactgtgacacatgggccttacttcatgtggaagttttggtgcagttatgtgacttacgtacgtcaagcaaaatattagccgccttgaaatttcaaaatttgtggattaaatctaataatcagaaaccatatactataagatttacgttacatccttaaatttgcaatcgtacgttttgggcaatgtattatgtatacattgaatagaagagtcctgtattaattgagttacgcgaacggtttttttttttttttttctgatctagcggatggaggtattaaaaattcacatgcaaaatgttgagaaacaaatttgcaatataacgtagcataatagatttttaagaatatacctcaaaggaaagcaaaatatttgaaagaataaataaatcctcataaattccgtattttaaacaagattttattaagaaaaaaatcctaataaaatcttatttgaaataaggaaataaacatatcttagaattgttcaaagtacatttacataggaatataaaatagcataatgtatgtacaaaaataattatttacaaatcatttatttccaaatgttgtttaacattgtctaagtaatattaattatggtttaaattaatatttagttatgggagccctatattattattgaattattatatacaattagttgatgtaagtatcaaaaataaataacttaagaagtttccaaaactagtattctttatttgctctattcattatatttttatatttgtaacgtcccgaccgtctttattaggtttcgacaatcacttctcggaaggtcgtccatcctgaaattactctatcctaaacatgtttaactataaaattctctcgaaacttttgtaacgtatataaccacataaattctcttaaacttatttgcatacaccattatatttctgaaatcgatatgttacaatattatttaatatttagattacttttactgaatcgaattaaatatcaaatcgaaacaaatctaatctaccaaaaataattttgttataaacatttcttgcctagttctacctcatatacattttagttaaagaaagaaatcacaacaattcccataattcaataattaaatccacaaaatcttggagtaagtaagagaaataaaaagatagtatcttaacataaacaattcaaagatgctctctcacacaattcacacacacttacaaaacaaaagacagaaacaatgttttcattcaaatcaaaagaagttataacactagtacaaaaaaagctcaaattctaatagtaactctttttatttcccaattacccaaagattctctctcacttcacaaaactagctttgagagtcgtgttccacaaaatccattaaagctgaaacggttttgctcaccattcaaacaaatacaaaattgcaaaaccccaaattataacaaaataatataaaaattaaaccgctaaaaagagtgaaccaacaaaaatcgccgaatgtgtgtgtaatgagaaaaccgacccatcatcccaatcatctcttcccgtgtcactctcttcctctcccacgtttcttctctcttccctttatgggttttaacttctccttcttcttcttcttcaatcttcagttttcaaattcaacaacaattcacattttgatttcttcatcatctctctctctctcgcttctctctcaaatcgatgaggctctacgtctacatattacaagccaaagatttaccagcgaaagagacattcgctaagcttcacgttgggagacacaagtctaaaacgagagtcgcgagagatacttcgtcaccgatctggaacgaggaattcgtttttcgaatcagtgatgtcgacgaaggtgatgatgtcgttgtatcgattcttcaccatgagcagcaagatcatcagtctattgtttccaccggtttaattggtaaagttcggattccgcttacttccgttgctgctgaagagaatcaaactttgttgccgacttggtttgtcattgagaaacctagtgatggcaagttcgttaacattgaatgtggttagtaatctgattctgtcaactttgttgttatcgattttgtttttcgttggattttgattctgtaatcacttgtggaagaactattagagtacgaatgtttagcattagaggaaatgtcatgtttgtgttcatgaattgagtggcttgtagattcatttgaagttgtgttttctggtgtttaggtgagaatttaagtctctgtatatggaggtgttggtttatctatggatatgaactttaccttcgtctatcaggaaaactgattccatagagtatgaatgtttaagcatgagaagaaatggcatgtttgtgtcttctttggtgattcatgctttgagcattggttaagtaacttgtagattcatttgaaatggtgttttctggtgttaggtgagaattttaagtctctagttagtgaatcaattgtgtgtgtgtgtgtgtgtgtgttatcattagtgaattaggaattgggctctgtatctgtgtgtgtgtatatggaggttttggatatgaactttacctttgtattgtagggaaaattcttctgagtttgtctttgcaagggaaatgggaaagtacctctggtgagaaggttcttaatgataagcaggatattattaacttggaaggtgtgaaagaactcgaaggatcgcctaaagatttgatctcctccagagatgggaaacggcgtaaacaccatgatgggaagcacataatgaagaatattgtgaaccacattgacaagctttttcataagaaagaggagatctctaagagactccatgatgagtcttcagtaggacaaagtgtaaactcaaattatgaggatgccactgaccaatgttcttcctctgctacttgtactggctttgaggaaggtcttgacctgatgcagtctagtgatagcgaaagagaagaaatgcctgagaatcttacagggggagttcttgttgatcagaaatatttagtctcaccctgtgaacttaacaaatttctttttacgccaagttcgcaatttaggaaagaattggctgaacttcaaggtctatcagatgtacaggaagggccttggacaatgatgcaagaagatactcctcgtctaacacgggttgttacatacatgagagctgcaacgaagatggtcaaagcagtaaaagcaacagaaaatcaagtttaccggaaagctagcgggaagcagtttgctgtatttgttagtgtaagcacaccagatgttccctacggaaataccttcaaaatagagttgctttacaagatactacctgaaacagagccaactgctggtggggaagcttctcgactgatcatatcatgggggattcaatttagtcaaagtactataatgaaaggtatgattgaaggaggtgctaggcaagggctgaaagaaagctttgaacaattttctaatctcctggctaagacttataaaactcttgatccggctgttgtattggacaaggagcaggttatagcaacagtgcagtcagagccaaagactgatttgaaatcagcttttctatacttctggagttcctctgtcatctgtgctgttcttttgtctgtatatgttgtagttcatatgctgcactgtgagcccagcaaaatccaagggtttgaattctatgggcttgatttgcctgatagttttggagagctattcagtagtggaatacttgttcttcttctggagcgtgtttacataatgactgtgcacttcgtacaagctagattacatcgaggcgagtttctatttaaataacaccttcggccttgtattgcttgtgcagtccaattgacgtctttttatttttaatttttttcaggaagagatcagggagtcaaagcaaatggtaaggggtggattctgacaatagctttaattaagggaacaaatttggcttcagtggaagcaacagagctttttgatccctatgttgttttcacttgcaatgggaaaacaagaacaagttctgtcaaacttcaagcccaggatcctcagtggaatggtaatcaaactttttctttaatttatctcttcacttcgtgattatcctgtgtctctgccacagtgccactaaaatacatggtgtggttcttacagaggtaatcgagtttgatgcaatggaggaaccaccatcggtattagatgtggaggtatttgattttgatggtccatttgaccagggggcttctcttggtcatgcagagatcaatttcttgaaacatacagccgatgaacttgctgacttgagtgttgctctagttggtaatcatgctcaagcgtctcagtcgaagttacaattgagaattttcctggaaaacaagaacggggttgaaacaatgaaggattacttgagtaaggtggaaaaggaagtcggcaagaaggtagacacactctaatgaagtatcattaaatggccagtctttgcgaatcggtgtggttggtcaaaaaagcttttatgatgttcatgtgcaactctgactcttgtcgtatgtattgacagttgaacattcggtcaccacagaagaactctgctttccagaaactgtttggtttgccacatgaagaatttcttctcaaagaatatacttgttacttgaagagaaaacttccggtgcaggtttgcgtctgtttacttttctttcgcctcattcataaactagttttctatcttggaaaacttcacctacagatttatgtggattgaagcgagaatacagtaaagatgcatcttaatagaatggaaactgatattagaatctgctttcacagggcaagctctttctgtctgctagaattgtggcgttctactcaaatgtatttggacacaagacaaagttttatttcctctgggaagatattgatgacatccaagtgcttcccccaacttttgcttcattaggaagccctttgctactcattattctgaaaaagaaccgaggtcttgatgcaaagcatggagctaaatctcaggatgatgaaggaagactttcgttctatttccagtcatttgtatcatttgatgccaccagcaggtattggtttacgtgatcatcaacgacccaaagcgattagtttactgtttgcaactatattgaatgtgaattattcatgaaaatggcaggacaatcatggctttgtggaaaacaaggacgttaagtgtggatcatagagcacaaatagtagaagaagaccaagatgtggcagatcctttcctcttgcctgaagctgttacagttgtttcagatgcggatgcattaatgatgtcaaaagtgtacacgtgtgatctaccttgcgatgtatgaatcatagttcactcttctttgtactacttccattttaattaaggctatacaactcagtgttagtgcgtatctgtttgatgatggtgttccctgaatttgatttcagtcctcttctgttacaggtagaattagtaatgaagatctttggtggaggagaattggagcgtaagatcatggagaaatctggatgtttgagttacgctagtacaacatgggaatctaaaaaaccgggagtctacgaaagacggctttcttacaagtataaccactatgtgtctgtgtttggaggtggagtcacatgtgcacaacagaaatctccagctccaaatgatgaaggctggatcttgaatgaaattgtggctctccacgatgttccattcggagatcattttcgtgtaagtcttcttcttcctctgctttaatatatacagtccaatacagaaacaactttttgtccactaaattataatgacgatattgtaggttcatataaggtacgaggtgaagaaagcaggagttgattgtaaaacaagtaagtgtgaagtgtatttgaagatcaggtggctcaaaacaataaagtttgagcaaagaattagcaaaagtataatggagaaatttaggaatcgattcaaagttatatttgatttgttccagaaagaatctgttgcaaattcatctttgacacttctctgacgaataaaactatacttgttgtagatctcttctcattactcaaaattttaaatcttgactacatatgtcaccttcacctgatccagtcatgtggcttgcacgtgatccacttgacaacatgggagggaattgaacatttcctaacaatatccccaaaattagtgcttaattagcaccaatgttcaaatagcttcagtgaaatgaaataaatagttgccacattcgatgaaagcatatatgcagagctggtaagattcaagaaaatattacaccatagtcactactttttttcttgtccaaaaaaaaaaaaaaagtattaaattgggagataaaattttaaattagattatctttattagattttatcatcgaaacaaaaatacaagaagtcgacgtacaatatgtaggtaaaagagaaaaaatatccagtaaaaaatccaatatttggaaatagttactatgtccgatttatacatctgtggatctatatctctattcagctactagcgaccaaccaaagcagccacaaaccggttactatgtgatattagctacattaggagtaaattgctgtactaaccaattttgaaacaaaattaattgaaataaccgtcggctcaattatcaaccgattgtgtagtcaatgattgttgttggtagtacaaaagttggcacaaatttgacataaactattaactaacgtgattttatggaattctataatcgcaaatagaatcttatgttatattaatactgaaaaaagtatacataacaaatatagtatatcattctattattgtactgatataatgcattgataacaacatgttattaattctaacaattaattttgttttcgaaaaatgagaaaaataattatataaattaaatagaatagaattttaatatttgaaataatatagggagatttagcattagaataacaatatttaattataaatagtattattttatttttatcaccaaaattcatttataataaaacgttacaacgtccattttacaacatacttttctatattaattctagcattcttagcaagcatatcagctatcacatttgcctctctctcttatacacttaaattttaagccatgtctatatttataagattttcaatttcattccctagtccctaccgtatttgcaaagccatgtcacagattctcatttgtctaccccaaatatagctgtcaaatggtccgtccagggaccattgggcgtgtccgtatggacagttttttttatgggccaagttggacggtccataatggacaatggtccgaaaaatgtccatgcccaataaagaccatgtccatatgggcaagcccatgtatagcccattttattattgataaatcaaaaatcatgattttaaagaattgtgtttttgcattttgcatttttccgacaaaacggtaaaattgtgtttttcttaccaatacaataaaatcacgattttggcggaaaaattatgaaattgttttttcccgccaaaacggtagaatcgtaaaattgttttttcccgccaaaacgaagaattgtgttttctcaccaaaactgtaaaattgtgtttttcgccaatataataaaatcacgattttggcagaaaaattacgttttcccgccaaaaccgtaaattcggagaattgcgttttcccgtcgaaactgtaaaattgtgttctcgccaatataataaaatcgcgttttagaggaaatttgcggaattacgtttttccgtcaaaatcgtaaaatcggagaattgtatttttccctcaattcatgcccatgggcagcccattgtccatatggtcaagcccatattatccgcggacaaaactggtcatatgcccaattagaccatttgttttatggtccggaatatagcccgtccatatgcatttggactgggcaaccccatgggccgcctgtccaattgacagttctaaccccaaagatgagagattcatgaatttttcacatctcttgaaaattagggtagcttcggttcgggatatcttgattatccaaaacaaatagaaaactatttctctcatcaaattgagtttttttctctataattgagtttgtcatcaaattgagttttgcaaggctagctccgttttaacatatatatatatatatatatatatatatatatatatatatatatataatattacatcaatctaatagccaatctttaaacctcgagttggtacctcagtaacacatcccaaaaactgactcagcaaccgaacataacatacactgctcctcagtttttgccccgagatgaggaatcccacaattcccatgcatctgtctgttcattgtcttcatccatctttttcatttctttaatccaaaatagacacccaatgcctttaagtgtctcctacttcaaaccactctcatgaatcatttcataacacaacccataaaactcaacctccccccatgtgccttcacatgcattccaatgaaacaccactcaactaaactaatttcctaagcctattaatttccatttataagcattgttgttaacttaaaaaatttaaacaaccacttttgacttcacattcacaaagctatggatctttgcaaaagtagagcaacaaccaccattactctctcatgtctcatcttctttgtttcttcattctacacaatctccaccgctaaatctgtcacgaatccgctctatcaactccttctgttcatcggcttcttcctcgctgcagccttgtcgcttgttttactggtggcagcagcacgagccaccatggttgcgtggataacggtcctcgtcttactggccttttcgggtacacgtcgccgtgttttagcgcggagggggaagacgatcacggcggacgtggcgatgagcttgttcagggttctgattagagaagcaaatcctcgtggttagtctcatgaagattgtttgttgttagagagtatttacatatcacttttgtatataacaaaaatatatgtatttttgtgaatgatttttccccttttgtgtatttatttattcgaattttaattttaatatatacataatgtatgtgtgctttaaatgtttattcaatacttctatagttacaattttctatagaattaatctttagatgttaaaaaaatgttttaatctttctaatacgaaaaatatttattgagttatttcatatcataatcggggattctgatcgcaattttgatattaaaaatggttaaggaaataaaaccaaaaatgatcttaatttcctgccactgcatatttcactataaataaatgggatcagaaagtttacagttttcttctctactatactacaaaattagtttagctttctaaaataaaataaggaagaaaaccttaagtaaaaccaattacatgtctaaaatatacttacaaaagatcctcaattataaattttaaaaaggttgttgtaatatctcatatccatttagatgacgtcacatacaatttgctacctcttgtcactcatttaaacatacaatacgttgtactacgttgcgacactttcactagactggtgagatatttagaacaaatacgtcagcccgataagaaatatgttttatattcttttacacaaatctaagaatggatttgttaacttgagatatcttatggtttttgtttatgatttatatcataaacacgcttaagttacatcttcacgaagatacaaatctgaacaatgtagatgatgatatgatgcctcttttctcacgtcatggattgattctgcgattaaacgtaaggtacaacatcttcatgtttgttgtccttcagatggtatttgtaatatccccatgtttttctagctgcaagactcgggtatccttaaatctcgttgatgtgaccatggatgatgccgagttcgtttctttaccttatgctgttatgcatttgtaacgtatttggtctcccagtgaggccacctttgcaagacttgtctcttgctatcctgtattggaagagttaaatattgttgaatgttggaatcttccggaagtcattccggctgaatttttttgtcactgatcaagagactcaaaataaagctatgcgattctacggttgtacaagtacatataaagataaatatggagttgtgactgatgctcctcttttacgcgatttgtttattgatgatgaccaagctggaagttatttaataaacaatttgagttccactgccaagttaaatgtttatctcgcctttggtttggacagttttgatgaagcaacaagggtttcatcgaggagaagtagcatccacaattttctgctcgggatttcaaatgtcggggaaatgatcatatatctaaacactttaaagctatatatgtcatgtcaattccagtataagacatgtacgttctctatcatgattcatgaaagtttatgacctacattacttttctttttggttcgagatcatctatcaatactcaaaattagaaccgcttcctcggtttggttacatgtcccacatgtatgctgatatttatgtacctaattggaaatggttaaaaacatttcttgggagttgcccaaacttgaaaatccctcatcttggtaatgatctgctaaactctagctagtgtgaatcaactagtgttcatgtgttgttgtagcaaagcttctctgatgatgaaatgcaaagaagaagctacagaactaaagaagaacaatggaagcattataggtgtgtatagtactaatgaatctctttgcttttgaccacaaagcaacctacttggttcatgttacacaatcaaatttggttccaaatgtcacatataaataataattaagcataaaaattccctatttatagccaatatttgcttctgaatattactcaaattaaacctaaaactcagaagaatgttttgagaaacaaaagcaagaaattttgaaccatgtgatatgtttcaccaatcaatcatataaacttcttctggtttatctttttattatcctatcattaccactccatactcataactctctctgtctctctatctccctctccacatcaagaagaagtctctgctagttccaaaacagaacaagtgaatccctcaagtttcttattacaaaacccaaaaaccaaagtgaaccagtgttgttgtttgtactcacagatccattctccactgattcatttcttgctctgcttcttctctcttagttttgttaagaatcttctcttatccattgtgttttttctattttataaatacatatataattttagttgggggagagcttgcctggtgtcgccttcttctctctctaagacttgtgcttaatttacggacatgtgaagatacttcgcttttgcctcatcgaagggcatgttagctatttacttatctcttctcttctcttctttgtcttgtgagctctcaaatcttcatagatacaaatcaagaaagtgatcaaacaaaaaaaggacaagtctttttggtatttcagatcgagaaaaaatgtggttgcaaggtttgaagtaatcttgcaatggattctttgactggatttagaatggaacccaaatggcaaattgatcctcagcttctctttgttggtccaaagattggtgaaggagctcatgctaaagtctatgagggaaagtaagctcctttcttcttctttgttaactttctggatttgatttgcttatgagattattgggaaagtttggattttgatttgtgggtaagtgaagtctagtatttgttctataagggtatgaataaaatgcttgtttggtacactcatctatcttgatttgtctagttgaattattgaaattgtaaagttggagtttttaatggatctctactgtgtttggtcgttatgatctgagacagatacaagaatcagacagttgctataaagatagttcacagaggagaaacaccagaagagattgctaaaagagattcaagattccttagagaagtagaaatgctctcacgtgttcaacacaagaatttggtcaaggttcttgtttcttgagatctatggctgtttttgttgttactagcttaaagggtttcatgagttcatgattgtgttttgtctctggatcagttcattggtgcttgcaaggagcctgtaatggtgatagttacagaacttcttcaaggcggtacattgcgtaaatatctattaaacttgagacccgcatgtttggagactcgtgtggctatcggttttgcgcttgatattgctcgtggtatggaatgcttgcattcccatgggatcattcaccgtgatctcaaacccggtaaaactacctctttaaacctgatatgtatcatttaatgatctgcttaaagtatttgcaaaacaccttgcttcatggaaaccacatgctcagatctcaatcacaaagaatcttttctttcttttttattgtctgacaccacacacgcttcaagttcttttaatattctggttatgattaagatttaatcttaagtgttgaagatggtgttaaaggatctattgttctgttttgcagagaacttgcttttaactgcagaccataaaacagtaaaactagcagattttggattagcaagagaagagtcactgactgagatgatgacggctgagacaggaacataccgatggatggcacctgaggttcttctttacttatagacatatttgttcatttcttgtgcttctctttgctacttaaagacaatcttggtggaatattacagttgtacagcacggtaactcttcgattgggagagaagaagcactacaatcataaagtcgacgcctatagctttgcaatagttctttgggagcttttacacaataaattgccttttgagggaatgtcaaatctccaagcagcatatgcagcagccttcaaagtgtgtaacactgtcttgttttgcttttgattttcgctgaactttattctctttgttttgacatgtttcttatacagaatgtgagaccaagcgcggagagcttaccggaggagttgggcgacattgtaacatcatgttggaatgaggatccgaatgctcggcccaacttcacgcatatcattgagttacttcttaactatctctctaaagttggatctccgatatccgctattccacaacggattcttgcttcgaagaacacgctattgccaccggattctcctggaactagctctttgatggctaagcttgatgaatgtggggaaactccaaaggccaaaagtgaagacaaacgaaaaggtttgtttttctgcttcaatcaatgttattaaccttgaaatcacagagtggttttaggaccagagatttggtagacatcactcaaattattcatgtaataatatcctccctaccatatgaatttagcaagaagttcatttatataaataaatagttatgtaattgtaatgaatttaaaagtagacgtaaagaaaaagtttcctaaagaggctcatgttccctaaatgagaaagttttagttttgttaaatttatcgttttctatttttctatctcttctattatcaagactcgaggattaaagaagtcaactcttcattttcaacttttttttttaatcgttttggttgtgattttttttcgaccaattagtatcacaagatgtcgaacttttgaaaaccaaagtttgatatctcaaatgctaccaagtgtaggttatgtggcttagccaaagcatgtgtcgcgtgcttcacgaaataagggacaattggtgcatttagcgtagggatgaaattagaaaactagaaatgagaagttatctcagaggtcaaattcatatttggttattgattcacggatcaaatatccaaatgacttctagccaaaccgttaggagaaaatccgtcggttgagaatcatatatggcgctggtgagtgagaccaccgaaaacaaactttatatttatgaatatagtacgattcaaacgaatcaacatgacactggatgaagacatcggtggtatgaatcttctgattttgaatctggtaacaccatcaccatccaaaataagaaaaaaaaaatacgaaaaatgattaaagagagcgtctcccatcccaattactaaaaaaaaatgggaaagaaaccacccggcaattgctggtagccgtaaaaaccaaacaagaaaatagatattacttttgtcctcccaaagattttgtccagttaaccaacttttcgaagccatgtcttacgttttcagtatatgcctctaaggcaacttgtattttctcaaagtgtggtttccatattgtcataactcggcttacctagaaaaacaagtaacaatggtcacaatgtatagtgcaatgtcaaaagagaatcagacataatgaataaagatggaaacatattaacctcaagatagtcgtaggaaacgtcgaatggttgggtgaaatgtggggtcaaaagcctgcttacatgtatgtaacacctcgatggacttatcggttaagtattgaatttttggttggagataaatggttaatgtcacatacacatctttgatgcttggaatccatttctgtgatatctaagagaagaattcaaaggttaataagaataaagcaataatgacttgtcttataacgaaaaccaaaaactttcagaataaaaccttttgaagagtttggctaagatcttgttgccgcagagtcactatatatgcttgcaaccataataaaaaaaaagaggatcatttaagattgatcactatgacaattttatcgatgttaattatgaaccttcttatagagttacctgagttttatttaggtttagaccaagcaacttcccatcgatctgaacacaagtaaaaaaaaagtaaagaaagcttttgaatatgtacatacatcagatccaagggacaccatgtttcttacattttcaagctttgagccaagttccgcgactttcttttctgcgatttcagctcgagtttccacttccagacttctcttgcgttgcatttccacttcttctcgtagttcaagtatctgccaatgcagaactaaattgaggtaacaaaacaagaaggaaatacacacctcaaactacaaaacaccaacctgtttctgaagttcataagccgttccttctgcttcactggattctcagtctaaataaaaaagcatcaacagcaacaaaagtgtaaataagtttcttctatacataacaattttgaatacatgaaccaaagattaattaaaaatatcacttgaagagatccaaccacatcaaagatgatgcagcttgagtaattgttaactctttccaactttggaaagagacaaaacgtcaaagtgatttccagaaacagagaacggaagctcaaaagtctctcttgtgccaaatatattaaaccctaaaaaattcaacttctatccgaatttctcagaaacaaaacaaagacacataacttcatatgaaattccagtgaacggttacctgaggaagaaccttatttgttatcagtgtaaaataacagagaagaggtacgagtaaaagaaacaaaagtgacttaggaaacgccattgttggagactgctcactggaagatagagagtcgtgagagacagtgataaagcgtatcaagtcatatagagggtcttcttatctttttctttaacatgtgagggttgagttaattatgcgggctgattatagagtttttaaattgaatttacgattgtttttttcttacatataaatgcaatctatatttgtgttcggaataacccatctaatattactccatgtattaaactaaaatattttgcatgttttggtagatcaactttttgaatgatcacagacctacaaacatcaaccctctaattatccaattttaccataatccacgagctcttaaaattcatttttaatatatataattaaaatagttcaaacagtttaaactttgtgaccaagttaaaatatttaaaatagtttgactttgtgatcaacatatttaaatataatcaatattttcatttttaagccggaaaatcacgtcttacaaatatatttctgatagacacacctataattccaaaattttgacttttaaaacaaacaaaaaaaaatctcattaataccactacatacgtttttacaaaaataccattaaaagatattttttcaaatactaaaaaaaactaaaactaaactttaaacctataaaacactaaatcctataaagtttatattcgagtataaaccttaaaagttcaaccctaaatcctgaaagcaagaccctaaacccaaactcaaacttttaaattataaatccttaaacaaaatcatttttagtctttatggtatttttagagttaacagtttgtagttgtatttttgaaaaaaaaacactagtgataggtttttagaataaaaacttaatttagtggtattgaggatatttctctaataaaaattattcacaaaaaatatgtattaaagcaaagtgctatgcttattccatgcaatcttttttgaaaaaaaaaatattttctaaccgattagtatatcttctagaggattcatagaaaaagaggatacaattacaatatgtagagtatcttataggtgacgtaaccatgaaatatagaattctttggaatctgaaactgaattattcagttgataaatgataaaacaaatactcatatctcatcctttggcatgtttaggagccatctctcagctggacggagacaacacagacacttgtgccagagagggaacacaatcttcccaagtcttcgaaagggtaatctcagaccaaaccgttgactttgttctcattaattgtttatgctaaaccacaagatatttggatcaaaagtattaccataaatcactatataaagacataaatgtgcaccccacttttcttatcaatcataaaagtcagcaaaacacaaggcatattcctcttctcttcctcagccttatttttctgatattcagtttcaaggatatatccatggcgatccagaagatcctctttgcttcacttctcatatgctcactgatccaatccatccacggggcggaaaaagtaagactcttcaaagagctggacaaaggtgcacttgatgtcaccactaaacccagccgagaaggaccaggtgttggtatgtataattctcttcaaaacatctatcatttgctacttcattagccatgccttataaatgtgcgattttgctctaataccatgttagattttaaagctttatgaatgttaagacaaatttttatgagtgttggaaacattagttctctttagtcgtttattacaacatcattagatcttatcctattaattagaattacttagaattaagtgatatgaatgatagtatgatctaatatcaatttacaagaataagttggaattaatattttgaatgtttggtctttagttttggatgccggcaaggatacgttgaacattacatggacgctaagctcgattgggtctaaaagagaggctgaatttaagatcatcaaagttaagctatgctacgctccacctagccaagttgaccgaccatggcgcaaaacccatgacgagctcttcaaagacaagacctgcccacacaagatcatagccaagccttatgacaaaacacttcaatcaactacttggactcttgagcgtgacatccccaccggaacctacttcgttcgtgcctacgcggttgatgccattggccatgaagttgcctatggacagagcaccgacgatgccaagaaaaccaatctcttcagcgttcaggctatcagtggccgccacgcgtccctagatattgcctccatctgtttcagtgtcttctccgtcgtggctcttgtcgtcttctttgtcaatgagaagaggaaggccaagatagagcaaagcaaatgagtcgtttactttgcgtatttgtgacgttgaacccaaaaaaagttgactttgaactttcttgtttaccaattccttttgtcttgttgcacacttcttctttcttatatgcttttatttatgtgtttgtacaattaagccattgatatggaacaaaactaatcctacggtggtgatgcgtttgtgtgctttatatattttttatacaccttttgatatattcttacacacttttttcacaaagattgatatttgcataatttgtggtaatcattctcaaaatacggtatatatacttcacctcttactttcaaagagaaatcataagtataactaagcaataattctatatatagggaattatgatataaaatttatccaaattttcaaaatattaaacaaatatctaacaagtacctaaaaatttaaaatttcaagaaatgaatggagtataataaaggttcctataataaaagctggaaaaaaaatgtagtataacaaaataacaatacgtgacttttttttttgtcgtcacaaaacataacttttaaatgcaaaatggaactttgtaatatgaaaagttgtaaagagattgaaagacaccattaacgtttgtcgtctaagccttgatatgctaaaagtgataagcatgatgaattgctgacagcgatcccgatcatcattaagattaggttgtcatcaagatctagtttggggttactcaaaatgtcaaacatgtcgacacataataagtttactatatttgtaactatatactagtaatagatgcactgaggtcagccaatgtgagtgtgattataataatactaatacgcaaatgcatacgtacaatactgaggcttaaatgtgaatacagctttcgtcaaaaagtttaatatttcgttcatgcaaaactcattgttatgctgctgtttaattgatgtaactataaagttttataaattcgtttttctgctagtatacaaaaaaaaaaaacaaaaaaaaaaatttggagttgttgcccaccgtctatctcatcaaccaaatcgagccacttgtttggaaaaccaaatggtcataatcaatatggcttatcaataagttgtgctggttattacaaattaaaaagtccatctaccgaatgacgaaatatttatattattttcattaatgatacattgacctttcatatctaaaaactgtgatagaacccattcccaagagacatggagccaaacaagccacgttcaaatggttaagttctacgtacggaggtagtaccttcttttatggtcaacaaaaaaaaaacctatcatacctatttcttttgaacattgaaaaaagtaagaaaattcaaaattggtttttgcaagcttttgttataaaattatcaagatataactgaaacatcaagaatactgagacgtaaattagaatatgtggcaatatatcccgtttaattcagttaaatagattatttatttaaatcatttaaaaatatttttaaatttgatatattcaaaaacttatgatatctataataaatccaaactaaataaatatattatctatttatagtagacaaattataaataccaaaaaaaagagaatttgtagaagaaaaaaatacaacctatatttttctaaagaaatatctagttccaatgttggatataaaattatactggtaacatttgaattacattgtattaaaaatttacatcatatttaacataatttaaataaatattttagcatcacatatcattaacttaatagtagcttttataccgattttaagaatatttaggttggatccgatagaattttagataatttaaacataaagctaaatgtcactaatgttcttttgatcccaaaaaaaaacatatgttctagttagttgcacaaatgttttagttataatgtagataaactgtcattatcacgcttataaattcaaagtatacctaacaataaaaaaagtaagcgacaatagttatgtattcatacttatttaaatctatagattatgaaccattaaaaaaaaaaaaaaaatcgaaagttttttttaccgttaaaaatattttctacgatgaggttgaacgtcacaatatgtcatattacaatcagattgaatactatgctcaagtcgctcattaaaccatcatatgagaatatatagagatgatcatctcaaatacacatacaattggatatttaaaactatcttttaacaagtagtacacatatccaattagattcgatgtcagaatgttgtagtgattagaagacattaagcatgtgatcgtttcctattatccgcttgatgcatgtattatgtaataattaaatcatacgtgataggtgatttcactgaagaaataatcaaaattgtattttatgtataatactatttcaccaatgtagtaagtggaaataacttcaaacatatttcaagagtttttttgaaatagtaatattccaaatgaatagctagataatttattgatagaacatttgcaatagattatacgagaacatataaataaaatagttttatgagggcgttatcttataaccaactatgccaaaagcattagggtataactaaaaattatcatcttgcattgagactctaaacaaaatttctttaaaattggcctttaaatgagtaccatcaatagaaatgcagttccagttcctcatgaacttataactgatgcaccaaaaaccaaaactacatcatttgacttttttcgacatatcttttcaataaaagagacatacatatttatgattttttttaatataccatattaaaacacttcaataaaacttcataactaataacaagtgtacatgaagaaatttatatttgtaaatatgaggatattgaggatgacggtaatgatgatcaatttgataaaataattaagaaaaatatcaaaaattaaccaacaactgcacgccttattattgttacaaaagattataacaaccttaaaagaaagttagtgtatcttccaccttaatcaacacctgaggattatggacatatattgttgcttaccgggtatgcagttgacgcaaatggcataaaagtttgagaagctcaagattcttatgtattaagcaaaaaaatagtcggatttataagaatagctagaggaaaaaacttaatctccgatttctttgagatgaaaattcgactttgagataaatatttattaaccatattattgataagtcttttatatagcaggtaactttctcatcgtaaatcatggattcagatctttcttgaagttttaaaactctatgtaatcggtggtaaatctattaggagatcagtagtaagtctattaggagatcgataaggctctgatatttattaagttttagattagtttggaatcaacggacctgccttaacgacaccagaatttcacccagcacaaaactcgttcagtaataacgaaggtaagtgacaaaacttatgtattcatacctatttaatcccatagattatgaaccactaaaaaaaaaaaaatcttagaagtattttctaccaagaactcgaatatcccaatatagtacaccacaatcaaattaaatactatattaacgtcattcattaaaccatcatatgaaaatatatagacatgatcattttaaatagacaaacaattggatattaatgactacctcttaataaggagttcagatatccaaaattagattcgatgtcacaatattgtagcgattggaaagaaaataagcatgtaattgtgttctattatctgtttgccgcatatattctacaagaatttgatcatatgtggtgatttcatgagatattattctcataattaacaatgccaaaaacaataggatattaaaaattattaccttctattaagactctatacaaattctctttaaaatttgctttcaaatgagcaccattaatataaatgatgtttttcatgaacttataactgatgcaccaaaaaccaaaattatattagtgacatctgattctttctttaataaaagagatatatccatgatattttaatgtatcatgggaaaacaccttaataagacttcataactatcatcaagtgtacatgtagaaacctatgatgtatgttcgtgagctttccatatttatgtactctatctatccaatccgatagtttatatgaatcattgaaacaaaaatttaaaaaatctcgagattatttttcttccgtggacaaatatgtagaactatatattaaaacaaaaatttaatcttttaaccaaaagaaaagaaaaaaagaagaagcaacattggagaccaagttgtcgttaataatattggcccaagcccacaaaacgttatgactattgtctgactgtcattggaccgttccataaattcatatagaaacacaccaatcaattattagtatacacaagttgtgaggaccttacttttaaaagtctttctttaatagattaaccaagtggaacaagtcttcttgatattattacacatataaaaactccattaagaaactaatttggtttgtccaaaaaggtttagatttcgcagttatctagtgttccttgttaaaattttcttaattgttaaacatgcttaaacgagattatactacaacaaaaaatggattggatataaaagtttcaaacatgtcgttctttatttggtaacaagcaaactttcatacccatatattaacaacaaacaaaaacaacaatgtctttatataaccagaaaaacatgtaaaacagcttgatttaaagaaaaacaatgaaaacataaaaaatagtaaagatagttctgtgccactgtcaacgatgctttcccgatcaggcaaatatatttttttctaaaaacactcaaaagaattagaaaatattctttttttgggggtcaaatgtaaaactttctaatattctgtaggaccaatagaaaaagtagaaaatagaatatatgacttttttttttttgagtctaaaatagaatataggactttgaaaatcccaatagccataaaacattatataaaaaaaagactgttggaaatgatattttcttgtttaaaataaaatgatattcattggcataaaagctattttcaaagcaaagtggaacacttgcattttgcattgagcatcaaattcctccaccatctcctctcctacttctcatcttcatcaccaccgtctaaagattcaaccttttgtaactgcttccaatggcgttagctctctccgtcgcacctacatcttcttctttgtcttccctcctctctcggacccctaacccttctcctaatttcagaacaactcatctgaatttcggttctcaaaggaggatttacacaatcaatcctctccttagatcctttaaatgccttcaatcatcttcaagagacgtaaatgcgtcacctttctcaatctcagctattgcttcttcttcttcttcatcacagaccacagagcttgtaccctataagcttcagagattagtcaaggaattcaaatccttgacagagccaattgatcgactcaaatgggttctccattacgctagtctccttcctcaaatgcccgagtcgtccaagactgaatcaaacagagttatgggctgcacagctcgtgtttggctagatgctgagttaggtcaagatgggaagatgaggttttgtgcagatagtgattcagatgtgtcgaaagggatgtgttcttgtttgattcaagttcttgatgaggcttctcctgtagaagttatggagttgaagactgaggatttagctgagcttaatgttggtttgttgggtggagagagatcgagagttaacacttggtataatgttcttgtgagtatgcagaagaagactcgacgattagtagcggagagggaaggtaaagttccttcctttgagccatttccttcacttgtgttaacggctcatggcattgaagctaaaggaagctttgctcaagctcaggtgagaatctgtctctgtttaattctcagtttgaatttgaagtattagagtatgtggattaagaaatgagcttcctttatcattgtttgtgtgttagtgaatgtatctagctgagttttgcagcaatgtagatgttacaatggtgcgattgaatagtatttctcgttgttttgaactcgtttgcaagactagactctgagtcactcttgtcctgatgtatctagctgagttttcctgaaatttagatgttacaatgttaagattcaactcttttgcaagacttatactttgtgtagcttattaagatttgttgtttgatttctgtttttttacttgcaggcgaaatatttgtttccggaggagtcacgggttgaagaacttgtcaatgtgttgaaggaaaagaagataggagtggttgctcatttctatatggatccagaagtgcaaggggtcttgactgctgctcaaaagcattggccacatatctctatatctgattctcttgtcatggcagactcagctgtcacgatggctaaagctggatgtcagtttataacagttcttggtgttgatttcatgtccgaaaatgttcgtgccatcctagatcaagctgggtttgaaaaggttagagaagggtttttttctcttatattttgttttgtgatagtgagtctttacatattattcggttttgtaggttggtgtgtacaggatgtcagatgagaccattggttgttcacttgctgacgctgcttctgctcctgcttacttgaattatcttgaagctgcttctcgttctcctccttcactgcatgttgtttatataaatacatctttggagacaaaagcttttgctcatgagcttgtacctaccattacttgcacttcatctaatgttgtacagacgattctgcaggtttgtttcttgctttcttcaatcttcttttcttttttttttcttcatcttgcttttttaaagctatttctcttctctcttgtcaataggcgtttgctcaaatgccagagttaactgtttggtatggtcctgattcttacatgggagcgaatattgtaaagttattccagcagatgacattgatgactaatgaagaaatcgccaatattcaccctaaacacagcttagattccattaaatcattgcttccccgtcttcactatttccaggtaacttttaccttttgttgttcgtggtagtatttaagtgtcaatagaaggtttgcttatatgattgtgttccaggaaggaacctgcattgtacatcatctattcggtcacgaggtagtggagagaataaagtacatgtactgtgacgcctttcttacagcacatcttgaggttccaggtgaaatgttttcactagcaatggaagcaaagaaaagagagatgggtgttgttggatcaacacaaaacatactagacttcatcaagcagaaggttcaggaagcagtggaccggaatgttgatgaccacctccagtttgttcttggaacagagtcaggaatggtaacatcgattgtcgcggtgatcagaagtctgctaggttcttctgctaactcgaaattgaaggtggaagtagtgtttcctgtctcatcagactcgatgacaaaaacttcttcagatagttcaaactccattaaagttggtgatgtggcactaccggttgtaccgggagtagcaggtggtgaaggttgctctattcatggcggatgtgcatcatgcccatatatgaaggtcatttattgctttatcatcattcatttgatatagatcgctaaatgaatctatttgctccatcaaactcaaagcttgtgtgataatgcagatgaactcgcttagctcgctcttgaaagtttgccacaaactacctgacttggaaaatgtatatggaggattcatagcggagcgatttaaaagacaaactcctcaaggaaaactcatcgcggatgtcgggtgtgagccgatacttcacatgaggcacttccaagtgagtaaaaaatcaaacatctcttataaagttttgcagtaatgtggttaaaatcttgaatctatatcccgctttcgcaggcgaataaggagctgccagacaagcttgttcatcaggtattaagttgtgagagcaagagatgaccatgaccaagttgcccttaaaagctatgtatgaagaaattgggtgactttagttataattatatggtttgacgttatggtggaacatgatgatgtggttatggttcttcctgcaataattatcatacggattacattacatattgtatacaatgatataaacaagagcagaagaagcaatgtggatatatttagagaggcttaggagagaagcttatttgatgtattattattgtttgggctctttgcaatgagcattaagatatattaagaatttgacttatgaaagcaaacaaattttagaattcctgaagggacctttcgccttcttggatacggaaaaattctgttggtgtataagttacaaacgcatcgtattctcgacgtgatccggaacagggcatatatgaacaagatgtttacgtctatacttagtaccttcgacttcaacccttctcatactgtttcgcttcggaccataatagtagacatataatgtttggcaacttagtaacaacctattgacaaaaacgatctcaccactaggagtggcacgggcaatgtgccatttctcaaaacccgccatctcgtaaaagaatatcttagaccattcttgttttttctcatcattcttcataacccaaatttccacccggttttggcaacacatgaatcctaacttcccttggtagtttatcaaagtgtatcgatgatccatcattgtctttggagcctcgacctgatcaaatttctcggatataacatcaaaacacaacaatacatacgtagaaccatattgttttgcttggtaatagatagttcccttgatgcaaactggaggtaacaatggaaagtaaagtccaaagttatattggattttcctccacttccttatggcatctcccaatgtgaaaacatgacaacaccgcctcttataattgtctaggcatattactttgtattgattcttgaaagggtcgtatcctaagaaggaagtgctcacatgggagtggccggccgtggtttccggtaaagaaagggactgcctcgtggtagggttatatatagctgcctcagtataggctgtcgaccaacaaaaaatcaagccatggacgtattgatacgatccccaaagtactgacactgattctttgtcagtatatctagggtacgtagaggaaaagatgaagaaatctgttttagggaatttgtcaatgtggtggaaaatgagatgagtatatcacgactaggctgagacaaagaacgagtcacgatcgagtctatgaagtctctactgctgcctataattgatgaccattgtttggagacgcattggaactttatgagagactttgcagggagtttcttgagtatttccaccattagatcgataggaataccgatatcttcggcgatggaaacttcccggcgctgaaaatgtttagccggcaatggtgaggtctcttctttgatctcttcgcttcctctcttcattatgtctccgttcgtttttttttttgggttttgaaaccctaaatcctaattaacatggaagatctacaacactaacataactttttgttgcattactaaaaccctcctaattaatatgggttttgtgaaaaaaaaagtttacccttgccttacaaaaaaagtaaattaaccccacaaagtcttaaataacctcggttaccactttcaatttatgataaataatatatcaaatcaaaacatttttgatgagaaacctatatctattcttataattttaaaacactaatgtatgtgaccataccttctcttcaaaatacacataatggttatgttgcacattaaattcgacttggtagggtttgttactttgtatgtattttttagaagttgaaggtaacttgcaaaagctttgacaaaaaaaacaaaaagaaggtaacttgcaaaagaaaaatcatttgaaaattagaagacgaagaaagtaacttgcagaaagccctaatattagaagacgaagaattttattctatagattttattataaatggatatttgtcatcattgtttatggccatcaattaattttatttaaaaataaagaaatttcatacaagtgctaactgactttactcatctatatagggttaataccactttactctcatatagaaagtacaaattaatatttgttgagataaagagagtctagtcccaaccacttgtgaaaaaaatcttataaagcaaaacacctaggagatagaaaaaatacatgtttccgaaaacaattcgaagctcaattcattaggaaaaccttggtcataaatcagaagaaaaaagttgtaattatgtgagaactaagtactgtcgtttgaataaaagtcaaagacttcaataaacacaaaagaaggtacgagaaatttcaaatttctacccttgaagtagttcactaatggaaaaaaattatccactaaaatatgtttaacgtaccaatatgtcaataaactatctaccaaaataagcttaagtatagctttttgattcaaatacaattattcccaaaacaaattcatccaaaactcgacataccatattaccattttttttttttttttccatattaccatttcacaaacagaacaactttcagaaactgtatttgagctttaattcagcatccgaagcgttgagaataccctcttagtgttcttttagcaagctcacagtgatatgtttaaaatctattttcgaaaaaaaaattgagcaatacactcaaatgaccttagaaaacaattatatacggtaagaaacacgtgtcatcaaatgcaagttctttgagagaaagaacaccaaaagacaaagagtacacacgcccatccttttgaggaaacatacgacgcattgagttatcaaaccagtgttaaacctgtttcataatcatgtccacgtacaaacgtacccgtttttatcagccgatgccaatggtttcccgatcccactccaagaacaacacagtataggagatgtttgctccttgagaatgctcactatattgcctttagatagcgaccatacatgaaccgaaccatctgcagatcccgcagccacataatcatcatctggacttatgcatgaccggctccaattcgatgctaatctgttccccgatgctctcagtgtcccacatatttccaaagtccgggtatcaaatacattatgcacgttgtctctcccgctcgtcaagatcctatttccgttccgggacaatgatactgaggtcacagcagaagaatgtccagctacttcggacagaagtttcccagtttgaatatcccataacctaagattcccatccatgtggcctgagaataccgtaagcccatctatgctgaggcagattgcattgcagttgctggtaaagagtactgtgttagtgcagtaacctttatgcaaatcccaaagttttatggtacggtcatatgctgcactgacaacatgtcggctagagaatttgctcacatccacagcacaaaccttatccgtgtggcctgtgagtgtatggcgtaccctacccgagctaacatcccatacaaacaaattatttgagctggttgctgcgatcacggatttattgtcgtgggttacggccatatcaagtatattcccaagggaaccgtataagcttttgattaaagttccgctattggtgtcccacatttttactgctcgatcttgcccaccagtaaacagagtaccagagttgtattcaaagactattgaaccacagccaccttcatgagcatggatacgattcgcacatgttgacggaatggttgactcaacaaagtgatcggttccatcttcattgcggcggacaataccatcaacttgctgccgagcaagagtttccaaaccatttgccttcagcttagctagcatttcttcatagagatcatttgcctacgtaagaagaaagaattaaggccatcctaaccaaatcgaagaaaggggacgaacaaactctaccattaaagactcatgaaaaataaaagtccctatgtacctcattaagacgttctgcatcctgcatcttctgcaacatccaccgatcaattaacattttattctcagtctctgctttttgcactctacttgtcatctcctccaactgagaccgtatttccaggttttcagcaataagtacatccaccgtcttggtcttttcctctaactcttcttgtaatcgtgtacaatcctccctacagaacaactctagttttaaatatcgcacaacataattccttacagtcactgtaaaaccattcttaccttctttgtgttaattccttctgcaagtcattaattaacaactccttctcttgtaaaatagcctttgaagttctggattcagctacttctatcaccagttgttcagatagtcgagattgagctttgtaacattgctgtaactctgtttccagcttttctgttttctccttccattctgaaccctgcatacagatactcaaaccagatcaagacatgtgtcaaatattccagagcataaaagtagaaagaaccaaatctacagagacgctgaaccaaaacaaaaggattcaatacaaactttgaggcatactatataattgaagcaagtataaacttaactaaactacatatacttttatacttctctgtgacacatgaactcacaaaatgcactgaacaaacatactgagagctacaattgtttttttttctgaaatccaatgaaacgcattacaagaatctacaaggattaaaagagcctttgttccatctaactacttattccatagtgcaaatctttcaatgtttactagcaatttgtatacttcgataacaaggtataaagttgaaactggtgaaatctgaagcaatgaagaaaggaacaaaacaagattacctgagagattaaaggcttagagagagcagaaatcgcaggagcatgagctccttcttccagaagatgacgcttccgcaaagctctcaaagcgtcatttattgcttccatagctttctcctcctgtaccctgaaagttccgacactcatcggaatcaaaatttcaacaatcgcaaaagcttatgcaacaagaaaaggagatcaaatcaagacttacatctctcgattcagatcaaaaagagtcgtgtagtgaggaattagggtttgcgtataacggaagactttgatcggaaccggtggcgacttgaattccaccgccgcttacgagttacgacccaaattagagaaattacaaaagctgcaagtgaattggggattttcccccacaaatttagtttattgaaaattgattataatcagtttttgtattaatgattgattaattagaatttaattgcaccgttttacctgaagttttgttagtagtagccggaaagcaatattattattgggcctataaaagcccatttacattgtgttctgttcctgcaaagtgcaaagagtagagatcacgtcatggtccacgtggcaaccaatgaatccaactctggagaatgaacacgaacacacaaacagaacaacagatcatcagagaagaaactagaattgacaaaattattaaaaagcgaaaaaagaaaatgagagctcaggttttattatgtccaacaataacagcttatggtcgtctctattgtgcgccacgtagacttcaccgctacaattcatcatcatcatcatctcagtttctgaatctcaatctctctcgcttctccggtgctctcttcttccacatggaggtatgttctcttgccaggaatctctgcttcagtttattctcaacacataaggtatacaaatgggttatttggtgtttctctgtgttgtgtgactgattttgtgcttatagacgatttttaatatgttgatggtgttagcaattccagagtggaactggctcgagcggcaagagagggatggtggaaaatttgaagcggtacggtgtgatatcgtcgaaaagagtagctcaagttatggaggctttagatagaggtctctttgtaccagttggttcttcagcttatgttgatactcctgtacctataggttataatgctaccatttctgctccgcatatgcatgctacttgcttgcagctcttggaagataagctccaccccgggatgcgcgctttagatgtcggctcaggtctttgacttgatgttattggtatgttaaagtcgagtttgggaagtgaagataataatcagcttatgtttgtaggaaccgggtacttgactggctgttttgctttgatggttggagctgagggacgtgttgttggcgtggatcatatccctgaattggttgatatgtctatcaagaatatcgaaaagagtgttgctgcttcctttcttaagaaaggatctctctccttacatgttgggggtaagtactcgctctcccttatgagttccttgcctggcatcttttgactcaattgtatcttatggcagatggaagaaaaggttggcaagagtttgcaccgtatgatgcaatacacgtaggagcagcggcatcagaaatccctcagccccttttggatcagctaaaacccggtggacgaatggtgattccactaggaacctattttcaagagctcaaggtaatcgacaaaaacgaggatggttcaatcaaggtacataccgaaacttcagtccggtatgtgcccctcactagccgtgtcgaacagttaggaggattttgacaacaacaacaaagagaaaactctacatcccacgtcttagtgtacatataaaaggttgtgtaatgttttgtaatatgttttgatgggtaataaagaaaatatgtttacaaaagcttgaactcaagtttggtttcacatactcgctacattggaattgtaagtgagaacatttctaatcataactcacaatattaacactcactgagctatcaaaatcaacgccttgttcgttcctcagccacgttcactttaattgctctgccttccaaattctgcaaacacagagagcaatgaataaaagaaatggtaaagtcacaagaagataaccataaacgcatggaggagtgatttcttttacctgtccatcaagagcagcaatggcaacgttaacttcattctcattcgacatttgaacaaacccaaacccacgtgaacgacctgtctctctatcagaaaccactcgggcatcaactactttcccatgctcgctaaataatcgttccaaacgaccactatccacatcccatggcaggttcccaacatagatcctaaacgcagcatcatatacacgaggttgtcgttcaggtcttgatcctcttggagctgctctgtttactgtcaaacgcctcccattcacttcctacagttgtataccaatcaacttcaacatctataatcactatccaaatgacccagaagattgagaaacaagaaaatgattgcttacaaaactattgaacttctcaacagctttctctgcttcttcaactgtactcattgttacaaacccaaatccacgactttgatcagtgtccctattgtatataacctgcaaaaaccagatttcaaagcagacccatgaaacataatcattcctttaagccaaataaactataaaaccagatttcaaagcagacccatgaaacacaatcattccttcaagacaaatcaaactatgaattcgaaacactaaactaactttctcaagaagtaacaatgccacagaaaaatttagttccaattttctcaaccatttggattcaaatgtcaaaaagcacaaattagcaatatatacctctgaaatctcaacagtaccagcttgttcaaagagcatagctaaagcttgactatcaacatcgtacggcaagtttccgacgaataatttagcctcttccggtggctccgggaatccaacaccgtcttcagactcgaaactctcatctacagtgactgaagtacctccgatgcttccatcctcaccttcttcttcctcagcccaattcgaagtttgggaaacgaaagtaacaacaggagatgagttacgaagagttttggatttgagagagagtgtgagattaacgggtcgtgaggataaggaaaaattgaagcggtgagattcagaggacgagatgttgaagatagaaggaatacaaaaaagggtcgaagaggaagaattcgtcatagctaaaagctttaagcttggggttagtactgaagaagtcatttttctgattttggagagattacaggtgaagaggaagaagagtgagataaaaataaaaaaatgttataatctgattagactaaagtttagtctaatatcttatataaacagtaatctattattgggccttacttgacccaataggcttttatatttccttattcacaccgacctactccaccaaaattaagactatatagtacacaaagagccgtttctagcaagatttctttcctcggccttatcgcgtcgaattcaagccggcgaacgaatacatttatttttctgaaacaagatggattatcggttacagattttagaagcaaacgcaattcatgacactgcatcctctttgtagtgatgtgatgtgcgtgttagctgtgtgtgtccgcgtttatcttttttttttttgttacttttctcctaacttagttgttattacgtgcttttcccaatatcaagttaaatcacacacacttcccaccaccttccttcattttctttccgaaatttagcattttagtcctcttttgacaaatagtatcttctttcttaaatttaagatctttctttagtctttagacaacagttattgtaatgtcttttagttgaatgacataagttaggccaaaataatttgagttcaattttcaaaagcgttgatgaaagctaaaaccaatgactaaaaatgacatctaatcggctcctgaaaaccataatcagatatcatatgacaaatactaaaccaaaatttttacctttcaaataaaataatatttgcagatagatttaaaatagtaaaggttattgaaaaaaaaatacaatagaaaaacataatattacctaatatttattacattttaaaagatatatagaaaaacaaaatcttagtttcgacgatggaatttttttttttatatagaacatcacataccaaataactttagttctcttattgtgaaaacaatggaagaaattgactttttaaaaataattttgaaattgatttctttgttcacataccaaacaacttcgttttattatcgtgaaaaaaagataacgtaaatggttagccacacatgcacggcttttccaaattatcataaggatccatatttgtaaaagaaaaaaatacataatccacataattaatcatagtgaggttacatgaataacagagttcctagctagtaaagataaattgttgcgtacaagttgtgctttgattaattatcactatacgtgcttcatataaaaatgtcattttacacttatatatattaagtcatctcatcgccgactatttcccaaaatcatcaattattgttaccaagaataagaaaagtaaaatgagagagcttgcttgcgccattaaatcaacataaagttcaattatagtttgaaatctttatgaatctccattaattaatgtatccatgtcactaaccttgaaatctttgttgaatcccacaagtaatcctttaaccccttttggtacttttcattacatatcgtcatcacaataacctctcaccaatgtatctataatccctatataaacactttctctttagtcctgattaccatcaacaaactcaatcacaatcacaagtaaatacaaaaatcaccatagaaaaatatgaagcgatttattgttcttgcgctttgcatgcttatggttcttgaaaccacaaagggtttagatttccataacaaagatgtggaatcagagaatagcttgtgggagctatacgaacggtggaggagtcaccacactgttgctaggagccttgaagagaaagctaagaggttcaacgtgttcaagcacaacgtgaagcacatccatgagaccaacaagaaggataaatcttacaagctcaagctaaacaagtttggtgacatgactagtgaagaatttaggagaacatacgctggttcaaacatcaaacatcataggatgtttcaaggcgaaaaaaaggccacaaagagcttcatgtatgcaaatgtaaatactctcccaacctccgttgattggagaaagaatggagccgtcactcctgtcaaaaaccaaggccaatgcggtaaaactcttcttttcattgatccttcaatctaaaagatatatggaaaatgagaattaacacagatttggtttgtggttattacagggagttgttgggcgttttcaacagttgttgcggtggaagggatcaaccaaataagaactaaaaagctgacatcactctcagagcaagagctagtagattgtgatacaaaccagaaccaaggatgcaatggaggtctaatggaccttgcttttgagttcatcaaggagaaaggaggactcacaagtgagctagtgtacccttacaaggcttctgatgaaacttgtgacacaaacaaagaaaatgctccggtagtttcaatcgatggacacgaagatgttcctaagaacagcgaggatgatctaatgaaagctgttgctaatcagcctgtttctgttgctattgatgctggaggctcagactttcaattctactccgaggtaagaactcacaacacatatactaattaagttcaagaacttattaaaaacattttttgtcttaacgcatgcaatggtgtcatagggagtgtttaccgggagatgcggaacagagctaaaccatggagttgcggtagtagggtatggaacaacgatagacggaacaaagtattggattgttaagaattcatggggagaggaatggggagagaaaggatacataagaatgcagagagggattcgtcataaagaaggactttgtggtattgcaatggaagcttcttatcctctcaagaactccaacactaacccttctagactttccttggactcgcttaaggatgaactctaaattaaatctctttatattaagattaaatagacattgacaagtttgtttatgatgattgttttttttttaaatatatttctttttcattaataggttatggttttcaatgtatgaagttgatgggaatcgtttgaattcgttaaatgaataaataaatggttttatgtagtatatttccaatactaaccaatgcgacttcaaacgagttaattagcttcttcttttttttgggtaaaagaagcgtaatgaagagtcatttgattctctcagtggaagttgaaacgatcaaagaattttggaaaattgcaccgctcacatcaattatttaaagaggattttgtggcagtaacaaataatatgttctttttctccgttggacgagaagggtttcaggtctttgccccattctttgaatttgtaagattatcagtctcacttgtttgattccgaagtagttactttaagaatattctttcttggttaaagatgagttggatttcgttttcgtccatttctattttatgggttctatatctcactatggttttgcttacctttcgctgttgctatgccttatttgtttggttcgattttttgatgtttcaggcttagtataaatctcttatggataggataagtgggctgcctgatgagctactcttgagagtattgtcgttactacctaatgtgaaagatgttgttgtcacaatggttttgtctaaacgatggcagtttctttggatgatggtgccaaaacttgtttatgatgatagctatcagaatctcgagtatggaaagttttcacggtttgttgacagatctttgtttatgcgaaaggctccaggtatagaaactttgcatttcaaactaggtcaaaactgtggtaatggagatattcaatggtggattagagctgctagtaaattttgttttcgtgagctgatcatcgaaatcaactgctctactagtgcatctccatccatacttccaaggagtttgtacacagagtgtagaatgcttgtgacgctgaaactaaaaaaagcggttcttgtagatgtttcttcaccgacgtgttttccatccctcaaaaatttgagccttgtatctgtgaagtaccctggtaatgaatttgtcaagagtcttttatcaagttgtcatgttcttgaagacttggttgtggaacaatgtataaatgataatgtgactatcttctccgttaaagttccttctctaaagagtttagtcttgcgtacatcaaaagagagagctccagatggggaaagtgggtttgtggtagaggccccttctttggaatacttggacattgatcaaacgggtgggttttgtgtcattgagaatggaatgcctaatcttgctgaggcatatgttagtgttcttcaccatcatccagtgaagttcctgagttctattacttcagtcaagcgtctctatttatgtttattaccacacaggtaaataataatctgtttaactttactttgtttctatcatttaccgcactaacattgtttattcagtattctgtcttgtatgcaggatatgtatcctattagatgtgtcttccaccgtcttgtacatatcacgctatgcacttgtgacgatgagtggttgaatctacttgcgtgtcttctcaaaggttcccctaaactaatatctctcaaacttgaaaaggtacatatatatattccatcccaattattagatcagtgtctttgatcaggttattttccaattcattcagtgtcttatgtaccgtttatctcagcaccatggccatttgatttgttcaccaagccctttacgggatgatctgagttcagttcctgaatgtgttttatcgagtcttgaaaccgttgaatgggttgactatgaaggaacagaagcagagagacaactggtagagtttatcttgagaaacggaagctgtttaaaaaagttcgttatctcccccgaatccgttaatcccgacaaaaaatatgagatgatttaggagctgacgttgtcgtgtaggcgttcacccacctgtcagcttgcattcgactaaagtcagacatgttcaatagtgaacttgcattttgtttgttagtctttgatattatatggtctttgcttatcgttttgtatcttcactctcttgacatctctctttattaggctaggatttgaggttaaactttcattttctttgaatctttcactaactgggcttctctactgctacttacttatagatgggtttcaactttcaagttaaataccaaacctaattataactttaaagtttgtctcacgtcttttgctcttaaattgtgaattttgagcctttagcttcgctagaaagtggaagctgagccatgtccatggcgtcttcttctcttgcgacccaatcctttttttcttcctttcctctatctcaccgacttcacttccctgtaccttatcttcttcttcgttcttctttctttcgaaaaccacttagtctctctgctacttccccttcgtcatcttcttcttctccttccattttcctctcctgcttcgatgacgctttgccagataagatccaacaaccagaaaattcgacaatcaatagcgaagaaagtgaatgtgaagaagaagatgatgaagaaggagatgatttcacagacccaattcttaaattcttcaagtcacgaactttaacatcagaatcaactgcagacccagctcgagaatccaaattctccctccagaagaatcgtcgaacttcctggcatttagctccagacttcgctgaccccgaaactgaaatcgagtctaagcctgaggaatccgtctttgtgacaaaccaacaaacacttggtgtgcatattccattcgaaagtggcgtcgctagggaaatcttggaacttgctaagaatttgaaagagaatcaaactttgggagagatgttatcaggtttcgaaagaagggttagtgatacagagtgtgtagaggcattagtgatgatgggtgaatctggttttgtgaagagttgtctatatttctatgagtggatgagtttacaagaaccttcccttgcttcgcctcgtgcttgctctgtgttgtttacattgctcggtagagaaagaatggctgattacattctgcttctgctaagtaatttaccagataaggaagagtttagagatgttcgtctctacaatgccgccatttctggtctctcagcttctcaaaggtatcatctttttcctctttgcacgatgattcagttctaaagaatgaaaagttgtagtttttggtcaaattgtgtagttggtgatcttttgttaggtatgatgatgcttgggaagtgtatgaagctatggataagatcaatgtgtatccggacaatgttacatgtgctatattgatcacaaccttgaggaaagcaggacgaagtgcgaaagaagtttgggagatattcgagaagatgagtgagaaaggtgtgaagtggagtcaggatgttttcggtggccttgtgaagtcgttttgtgatgaagggcttaaagaagaagctcttgtgattcaaacagagatggagaagaaaggtatccgttcaaacacgattgtgtataatacgttgatggatgcttacaacaaatccaaccacatagaagaagtggaaggtctttttactgaaatgagagataaaggcttgaagccttcggctgcaacttataacattcttatggatgcttatgctagaaggatgcagcctgatatcgttgagacacttctgcgggagatggaggatttaggtttagagccaaatgtgaaatcgtacacgtgtttgattagtgcgtatgggaggacgaagaagatgagtgatatggctgctgatgctttcctgcggatgaagaaagtaggtttgaaaccttcttcacattcttacacagctcttattcatgcttactcggttagcgggtggcacgaaaaagcttatgcttcctttgaagagatgtgtaaggaggggattaaaccgtcggttgaaacatacacatcagttcttgatgcattcagacgatcaggcgacactggaaagctgatggaaatttggaaactaatgctgagagaaaaaatcaaagggacacggataacatataacactcttctcgatgggtttgccaagcaaggactctacattgaagcaagggatgttgtatctgagtttagtaaaatgggtttgcagccgagtgtcatgacttacaatatgctgatgaatgcatacgcacggggaggacaagatgcaaaactgccgcaactgttgaaggaaatggctgctcttaacttaaaacctgattccatcacatattcaacaatgatctacgcgtttgttcgtgttcgagacttcaaaagggcattcttttaccacaagatgatggttaaaagcgggcaagtaccagacccaaggtcctatgagaaacttagggcgattctggaagacaaggcaaagacaaagaacagaaaggataagactgccatacttggtataattaatagcaaattcggtcgggttaaagctaagacgaaggggaagaaagatgagttttggaagtacaagacgaatcgaactacttctcctggtcgtcaccgatcttgaaggtagcctaaaagctatataaatgctttagtggtacatagtgaggattctcaagctatacgaatctagttgtattcaatatatgttcctctgttctttgtacttatagccttatttattagcattctaattttttatgttcctaggacataccttggtcatgtgtagtaaaaagtgcaaaagtttagctttattattccgacaagcgaagtatctcttaagtagcaagcaatctttagatataactcttagctctctgcatcaaagatcacacacatcactctcttgtaaacaacccaaataaagaaaatgaaaatcttgatcttgattctatcctttgtgacactctttgagatttgcgttgtggacgcatgtcgatcatactgtggaaacataaccgttgattatccgtttgggatccgaaacggatgtgggcatccagggtatagagatctattgttttgtatgaacgatgtgttgatgtttcacataagttcaggttcttatagagttttggacatcgattacgcatatcagtccataacactgcatgatcctcacatgtcgaactgcgaaaccatcgtgctcggtggcaaaggcaatggctttgaagctgaggattggagaactccatatttcaatcctacctcagataatgtctttatgttgatcggatgttctcctaaatctcctatatttcaaggttagtaagttactacaacaatatttcaaaaaaaaatcaacttaaagattaaattttgatttatttacattctgtaggccacacaacttttcaaattttagtttgcatttttcaaatccggtttacaatttgagttctattttttttttttttgggtttggttcatagaaaactagaagtaaaaaaaaaaatctaatctgtttgatttgatgaaattttggtttgattcgcttttgttttgaataatttcagatattagtaaattattagtacatgaattattatgaatttatgattacatatattatgattcacagataattaaaatttactttttctttttcaaaaaatctgttttttttttgtagttttaataatagcaaaattcattttggtcattaggttgttaagaaactaaaaccaagccgtttttaaacacatttggatttctgttccggttaaattcggttaataatccggttacatttggttaataggcttcccggaaaagaaagtgccgtgccgcaacatctctggaatgagctgcgaagaatacatgtcatgtccagcttgggacatggtcggatacagacaaccgggtatacattccgggtcaggtccacccatgtgttgtggggtcgggttcgaatccgtaaaagcgattaatctaagtaagttggagtgtgaaggatacagtagtgcgtataatctagcacccttgaaacttagaggaccctctgattgggcttatgggatacgtgttaagtatgaactccaaggaagtgatgcgttttgtcgtgcgtgtgttgcaacttctgggacttgtggctatgaacctgctgatggtggagggcttagacatgtttgcatgtgtgacaaccataattccactacaaactgtgattcaggtcagttttgaattatcagatttttttagttaaaagttgatttgtgttttatcaattatataaatcaaatatgaacctaaaccttaaccatataacttatgcattatataagtgtttttgttttgttactttattcgtaaaaatattcccgaaaaagtcgaaccaagactagattgatcatataatcatcgcagtttaagagtaaacatagtaaaatgcacatgcatatatgttatttcaccttcttttttttcgtttttttttcgtttttgacctaaaatgttattaaattaaggttttttggtatttcgtatatgagtttataatattcaacaaataacgttggaccggctctagcaccgagtggtccgaaattgaagcgagtcaccacaattttgtgtaaattggtcatacaaataggtcaagtggttcaagaccttaattgatcatgtaagatgtgctggttggtccaatggaccaaacggtttagtgtttagaacaatttttctgaccaattgattcactcgaaattgttcataatttcaattaaaagttgatgatttttttggtttatgtagttatatcaccaaccggtgcatcatcaagtgttcgaccaaaagctatcggatgtaagtttcaaaatgcatttacgtgtactctagtttttgtacagatttatttgactttaaccgtacctaaattactaccctttttttttgttgcagcactgatcatctacttcatagctatgaacataggctttcagagaagacagcgatgagttacccttcttttttttcagagaagacaatgatgagttacccattgttaatgaaaatcgaactaagactccaatttcttctacttccacaatgttttgagttacctatatacaatgatccatttgatgagttagggcggtttacggatgaagatctaacaaatgtaatggcaaacatggacatggcttgatgtcgatgaaactaagttgttgcacgaacttgatctttcaataactaattgtggccccaacgaggagtttgatgggctgtcttctatcaatgatgggtttaccatcttgagacatgttcaaaccatcgaatgatgatctaaatgaaaacatcagcaatgagtgattaaaaaatctagttcatgcaacaacttagtttcatcagcaaccattggtaatgtagtaaagacatgaggaggcaagttttcgagaaatgtcatgtccatcaaattgggattaggggttgccatgacatttgataggtcttcatccgtaaatcgcccaactcatcaaattgattattgtacaaatcttcaccttctgtcaagggatgatcatcatacagatttatgtggatgacattgtctttggtgacccgttgacttgcacacatgtcagactccttggtatgtgtttcaagagtggatgattgcaccagagcgaggttgcatagatttgtactagttgacacaccctgcaaaacaattaaatttccatcaaattactcattttcttaagttaagtaaattggaaacaattcaatacatgtagagtgtcacacaagaaatcaagtgatctagtatttctctctctctctttggtaaacccgtcgttgataaaagacagctcatcgacctcttcgttggtgctgtaattagtgattaaatgttggtgctgtaattagtgattaaaagatcaagttctgaaacaacttattctaaacagaaaaagaaaaagctgtgtaaacaaagaaggatcacatacatagagaattctgacgacgaaagaattttttttcatactctatagctgatcgtgacattgacgttcattttaaaaaaattcttttttgtataagtgatctcattggtgagttgaaaaatagaaaaaaaaagtagaaaaaaaaaaagattgatttcatgttcatgtatatggtttcggcaagataaatcatctaaaaatagatgccacgtataatatttcacctatatagatgaaaatatttactggtttattaataattataaaaagtcatagtatatgcgtatagaaaaaacaatttggggtagatatgtcatatgtgtaatataacgaaaggaaaagttactatttataacaaatgagtttaggttactaagtttagtggggcatgatattatttcgtacttcaaacgttattaattcataagttattaggattttagtggagttgacttattcaattagtgaaagaaaacgttacataattttaagtagtcttaatacatgattttactttaaatttattatattaattgtgctttgatgagaggactgaactgtttaaacgtatttatttgaatatacgttttccttgcatttaaacttgtagtaatgaatgtttataaaaatttcataaaggtatagttatatatttaaaccattccatttcccatctaagaaatggttttcattatgatcatttgattttttttgtaccttaaatgaagaaaaaccaatcaaataattcgtaggaaaaatagatgtatcaattatgtgacagtaaatagataaatattttggcaaacaaattagatacaaatttagatttgaaaatacatgcaaattgactatcaattaaaatgtatgaaacatgtgtaacgtatatttctcaagtaaataaaaatttggtaaaacaaattagataaaattttagatttgaaaataagaggatatattttgtgggatttttgtaggaattaatatttcgtaaaaacgaaactcgtaggaatcgtataggaaatcaatcctaaaaatttggtagaatttgaccatattttcttatagtatacatctcaagtgtaccaatagggtaaacgaaatatgattttcttggaactaatattgacataaaattgtataactaatgatttaaaacaaaagaagagaaacaaagtggaaatgaaagaccaaaaagtagatttacaaacttgaatcatgttaatttaaatattcttaacaccaatttgcaatttctgaaggactcagaagtctttgattgacatatatgctacaaacaaaagaagcatttagttgaaacaatagaaccctacaaagtagaaacaatgcatgcacaagcagccaagaaattatcaaacacacgttcatggcagctgatgcatccaatgttacttcactactctctcctacgcaaactaaaccaaaacaacaagaaagtaaaagaaagagaaaaaaaaacaccgagagcattcatgacgggtctttgcatggtcatccaacgaccgaccatgtgaaaaattccaccagttccggtacacactcacacaccactaaaaccagttttgtgacatcggttatcgttaataatcaaacgatctcgacggtagcgacggaagaaacttgattatgctctctcataacccgttttctaaccccgttaagccattttgcaactcccaaaacgacatcgtacatgcttaatgcaagatatataccaataccagcaataatcccattagcaatggaataagtcaacggcataagcaagatcgttacaaatgctgtcacggcttctttagtctctccccatctaatatcttttacaactcccatcatcatcacaccaaccatcaccaacgacggtccaaccgcccacctcggcacgttagtaactaacggcgtaaaaaacattgacgccaagaaatacaaccctacgataacggccgttagccccgttttccctccttctttcaaccccgccgaagactccacaaaagtcgccgtcgttgtaacacctaacgccgatcccaccacggaggagccggcgtctactaagtacgccgcgtactctccttcaaacttcccatcttccacgaatcctccgatctcagccattgtgtagagtactccggtcgtaccaagaaggtcaacgtagaagagtgtagcgaacgcgacccaaacctcgctctttctaaactccgtgaagcttatggctcctaaagttgactggatcttgtgaaagtcaacgatttttgtgaagtagttgtagtttgagtctccaagaggagtgtgtggaaagattgtgacttgagtgcctctaatccaagaaatagccgtgacgaacacgattccgtaaatcatactacctttgacgttcttcattagaccgaaactcgttataagaaacccgacaacggctaaccaaaacgtaggactcttcattttacctcctaagcaagctccagtgacaggatccgtctctgcgcaggcggttaatgtcactagagttgacttatccggtcccacgaggccaatgccctggttcatttgtaaacctacaaaggcaatgaacattcctataccgaccgcgcaggccagtctcaccgtttgagggatgagacgagcaagtttcccgcggagtcctaaagccgacacagcgagaaaggcacatccttcaaggagcacaatggccatagcggtatgataagagatagaaccggatccacgaaacccgacaacgttgtatgcgatgtaagcgttggctcccatacccggagcaagtccaaaagggagattagctaacaaacccattgctaatgaacccaccatggctgataaagaagtagccacaacgaggtcctttttaaccctagaaatacattgttcgtagccagggttagacccgaggacgcattctggaccgggtggtgaagaactggccacggtggaacagtcgttgatggagcaagtggcaccggagtcggctaagatattggcgttcacggtaatgatataagccatggtgaggaatgtggcggtcgcagctcgtagttcagttgtgaacgttgtttttcttgcttcgagcttgaagaaacggccgatgaagctcttggaaacggtgtcgtttaagtgtttcttcatgtcgctccacgacttgcataacgtcttctctcttcccatgactaataataatgaggaatatagggagcaaatgcaggaggaggatgtcatgcatatatacttaatgatataaatacacagaattatgtgaacacaaactaaaatatacaaagttgacaaaaaagaaactcaaatatgatcaaattgcaaagaaaacaaatatatttctctattcgactaagacaaatttaatacaaaaagcttcacaaccacgtgatactctcttgtatctatggaagaaaatcaaaatatctaagcctattttgaccgaaattttatgatttgaaaattgttactttttcgggttacaatagataaaggaccaaacaagtcattgtctaagaagcttggcattggcttcgaatcaaaccatattttttttgtttttttcggtgaacttggcaaaccagaattaaaaagaatataaaaaaaaaggaacaaacacatatagcattttcaaaatattttgcaaactataatatacatatatatatatatatatatgagaataatcttcttttaagataaagtaagaatcatctatctttgatatatagatattttgtcttcaccaaaagacatgtaaatagttttatgtattaaatgttggtataaaataaccttggcttgaaaaaagtattttaatttaatgactatatatttatatttatttgctaataacttcactggtgtaaggataaaaaactaactcttccccttttcttttctttttgtaactaaactttacccatctattgtaactgtttcaagtcaaagctcttttttttttcctttcataaaagattttggtcttcaaatttctctgcattaatgctttttctaactccataaaattgtctggtatcaaagaaagtatgcattggatataaaatattttagtaaagaatcttcggggtgatataccatcctctttccggatgaattggagtgccataaactagaaaatccaactagtgttattctccttgacctcacctagttggacatcctatgtagtatctacttgtgagttgacctaatgttgcatattcaattcacagattgtcttagtttatgcaagagtccggaagttaatttggttgttaaaaatggcgattttattagttcagcaagagcttacatgattcttagaagccattctatattttagtcctaaaattactaaatgatgttcgatcctccactgaagtgaaatattattacgtaacattagagtatatttatctttcgtctcctactcttaatgttaattcctaaaacattgatacccgtatataagcttaaatgatttatttttttgattatcacta

SEQ ID NO: 869 - DNA, 80115 bp, Arabidopsis thaliana
gatcatattattagtgtggttcagtcaagttctctttgtgtttcacatctcaaataaatgagtaattcccttaaatttttttcatctgcaaatcaccaagtatgaagatttatcttccgttgtctatttaaaggacatgttaaaaagacagtatatacttgtatttatttaatcataacatttgctttctagcattcttaattatctaattagctagattcctcaataatatttataaatctttatgtaagaaatttttaccacatcgttgaaaatcaaaccctactttttatgctatttcttgtacgatactagatagctggacaaaccctcgtagagatgtttcatatatagcaagttgtgatacaaaaagagctaaaaccataatggatcattagcacttagttgacaacgtgaatcgattattgtctaattgatgtaatataattggtaagactttctttcataaattttagttttcctatatagatatttaatagaatagttgaaataagcgtagctgttaatagataaaacctactatatgatatacagaatttgaaacaactttgtctaatacaatattgatttcctcggaactgatcttagcttattatatacatgcacaaaaagctaaattaatcattaagccacaatactccacatgcacttggtttttgtcccagaaacttttttcgtcctcgcagctcgtgagattccatcggttgaatttcacaatctgtaaattatagtttattaaaagagaaatatacttagatttttttgtccttctatattaacttataaccctatatatgttctttcaacaaaaagataaagtggcacataggcctgctcttattttatgcagttaagcgtaaggaagtttgtgccatagccttctgcttataattgtcgaataacactgaggcttgttaattttacaaaaacaaaaaacaaaaaaaaaacaaaataggtttatggtaagaaaaaaaatgttgatggttttctacagctcaaataaatacatatatttaagattttagcatagttgtataatgttgattcagtgaaagtaacaatcattgtcgaaaatagtaccatatatcatcgattaaaaaagaatcaagtaacaataatactactaattatattttcttcttttttgccaaatggaaataatactaatcatatattctgtacaaatttaatattggaaaattgcatatcgttcctattaatataaactttctcattgtaagagtatacgtcaaactattccatgaaagtaattcaaagtatagatgaatctataattctatatatatttaataatgaagatatataatataacaattgccatgcgtatgtgtattatgttataataagagcagtgtatattttagtttcactaagacctagactaagaagagctgggttacccttttaagaaaaagtaatttggaaaagaaaaacattaacatataaaataacctttgtgcagaaaggatatcaaagaataatataattgtgattttgtttttttgttataagaaatttttgaaagggacatcatatattattcaaagtttatggccaaggacaaccatgtgtcactaatatggagtaatctactgtatttaatttatcctcaaaaaagcttcgttatttgaactatgaactcgtagacccgcataaatagatgaaaaagctttgtcttgaatcttttgacgatgagatttaaagtaaaggttcagcaaaccaaaaatagatgaaaattcgggtgaaactagatgattgttgagcataaaattgttaaggcatgagattccgtttttttttttggtaaaaggcatgagattcagttctttcaaagttcagtcttatggaagaactttggtcactaaatattgcttcacataaaaaatttggtcacgaaatattgccacacatgagtttcgaaatcttgcatctgctttattttcacttgttttctctttttatttatctttgttgtaacattttaaaagatactatatttggggatgatgaataaaaagagttttttttgttttttgtaaaaaagttcagtatactgtatgtctctacgattagatttatttacaaactttatggacatttgaacaaacaaaaataaaataaataaaatggatcataatatattgtggtatatagttatatggtgtaatggatttttgagtcgacattaataaattttataatatcattaatctaccgcttcaatacggattgaatttttattttattattttctaacattaccaaattctaattacggtcttttcttcttcgatgtttatatttcatttgattgtcatccccgaacaaaatttattttatatcattcaccaatttttcaattcgtccccaaatacttgtcttctccctacatattgtattttagctaaaccaaacatgctacaacagctgaaagcaaaaccatctttttatatcacaataccaattaccacattcacaaatgaaaaagaattatgagttatggtaaaaatgacttttttgtgtagaaaatggtaaaattgaccaaatttccttatataaaaatgtccaataatattatattaggaacaactaagggaggttgtaaattccaaggagacataaaagaaatgcactgcttttaaacaaaactcagtatttactctaatcgaaagatcgttcttgtatatgtgacaaagatatgcttccctgcgtaacatgtcgtttcaaagaatcaaatttcagctttcaatggatgaactttcattcaccttcaatgttcaaatcgatctcctttagttcaccaagatctagtcaaaataatgttttcctagttgacaatatcgctatatattaatttctccacaaatcatacccgaataggaagatcaacaagttataatttttaccaaaaaatgaaaaaaaaaaagatcaacaacgttttgtaatataaaaactaattccaaatttagtttatacaaacaattatttgttatttacaagtttttaatacaatgaatcataaaaaatagctcattaagtgtatatatgtatagaaatatatacattcataaatgtacaaatgtatatttatacacacatttttattcgtccatcttattaagtgaaccaatgcatattaaaatatacacattttttattttgtataaatttttattaagagttggcaataacacatctattcaccaattagcacaaattgaaggatttagttcttattgatttgtttcattttatatattactttgctataatttacaagcttttttgatgatatgaaagtatatgtaaaggaacaaaaattagaagagccatacatcatttttctgtgaaatatacaaggcgtatggtatggtacaaaatggagtatttgactactgtagcattttgagtttttttgttttaagttctaatctatgcgaatatatttggttctttcaattaattttggtgttaaagatatttgtttatttagatagtctaaatcatatataaacgatgaatttttagaagtttttttttaaacaaacaacaaatccaatttaaataacaacgtaagatagtgcactagaagtgcagtcttcttgatattacatgactattataattcaactaagcttttatttttgtccattacttagttacatcattgagaataatgaagatgaagtctaattaaggacaacctagaggatgcgcttatctcaaatcatttatttcaaaagaaatgaatatttacttcgtataattagagagccaataaaaaaaacataaagagtttgttgctcataatctcaacaacatcgaagacgaaactgaaccacctcttcacatcaaaaacacattttcttaaaaatctctcgactgtttcgtcaaattcttctgaagtctctgacaatggttttcgtccggttaagctttaactagataagctttatatgacccttgaaaagtcacctaagtcatcttccccttcttttccttgagaatctgaaaaaactttttgaagaattattcgattccttccttcttatctgatcctatccatatccaaactattacttttcaaaaacactctagatttatcgtttttcaaccccttatattcgttgaaatctgagaagttgatctcccaagttttcgcaattcccctctagataatgactttatagccattaatctcggagttttgatagatcatttatcacagatccgagcgtgggctcaatctgatattgtttgtggtgtgtgtgatcttgaaaattgaacttatggatgtagaagaaaaaaaaatatgtaattgtaaaattcccaatttggcgattgtgaaaatgtgcaatttggccataatttaggaaaacgatcaaaatcagtccaaataatttgttaaatacttttttaacccaaattgtggtattttcaaataaccaacttgaaccatataagcgttagccgaattctacatcgacctttgttagtaactatcaaacgatgttgagtcaaatgacaccataacgaacaaagtatagtttgactcatcacaatttaattggtttactaacaccatgaaggtcgatgtagaaatcgactaccgatgatatgattcaggttgctactttaaaacttttacttgttcacgttcataaatacatgctatcatagtttgagttaggaaaagtattatgcaaattgttgggttgattttgaccgttttatacataattctagcattgagaataaatgcctataagtttgtacgaatctctttttctttctctataatgaattttgatttgaagttgaaatcctaacataactacaaaatatcgcaaaactatcatgagttaaaagcaccgttgtaaactttttcctaacacttcacttttaaatctccattgtgagattaagaataagaaaaagaagagacaaatgggccttcaattttccctccataatataagaaatgggcctggcctggtatattcatcttcttcctctaccttcggtagagaactgtagacagaacaagggctagtttcattgtaaacgctaatcttcgctctcagcctccaaacacacatcaaacatggggaagaagacgaagaagcctggtaaaggaaaggagaaaactgagagaaaaaccgccaaagcggatgagaagaaagctcgtcgagagggcaaaaagctttctcctgaagatgacatcgatgccattctcgtaattactctctccctcagattctgtattggtttaagcttaggaatcagtgttttgggttctgctctgttcatagttttatggagtatagtgattaaaagaaacttcttttagtataataattgtaacaacaacaacaacaaaaagttgatatttttctatcatttggatagagctggtggcagaatttaggggtctctaatatttgatgttgtttaccagttgaatattcagaaggaggaggctaagaagaaagaggtccatgttgaggaaaatgtggcagcaccatctcctaggtcaaactgttcggttaggctcttacttttttctttttcttaaaggttgaaactttcttgatctaaagctattgaattttgccaaatctgggctgattgatggacatttatgcagctcactataaatcctttgaaagagactgagttgatactctatggcggtgaattttataatggccagaaggttagctttgcacaatcttttttcttcagagttttgattttctttgttaaggagtgtttgattatatagtcatatgataatgattggtttccatgtaaatgcagacatatgtatatggtgatctctaccgatatgatgtagagaagcaggagtggaagttagtttcaagccccaatagtccacctcctcgcagctctcatcaagcagttgcttggaagaattatctctacatatttggtagatgaaaagatctttagttattttcttgcattttcattcctttcgagacatatttgtaagtttcttttttttgttgattaggtggtgaatttacatctccgaatcaagagcgtttccatcactacaaggtgagtagtatatttctgtgtgttagccagtccagtccattagtttttttatttctcatttttttttttatcttggggttggtttaatttataggacttttggatgctggacgtgaaaactaaccaatgggagcagttgaatttgaagggatgtcctagtccacgttctggtcatcgtatggtaagtctttgatgtaccctgagttcctgaccaatgtgccttagaactaaaaaatgtatgtcgctaacatgctactggattaagtagatagagtctgactttccatatactattcttcctctagctgatacacaagtggtgactttggcagtttattaatcaatgaccaagcacagagactaatagcagatatttaagatgatagagattatatcttcacatgttttcttgtatttcgtacatcaaggtgtgaatctggaaggttctcctttatgtgctgcttaattttcaatctatcttctgtgatgaatatatgattctgcattctgctatactgagctgtcttcgtagtggagttgtactactttcattatcaatctgttcctgccttcccttttgtaaccaactcatcaagttctcatcctgctctgctataatctactttttcaggtattatacaagcacaagatcataatttttggtggcttctatgatactctacgtgaagtaaggtagtaatttactcatttcgttagaagtatatcaggatcttaatgttaccttttcgttggtagttttttctcccttttatcattccctagatgtttaattatttccgatgtctgatatattcttttatagtgaagtaatcaagtttaataaatgggattagaaaatgtaaaccttttctagtagctgcaactgaattaggagattaatgtgattgaacaaacattttctctaagctttaatttgatgtaacatttttataagttaatttctgccatccactactcgtttgcaggtattacaatgatctctatgtgtttgacctggaccaatacaaggtaaacctacattccattgaagtttccacccatttcaattcctagctctccagaactttctataccttttagtgaatatatttggtgtttatttgatagtggcaagaaataaaacctaagcctggtgccatgtggcctacagctagaagtggcttccagttttttgtttatcaagatgaggttagtttacaatgcacatgtctatatcatattctttaagtccaagcataaccatttacttataggaaagccttttatgctgcagatattcttatatggtggttattcaaaagaagtctcatccgagaagagctctgagaaaggaattgttcatgcagatttgtggtctcttgatcccaggacttgggaatggaacaaagtatgtaattctagatggcatcacttttaattatacttcttgtactgttttcatgataatactagtatcaccgggagagtaatacccacacttagttcatatatgttttgccatttttatcaattagaaatcttaacaacccagttgatttaacaattttctttctttgtaatgtaataatactttctgtactcaggtgaagaaaattgggatgccacctagctcccgtgccggattttcggtatgtgtccacaaaaagcgtgctttgctgtttgggggtgtcgtggacatggaaatggaaggtcaggaaatggtatactagtatcatttttgtttatcagaatctgtaagctgaattattgacatctgtaattttttggcaggtgatgtaatgatgagtttattcttaaatgaactctatggcttccagttagataatcgtcgctggtaagaatccaatgttattatgagtattgacactatgaagtttcttctccaacgtactttttgtttattcctggaggttgtagaaattatagctatcttaagatgcttggttttttaaaatgtgagtttttcattttgtatcactcactctcagtttctgtggagtacaggtacccaatagagttacgaaaagaaaaatcatcaaaagataaggtatgactacacctactatagtttttgctgcgtactgtaattacctgtaacagaaaaaaaggctgtttttcttttgcatgcattgttcaacttttatcccgtaggatgagccttatggtttaagacgtttcaaatgagtagaaaacttctcttcgttgtttacaggcgaagaagactttggaggcaaaacctgtggcatctaataatgatgatgagatggattcaacagaagaagatgaatcattggccatgattgagcaaactgatggagtaggctcctcggatgggatatctgaacgtatggcaacaaatctaactgttgatggaaataggtctgataaaagtaaggctctacagggagcaaaaactagactagatccacaagtttcggtctcagaggaggtttgttttggcaaaattcattaacattgtgtaatttcctttactagctttggtgttatcttgttaatcgttgcaattatttccttgcaggttgtaaaaccatgtggacgtattaattcctgtatggtcgttgggaaggataccttatacatatatggtggcatgatggagataaaagataaagaagttactcttgatgatttgtattcgcttaatcttagcaaacttgacgagtggaagtgtatcattccggtttgtttgacaccaatctccatttttctgtcttttgatatcagttgataaaatattgtgtagacaataagtttctgggtatgtctttacaacagacgactgaaactgagtgggtagaagtctcagatgacgaagaaggggacgaagacgacgatgaagatgatagtgaagatgaaggaaacagtgaagagtctgatgatgaagatgacgatgaagaagtagaggtactatatggtcttacctttctcttaacttctttgaatctggagctagctatggctatatttgacttaatttggttatgttaaatctaggcaatggatgttgatggatcagtgaaagtgggagttgttgttgcaatgataaaaggacaaggaaaatctctccgaagaaaagagaaacgagctcggattgaacagattagagctaatctaggactttcagattcacagagaaccccagtggtaagattgtcttcgccatttccttttattctgttgtctgagaaggagattctgtttgaagctcaactaatttggtcatgttgttgtctttgaagcctggagaaactttgaaggatttctataagcgcacaaatatgtactggcaaatggctgcctacgagcatacccaacatactggcaaggtatgcttaatctgtgtgtttcaatcaagcatataatgactcatatttgtagcaactttgttctgtccttggcatgatatgattcacatgttggcattgtaggagctgcgaaaggatggttttgatcttgcagaaactcggtatcttgaactcaaacccattctagatgaggtaagcttgtaccacaatttagtctctccttctcttctctctcgatactctaatagtgttaaaactggcccggacataataatggttgaatgtaatctgcagttggcaatacttgaggccgagcaaaaggctgaagaagcagaaggacctgaagctagtagtagctctagaaaaggaggtattgcaaagaagaagagataaagcttttgcagttttgaatcgctttagttatgaagctgtaacactttaaagaaagagtgaaaattttgaggaagaatgcaaattcctacatgaactatggcgttttgttatgaaatacatacacgaacaacttgtgttgattcctgcatgaactaaattattttagctaaaattatctccaatacttaatatacgcttaaaatgaaaaattttagtcaaagtagatgtaaaatgtaaataatagtatagaacaagaaaacgacgccgtttttatctatttattttcttgacgaagaaaaggaagaagagaaacgatttgagaattggacaagtgaatctctcgacatatcaatttcgcagaaaatgaggtaaaatatttattagggttgatctcgaatagaggaaattgtgttatgcaagtatctagagtagggtttatgtcgaacttttcgtttagggctggagattgtatggaacaatttagtctttcagggttaaattttatatgcatgccatgtgtttgattaaatgcctaaacgagtttctgtttttgtttaactttgtagttctgatattgatgatggtgtgaatgataaatcaagtgaagatgcttctcataacgttgaagatgagacagttattcattatgattatgagtttgatgaagaaaatctagttgaatgttatatcactggatttggtgaggaagagaagaatgctgatgattaccgagatacaacacctgttagttccgatattaaaacagaacactatgaaaggcgtagtggcaagctaaaaataaaacaggtgtttgacactttggaagagtttaaagaagctatggtggattacgtgttgaaaggaggatggaatgtgaagtttacgagatggggaaaagataaatcagagctcaaatgtgcgatgaaaggagattgcccgtggagaatttattgttctttcgaagaaccggttggaaagtggatgataaaagtgtatcacgacgagcatcgttgtgtcaagaatggatataccaagctattgactcaagctgttattgctaggctgtttctaaacgatataaggagtaatcctaagttcaaaccaaaagctattcaaggacaaatccagcagcgttggaatttgattgcatcgcgtgatcaatgtcgaaaggcaaagcaagtagcgttggagatcatacaaaaagaacatgatgaacagttatcaagggtacaagactatcatcatttggagtttatggagtaagtatttctaacaatatggctgcgtttctagcgtttcttttgacactttgatatcgatcttgtcttggattttctttgttagctcaagccctgattcttctgtggagtttcatgaggagagaagtaagaatcctaaaaggaaaaaggaagtgcaagagtctcctccagtgaaggtaaccaaagttacgagagagggaaggattgttcgttgtggcagatgtggtgtaattggacacaatacgaggaagtgtggtaatgttggggtggagtatataagaccgaagaatcggaacacatcagatgaaggatttgagttcatggatctagactacaacgaagagccaagtcaatcttcggttaatttgtagttttcgaaggtttattttagatgatgtgaacatcttttgcttacaagtggaagtgatgaatgatgattttagttcaggcgtttttggatgcaaaattctgtaaaacttagcaacatgtgtacgcattacagattaatcttacaaaatcgccatagttcgtgaaggaattagccgttttctcaactttttgactatgaaaatttaaagagcaaaatgataccacaagggattaatctcactagttcaacataaagattttacgaatttggtttttaagtaaacataatttcaaagaagatgcttcaccatgtaaggaccttccaattcataacccaactttctgtagtaatgtctggttcctacaccagaaatcacaccgattttgttagatcgatgttctcttctagcaatcctctctgcttcttccatcagaagtgtaccatagccctgcaaattcgatacaggaaataataagataatcagaatcacaagtccttaatttaagtgtcaatttcaagttgaatctcgggtggtacctgatgttgcaacttatcagcatctcgaccatgaactggtacagctgttccgtatacatgaagctcacggacaacagaacactttcccatgagttctggacacgttacattcttcccgcattttcgcaaacgtagcaatccaacaagaatgtcctgcatccacaaagataaatgtttaagaaaatttcagagccttaacagattccaaagtaaccaatcaggtttaagggttgagaagataagcttttcaagtttctcatgaaactcttgccttagtgcatgcaaatgaaattatggatttaaaactgatcacatgatatatgacactagatcttactggagatttgatcaaaattacaaactcactgtatccaacgatacacaaaggcacatgcttactctgttagtccaataggcttagaaattcggaaaagaccaagaacagatgctgatatgttaaaagataacgctctcagcgtcttacctaaacttgacagttttccttttaaatagaataccaacatctatatttgataaacatgacataatgtatctaatgagtgacaagacgtatgtgatcttagtaaaccaaataataattgattcaataaagtcttagggactatgctgtgagaggcgaggattagagatatgaagcttgtacctggcgtgtatcttcataagaaaggaacgtctcccaaccttcattggcagtgtaatcacgacgcacaagctctacttgttctggcttaattttatgatgaatgtcctgtactcagaccatacaagctagcttttgttaggaaattcagtatttacaacaacaaaacaaaggaagaaacaacaattgacatcgcgacctgaattccagcttcacgagtacggacatcacggcatttaaggcccaagtcatccattctggctagagccagttcacgaagatttcctttttctacccctgacgtaaccagaggcataggaatatcacgctgaactctatatacacgtgtccatggaggtaccatggagagaatccttgcaactatatccacaagctgctcaggtggataatttcggtacctgcagaaattttcaatatgatttaaccttttccgttgtgacatgcaagcattcatctttaaacacaagagtatcgtacctcccagttttccatagttcataaagtccagttccacggatcacaagggtgggatatatttttaacccatctgctctaaaagatgggctctcgaaaaactccttgaaactttccatgtctctctcaaccccaacattaggaagatcaggcatcatatgtgcaaccacctataggcaaaatgaaaaacggaggtaaggatacaaatttagcagtgtctctaaaataaagaaatgttcattggtttcaaggatattaatgaacagaaacataggaggtgaaagctgccaagataaacttgatactaacatgagaaaactaaaaatatttataaagactaatctataagggaataccttgaaaccagcatctttagccaagcagaagcagtcagctacagcagcaacagtatgacctctatttgtgtcacgggcaacatcttcatatgtgctctggacacctatctctagccgggtgcaaccgtaaatcagcatttgtcgtaaatgaggtccaaggcagtaatctggcctcctggtgaatttttaaaacagattagagaatgtattctgatatttgaatcttcagagattagagactagactccataatgaatgatcaatgaaaataacaaggactgattcacacaaacaattggtgttagatttttatatatattttcacaatttcactcagcttgaccatttccacaaagtgccacaaagaatacaatgaaatcaatatatagatactatgaaggcttttagagaaaacattgaggcaaaaaagacagatttcaaatttagatgttgtacatgattactgcatcgaactcacgtttcaattgtcatcccaatgcatttagttgcactatgttcagagtaagcaactgcctcttcaacgttggcagaagtgtgtcctgataaagcatcatgaagattccgtatgaagaaatcccgatactcagcaggcagtgacatgaaagtacctcccatcaaaatgaactcaacctgtcattcatataatcaggagtaatcctctaggctaagagactggtaaaaagaacgaaaataatactcacaggttactagaaatatcaaactctaaccttatctacactgtgacccaaccgcttcagctgatctatcctgcttcttgcctgaacatatggattgtacctaagaccataaacagggctttagcaaaatcaatttaaacatgaaacgtgcatccttctcatcacatgaacagcaaactgagtccataatttcaatctaagaattctatgtctttttaattcactcataaagaagaacaaactttccagcttatagcattttccttatggattttttagcagctgtgttatcaagcaagtctacattctcatctataatctagatctttttctcatttcataaacatttcttgtaatctacaatgtttgaattctagcaatcattttgagtcctaaatatcaaagcacaaacaaactaactatgaccctaagcaaagttctcaattgaagttttcatgaagctatccacacaacatagtccccaaaactatctaccacctattgtcagcaactgaaactaagttcaaactccggtggtagattgggtcagaaatcacaaatttcacccaaaactacctaaaccccaaaccctttactagatcaatccagaagctgtaatacaagtttcaattccataacacagaagacactcttcacctggctcgaatagctcgcatgctggtaggctcatatccagtgtaagactgagtactatactcaaagtcagagtcaggtccaccgggacaataaacgcatatattccccgtcgtagctatatgcgggcacctatgaggcttcgacataaccgccacaacggcgatccctgaagctgttcgaaccggtttggcacggagcttcgggagaagagtctctctctctgaatcaggaagcgcagcaatcatctccacgagcttaggcgcacgtgctaggccgtatttccggcaagcggcggttttaattgcgtttaggtcaacattctcgttgcggtgtgaacgctcaatcatggtgctaacaatctccgatatggcgcgaactcgagcttcttcttcagttaatccacggccctgatagccgcctttacctggccgaggttgctttttcagctcgccgttcatcactaccgccgtcgccatcgtcaccaaaacctcagaccaaaattacgggaaaatagcgaactcgttgaacgcagattttgtgttaatgaaatcctttaaacgacatcgttttaatctgtttaacttttttttttgtcaacgcttcaatttttttttttgaggcaacagaaaagacataaaatggtgtggaaccaaaatctatatgaagattcagtctccttaagaagctgaagcaccagccttttgtgttagacaatgatgtgcagtgataacttgggttttgaggcagtcatctttgagaatgactccatgaatcgtaatggcatatatatgtgccgacgtaatagccaagatggcttatagctgttggagataatagtcctctccaactattgtggagaaggagtaccaaaacatataatcctatcttttgggaattaaatcttgatttacaaatcttccatcataattttatatcagccaattacattcaagtgttatccaacttctcctatcattcaaattctcacaaaagaaagaacaataaatgaaaaaagctcagatcctgctcatgggagagtctaagtgatgagaaatactcctatctttttcctaacttcctgtgcgtagccttcgtagagaagcccgtctacgagatctttctttgccatctgtaaaactcaggtgttatgttaccaactccatcagcacttgttttttatgcaaaaagtgtagtgagtactatacgatataaccacttacctcttgtcactcttccagatgcaagtaaagcctcttcggccattgctctccattgttctgcacacgaataattaactcccatcccaacactgagtcctcttaacagaaccacagtgcgaagtacagagaacagttcctctggaaatgtctaccgacaaagaacacattcaagttagtttggtatatattattacctgtagaacacacaacttttttttactttgtgaccatcaatggagctttacttacctcaacggctatctttttaatcgaagagtcatctgagaaaggttgtaaaactgtctgaccagtaggcatctttgtatcaaaaagtgtttgtgctaaccgcagaagttcttgctgctcattctcacacttggccactgtatgtaaacccatttccctgaacattcacagccacaataacttaaggaatttagtgctgcagtaatccaaactgttgacagtgaatattccaatattggacaaaaaaaaacgttttcttatcactttcaatcataataatccaccacatacttgcctcaaaacagttctcacatactaaactattcaatttaaaagtggaaaagccgttttttgaacataatgatcaagtacttaatcttcatagcctaaacaaaatgaaatcctcgctcacaaaataacttttgtggtaacaaatggtttcaccttttatggactggttcttattggaatatctttctcaaaagaaaaagatttgctaatgacaaaaatgcttttgagccacaaaacagatgatatgaacaaaaacgaacaatttagatcacaaagttacttcagtagtgcatggagatttaatgagttttgagttaccaaaagctctgtgatactcgtgaagcattgttatcagccatggcaatgaccaaatttgcataaccaagtctcaacttgttgggtagttccttcacttgaccatagtccagcaatgcaacctaatgacgggaaacaagattacaactcagactatatagacgggcaagttctgccagaaggtaacactaagcgaattaaaaaactaccaaataatgactacaagcaaaatatgacttgcctcttgacctttgcaaatcaagatatttccaggatgtggatccgcatgaaagaaaccacttttcagtatcatttggccatacgcacgggataaactgttaagtatattgctgaagaaagaggagatatagattcagtgtggtgtcagtatatttcataatgcaagccaatataacaacaacaacaacaaaagaaaaaaggacatgtggatttctagcacataatagctactaagactttaggccaaagaactaaggcaccatactctctgagatgatgtaggagcttactgctttgctgcctctgcaatcttaccatgaggatttatccctcttttagccatctcatcaccaatgctcaggattggaattccattaatgtattccatcaccaaaaccctcctgaggaaatcatgattgttcatatggtaagtatcacccgaagcaaaaatgataaaaaaaaattgtagtttaagatgtgagtatgccattaaatgacagcagaggctccatctagagaaggccttaaacattatcacattaaccaatcaggtatatgatatgcaaaagtaagaacacttacttagtcaccatatctcgcagaactcttggtaccaaaacaggagactttttgttgttctcataaagaaaacatcgaattctttccattgcattggcctcccttttgaagtcaaattcataaccaatcttgaaaaaagaaaacgcatagttttcagtgacttggagaaaaataagtctcacaaaggaacaagatcaattaagtacctgtttctccatttcctttgttatggaatgcaggtcaaatttgatatctgttctctgcatgtataaggcgaatagttgcaagtttcttatgtctgtcatcatcaatctttcaatgccaggatgttgaacctaaacatgtggtatgaagttagcggtgagcactcccttcgaaagatcagaatcttattaaaagctggtaggcttttagtaatcccatgataatgctcacctttacaacaacattcatcttgttaccctttactattgctctatgaacctaagaaagcaaataaatgtataatttcttagtataaacataaccagagtttgacaatgttgctacagttccatgtcaggagataataattctatgggaagagaggacaaggttctagctaattcaagaaaccatcataaccagattatgttcctcttttcctaatgttccataatactcaaactcaatcatgcttgcttaattgtaaggtttcaaccaaaatctgtaatacctgagcaatagaagcagaaccaagaggcttttcatcaaacgtttcaaagatttcaccaatgcttttacctaactccttctctagaacaagttgaatcgcatcaaacggcgtcgcaggagcttgatcacacaaagtgacaagctttttcacccacgcagctggtgccatgtcaggttttgctaaaagttgagcaatctatttaaccattcaaacaaaaaaagtcaaacatcaacagaacacaacaacaaccattaatgcaataaagccaaacactttaagtaccttaaggaagaaaccaccaagatcagagcacatgaagtaaatcttatcagcagcttgttcatgttgtctttcccacatttcctcttgcttctttgcatcttttactaaacttactcgaagttgaaacacctgaatccaaacaaaacagagaagcccaaaattcaaaatttttagcgatactatagactaatgaagaaagatgaaagagataccgtaaaagagagaccttgtagcctgtgtagatattagtagctcgaacccagaattgaaaagagcgttgccatggacgaaagctatcggagatcttctcctggatctctttgaaatcgaacccatgcattttgttctttttttggtgaaacagattgttttcaatttttgtttctcgattttgatatcaaatgtgaaagctttcggaagaagcgatgaagttgatcgagatcgtgactgcgtaagaagacaatgcaagcaagcttcggagtttagttctaaaccagtgttttcagacaagcttagcaatccggttcgggtttagctctcaaccaataacaaaccggcaaatcccggattaaccggcaatccataattgttttgaaagaaaaaacaatttactgtataagttttgacttcataaaatggttatcatatgttgatgtaaattttaaatgatttgattgatttctaaatttgataaaattttgatttggtttggataaattaaggaatttcattaattatcacttttaatacttttcacaaataccaatctattaaaaaaattgagtctccccattttttggggtcaaagattaatcttgagtcatagactaatcatatatatgttcaatatacaactaaaaaagtaatttataaaagaaaatcaaacgcagtaatcttttattcgcatcctcaatatgttttccgttaatacaataaaagactacaacacaaaacaaaacaaaaaatagattaaaacatagaaaaactataacacaaaacaaagtattaagaagttctctgcgcaaatgtgcagatttaaaacctcatattgaacaaaagtatcaataaaatcaacaaatatatagatgactaacttaaacgtagtttgaagagtaattaacagaggatgctgacatactgttacaactaagatatatatgttgatagttagagatgataagagaaggatgagcaggcgatgcaagctaggaggaagatggctgaggaagctccatcgttatcgagattactagtgcttcgcttgaatctgcaacttttttctttgttgcaatttgtgattgattgcatcttcttcttctgatgacgatcatcttctttacatctctttatgatccctctctgcttcattgcttcttctgctctgcacaccattctctttttggtgaaagagctcagagaatttagtgtaggagtacaagagtcccacttcgtatctccatatatatagagccaagtttttttttaataataaagtataaactataatttggactagttcgaaatggcattttaataatttttgcttggatctatgttctaaaccaccaaaccgtattttaacacgtgtaaatgatgcatttgctcaaaagtttgttattccaaattcgttgtgtttactatgtactactatattttgcttggatatttgttctaaacaaccaattaaccaaaccaaattcgttgtgtttactatccactgaaataaatgtaaaaacagtattacattatcagaatcagatgtatgttaaagttaacataaaacttccaaatatttgcaagatccatgcatggtgacctaaaattttaataatcccacggtttcaagttcaggatttaggacattagattatttatttataagcttccaaatactactagtttgtagctactcaagacagtatttgttttcttcgacacatagaccccaaactgtgtttctatatgagattcaatgcatctctttcttattttaaaatcaataaatgagtatactcaaattgttacgataaaagaactcagagaatgtttctttttgacttggttttttcaacccaaattaacaagaaacaaaaaatgtcaagataaaagatttattctttatatttttcttcttgtttatgtctataaactatggagctcctggtataatataatatattttaactctaaaattatgtgttttaggttaagtttttgggtagttgctaactgatagataaatttttgtgtataataaatatttaagtaagagctacaaaacaagttagttagcaatgataatggacaatgttatggagttgcgaccgttgttcaaacaacagcacatttggttctctaaataggaatccaaattggattatccaatcatttgggaagtgaatattgtaacgtatttgtaacatgcattaaaccctcaaattatttaatgaccaaagcctagtaccaatgatttactacactaatatactactgtagatgcgttgaattctttgtcattgttataacaaaatgtggaattattgaaaacgtaatggaggaaaatgaaaatgggttttggcggggagcgaaagaaatgcatgtggagaagacaatgtcacatgcgacatgtgagaacgttatgatgtttggtctgaaacggcgccattatgtgatttatacattgcatttccctctcacatttactcatcaacccattccattctttgtttttaaatttgaaatgtaaatatcaataatcctaatgaatcataaaacttgtcgatcatattcaatgatcgacctcattgtatggtggccaaaaacaaaccaaaatgcatttcaattatcctcttccttcggggtttcaatttaaagaaataacaagatcgttgtgttgcttcatctaacccttaaagcttcattgctcggttaatggactaatcgcttttgtttccatgtttgtttttatcttcttctttttttgtttttgccataagaccaattccataggttatgctcttcagtaaaacctaaacaatttcattatcttcaatgagtgtatacaccccaaaaaaaaacctgaaatgtataaattgaattaaactgaaaatgtaaatcaattggcttcattcaataaaaactaaactaaactaaatttagtagagtaacagaacaaattaaagtttttccaactagttgaaacatgtgtaatcatattttatagcataagttgcatcatatcgaaccgaattacatatggtttgaactggttttagtctccataaaactgctaaaactaaaaccagaaaaagaatcaaaccgaactaaaccgtaattgaattgccacccaaaaaaaaaaaaagatacacatttgttaatctcagtctcctctaaacacaaggcgtaatctcgttatcccttaaacacagcattgattaactctttcagattcttgcatccgattatctcaatctctttcaaactcaacgccttaagtgattcctccactgatttaggaactacacatttgttaaacccaagctttgccactgtactcacccttttctccattcttggtacctgtaccattatccttcagtcattttcatctaactgctagataacaattagctgattcttttattgcttaccgtgcgaacctctcccccaagaccaatctcgccaatgaatgctacaccgtgaggaattggaaactccaagaaactggatttaggcaataaaagagcagtgcttcatttgctgccagctaataactaaataacgcaaatcttgcagattctatgagactttttaagagcacaaagaagttaagaacactcacctgctacaaatagctgctgctattgcaaggtcaccagcagtctcagaaagagccattccgttagcgacgttcagaaaaatcccctgaagcaaacttttattattattaacaggactgcgatcactaggacactaagtgaccattcacatagataatgaagattggagtttaatacgcttcatatcatttataacagcgccactatgttactagaagaacaagattcacatgtggagtaacattgctgacttacattttcctgaattctaagaccagcttgcttcataagaacctgtcatatgataaggcagaacataacaaaacgataacagttatcaaaaaggggcagtacacaaacgtaatttgttattagaaaaaaaaaaaagaagataatattagtagtagcactcactgcaattatcatgtcagctctgcttgcttgaacaccattgacatgccttgaaactgttgagccaggggaacacaatgcctacataataacaaaaaacaatgtttaaacaagaactacaataaattgcttcaatgttcataagcacatatgaggcagctaatgatgagagatcagcattgtcgcctattcagaaccaacataacagccattgcaagtcatgattttcatcatattgacaatagcgaaatttattaagactttcaaaacacagtttcacttatcgagccagagcccttttacaattttttgaaatctgaagcagaattatccggtcatctacctgaacttcaattaggaaactccgagatccatccataacaactgctacagctaatccagctaaaacatctgaatctgggttctgttgactaagatatatgccacttgggtttgagaccacttcaagtcctgagtttgccatttcaaaaactccaagctgacaaaggagatagccacaatttattcgataattttcaactcgaactagaaataagtgtacggataacacgcaaactcaaaccacataaagaataaagggaacagaatccacagatataagaagcttgaactagcaagttctcgataaaacagaaaggaggcagtaagggaaattactaatcatgatctaatctgcaaaggcatactatcaaggatttgtatacatacttcatcagtcgacccaaaccgattcttcacagatcgaagcaagcggtacgttgatgactcttcaccctgaaatttgatggaaagtacatgtcaactaatcatcttctgttatatctcctaataaattaagctcatatattgttatcgtctagaaaagaggttataaagttaataaaaaataacccgaagtatttagttagaattgcaaagccccttatatcatgattgcatatctaaagacatcagaaagttaaaaagcacctccaagtacaagacaacatctactatgtgctccaaaacacgaggtcctgcaatatcgcccgctttcgtaacatgtccaacctaaaacagaaagtgacgtgcataaaagatctgatccagatcaaacaccagatccagatatggaaggaaaaggatggtgcttactcaccaagaaaacagggatattagatttcttagcaaaacgcaacagggttgatgtgcattctttaacctgccaccatcagagatttccaagaaaatagccgtttcagcagacaaaaagaaagttacgagaaaagcatatgcaaatagaaaagagaatgctggagcctggtcttcatctaacacataaaagtctccttttaaacatcattaaaaaagatgtgtgattctatgtaaaaagggaagcagcaaaaagcattatggcataacttcctgctcatagtaattagaagaaaatttaagtgagagactaagcaaatagagggtaaaaacttttaaacctgtgtgagaccaccagcacttccagtcacatcttttaggtaaacggtttgaattgagtcaattatgagagctcgaggagatagtcgatgagctttgtttagaatgtcctgaaataaatcataacaaaacgatttgcttcaggtaaatttaaagttatgatacgcaaaggcttggaatttcacacagtagagttggtgtctgacacgtaaacatgaagaaaattaacttggagattaacagttatgcacaaaataggaatatacagctcattgcttaggtgtttaaagaagttctaaactatgacttccgtttgtttaagataataagaatattcattcacataaaaaaagtatacctgaagatccgaactcgaaaacaggtagagctcttcagtttgaattctcatcctgtcagcccgacttcctatttgctcgacactctgcagtgggcaaaaaacagaagaatttctgaagaatgtgtaatcaagtcaacagaatgcgtgggatgagatccttaagaacaaactaaaatacgatatctctgccattaaatagaaaacgcgagaagaaaacagccaacaattttgaagtgcagatgcgcaaaataaagctcctaactaaaactcaagctatgattactttgttgcgtcttaaacatgtgcaagtaagctcattcagaccatcttaagcagcatagtttgaaaaagaaacagccacggagcaattacacaatccacgagtttgatcagaaacccgacaagaagcagaaactttgagaaaaatagaacatgactagtactaacctcttcaccagagatatacaaaaccggtgctggttcggccaactcactcccctcagcaattatagatgcaatcttccatttgagaaaataggagagaatcagttagcctgttgtgtgcattgcaaacacccaaaccacaaaaatttacaaatttgcaaagggaagacaaattattcaaacaccataaatcacatctcctaacctgcaacaacaaagtactcttgccaataccaggatcaccaccaatcaaaatcagagaacctacaaaaaaacaacaccatagtaagtcaagagcgaaagactgagaattaaaatcataaagacagcataaaacctggagcaagaccaccaccaagtactctagcaacttcattcccaaaaagtccaggccttaacataataaaatgcaatcatcaaaacaaacacataacaaaacaacaaatactcgaatcaataaacaccacaagaagtgatatctcatacagtgaaattctccattgttgttgagtaatgccatgaataacatcagtcaatcgatgtggctgaaccgtagcttgctcaggtaaccaagacaaacccttaccctccgtaaaacccaagccagtaccgttgccaccaccaccactagcacttgactcagaaccttcagaaaaacgtttcatagtcccaaccttatgacaagcacgacaactcccccaccattgcccttccgagtgaccacagctctcacaaacccaaacagttttcgatttccctttcttcgatttgttcataactacttcccctggattccatcgtggaggatttgaacctgattttctcgatttatcatcggagaatccaattttggtgtctttgtcttctctgttcgaattcgcgtcctgattggaggaatgaaggtcgaaaacggaggcgacgggagatgatgagagacgacggagacgaagacggaaccggaccggagatataggaaccgtgaccggattggaagatcggaggaggagaagagagtgggctcgagtgtagaagcatctgaagcatctcatgtctgcgatcaacatcaacaacaaactcaaaaacctttctccactgttgctggttagggttctgagctccgaggttcgaaacccgccaatttcacaaacacgactttgccgctcagtcttcttctgcgacttcacataaaaagaagttcaacttcaaagttaataagattactgaaatagagaattttatgtcattgatacattactttggctactaatttatgctcagaattcttttatataacgctatagtaattatttctatgcgtttcaccatttgatgatcttgtttttgaaacaattttatagttagctatcatttctaaaagatccttacgagcatgcagctgtgagattgtaacaactagactggtttctttgctcggaccatgatcgacgttttctgcataagaaatcgctacaagattctcgttatcttcttcctcatcactcaaatactctttcttatatggagctccatatcgagttcagttgcatgtcttgctccaagtccatttttcttcaaaagaacgcaaagcacattagggcactacaacatatttaataaacttgccagaaataaaataaaaaagtttacaaagcttttctaaccaaaattcattaacctttttaggaatagtcttttgcgctagtactttgttttcaagtctgtattcatgcatgactcaatcagtcgatcttctcgccttactattgttgccgaacttttttcttggacagaagaagcaccatttaagatctccagtccttaggataagcctctcatttacgatatgatatcttatcctcgtataattacagttacaaacttacaaacaacagtaattacgatatgcctctcatttacgatatgatatcttaatactttaatagaaaaatatgttaagaaaatgatatcttactttcaaaataattacgatatgagttttgactagttacaaaaataacaatagtatattattaataggttttttgcttccagccatgaattgttcgggccgctctgattgtatcatgttattatggaactcatataaatatgtatatagcgacactagatttgtgacaggtaattatggattcatttgcgttagatggaaccacaaggtccacaaattagatgagaattgttttctagtgagactgacttaacaatttgttctcaaaacaactatccaataccaatttaaatatattttcttgcataatgctaaagatatgttgtgtaaaatataatatatatttttatattaataaatagataaataggatggtcatgtaaaagtaatgatttattacatttaatagaaataatgtcacatgtaaaagatctaaccacaaatccaaataaaaatcaaaattttgttggcatttgttttttttacaggatacattaattaactcgacttttggctattttataattaaaaaaaaatctatgggcttttaagagattattaatactactatacgagatgtgatcaatttacacactatatatatagtcatgccttaccaaatcaaagaacaaaacatttcttacttctttgagagaagaattactatgatctcatcatcacatttcgctatcttttgcatcatcctcgtttcattgtttgctcttcaacaatgtatgttttgtacatatagcttattcatcaacatatataccacaattgttgttaaaatatctataatttttttgtagatgaaattggaaacatggaagagaatctgaacgccagcaaaatagttgtatatctatcaccgtgtgttagaaaacgttgtagctttagcttattcaagaactgtcattgctgcagagggaagtatcacttttgttcaaagaacataaaagtatgcgagaaggagtgtcttagacttaacccaccgcgacctctgccatagatatggaaaacttgcaaatgagtttaaaaagaattgataaatctcttttcaagaaaaaaaaaaagaattcataaatcttattgttttcgtctttttgatttaaaataataaatatgaatcgtgtagctatctatttcgctttcttttatcataaaaaaaatatgtgattccaataaatatatatatatatatatacaatcgtatgtaactcaaaataacttctaaaggtctacgacaaaattacaacaattagaaatacctaaactataacagaataagaaattaggaataatatgaatatatggctccaacagttactattcccaaatttttggttggttaaggaaaacgtgaaattctacggtttttggttttttcgaatattagtttgattttctgtcgatatttttcaatcaaaaacagaatcacaacactctaaaaagggccaacagaaaactatacaatatatttattaagtaaaaaaattttatacatatatatatatatatatatatatatatatttttttttttttttttgtcaaccacacaatgattaaatattttatattcttatgttattaaatatataattaggatgtttattttaaagtaaaaatttattacatttaataaaaatgacacatgcatgcaaaagatctaataacaactacaaataaatatcaaatttcgttttgtcgtttttttctttatatgtaggatttacactaatttagttgacatttggttgattgattatcaaacaaatctaacaagttttatgagattaacaatggttaattacatactaatttccatatatatagtcgtaccttaccaaatgaaacaacaaaaaaagaaaattaagagaagaatcactacaatgtcatcatcatcatcacatttcactatcttttgcatcatctttctcggaagcttggcacggcactgccttagatcaatgagcggctacatagcacaagacttcccgaactgattctatgccttagcttccacgtctcatttagaatatctgagctgttaggtcgcttcagatactccgctacatctatctttagtgtttttgtgggcatcacaggcttcgtgaccgagtcatatgggctccagcttcctctgctacttatggtaccaatgctcgtccctcgcccactcgatgcatcctatcagcatacattcatgtcagagaaactttctacgagtcatctatctaaccggctatagttttagacccgtaaggagtacggtcagtgcaaaaagtattgttacctgagttgtatccgactcccagacaagagattttgaatttggggtgtgcggcgacttgataaggcatgccactgcagcagacacgtctggagtttcccattgcaaccaagggagcataacaccgtccatttcaacagaagtactcttaagagcactggtgctttgagagctttgtgtttttatcattccaaaacttgaactactttcgctcctctcatcctccagtgatgaaaagtctgtgtcttctatgtttgaaatgaattcgtcgatgaattgctctgcttcatctgtcaaacacatggacatcctcctgctccggtccttgctcctctgtcaaaataaaagaatgtaattttatctttttatgcaaagaataaaccagaagaggaaacatatgctgttctgagagttgtaatactcacctttcgcgtccgcaatggcttttcctcagcttcagagctattttcagtgagtatttctttcaagttcacagagagctctctaccacgctgctcctccaacataatctcagccagcaactctcgcttgcgctcctcagactgccaatttaaggggaaacgaagtgttgtatatttggtcaattcttcaatgaaagaacctagcaaatagacgcaaagagaagttgtacctcttgcaattttgttgcataacctttcgtagatgtggagacaccacggttatcatcaagagatttccgctgggaaccataaccagagttccccaaagattctcttttctttggtgttgcctgtattgacgttgttcattaaagcaacaataataatacatcaattaacagttgtaggatattgttctactttagtcatcatctctaataaaccattctaaaatcttattcatatagattccctcagttaaatgaaacatccagaaagatctgccctttttataggactaggttggtttcaagcagagagtggacactcatataattaagttaatatagttctgagaaaaataaagaaataatcgttggttgaaaccacaaaccttattttgggcatatactgttcgaattatcctctcagttccatgcttgctggagctggaatcctttccttcatcatctgtgactgcagaagactggctctgtaacattccaaacaatttttctccaattagtaacaagaattataacatttccagcgtatggaggtacaccaaatatatatcatacacaaaaagattaacgaatcccctaaacagaaacacaaacacgcacaacaaaacgatttttaaacaaaaaaagaatctttaaaccaaattatatttagacttacagagtagccatcatggtatttgattggattctggctaaaagacctcctaagaccttgtctattatctgaagcagcagatttctgagaaccactattttgactctttccactcatgaagctcttcacatcccttgaactgcttgaatactgaacttgatctacatcactctgcaaatgtaaaataattcatgtcgatcacactcctccaatatacaaatacaaatcactactcatatcaacaagccaaatgcacacaacaatgaaaatgttcatacgcagcttctactaattcaagatggtaaatgatacaactgtttatacgactcataaatacgcacaataaattgaatatatcaaaatcagacctaacaaaccaagcaagcatggtcctgttgctacaaagttatctcataatcacagctaaaattataatggcttgataattatagctttctaataaagttccaaatgtaactaaaaaggtaaaaagttcctaatagattgcatcacatcacaccactcaagagggcccaagagaaactatacaataagaagatacaaagtaagcaatcacaaaagtgtaatacctcagaattctcaatccgacgacggacaacagaaagcgaccgtcgtcgccgcgaattcgcgttctcacgatctccctcaattacaccaccactgttctcgaccttaaccctctcattcggttgtctagaaaccgacctccgccggctcgaattgttgctcaccgaatcaaccttacttgaaccaccacgattattactagccggctgtctagacaacgacctccgtcgcctcgagctttcagtatcagcatctaacctccgtaaaccaccgttaccaccaccagaaccaaccctagaaacagaccttcccctcctttgcgaattcgtaacctctccgccggtaccgccgccggaatttcttaaaccagatcgtcctctttctccgctactaatctcgctctcgccggagaacgattcaaaaaactcgacagctaaatcatcgaggctaatttcaccgaatccagaacctctcacggtgttaacaaactttcccttcctcatcggagtcacttcaatgtctggatccggcatgcggtgagagaaacggctcaaactccggtgtctcctagaagctgacctccgtgtagagtaagaagagtcgtcgccactctcggaggatttggctagagacgtcgttcgcttcatcgttgaattgaaagcagaagtcgccattggaagagaaggaaggaggcaactctactggaggaggaggagcggatgattcgacattttgaaattgttgagctgttttgaggaatcaattgcatatgatatgctcccaattaattcatttttgacttaaatgcattcgaattttttaatacgttaattatttttccatttcttaatcaattatgaatatgccaattttttgtatggtattcgtgtattatacctttttgaagaatttataaattttatcctttttttttaagtacaaaaatataaatttaacatgtattttattcgttatatttggatttaatcagttgtagttgtatttacggttataatatatatttttattattttttgagttataatattttgtatagaatatttttaccaaaataaaatcttattttgtcgttatatttgaatacgtattcttaccaaaataaaatcttaaatatatataatgttaagtattaaaaaataatatattcgtaaaattttagtaaaaataacaattttaaaaaatttaagtgaaaatgcaaaattaacaatattttttattataacaattgcaaaacatcatattatataggaattttatttaaatgtggaatatttgggattcatccgaaatcactgacatatcctaccttactaaattatttaccaaaataatactatttctttacatgtacatttaaaaagttttttaaagtttggtaagagatttgcttattttaaactactattctgagggcaacattaagaaaaataaattattaggctcactaatgcagaagcataagcttgagtaagtagaaaaatcaactcaaaatgaagataagcatggttattttgcttgtagcagatttatttaaaggatattttaaatttattttttgtttttatgggtcatctacaattatacactctacaatagctttagtaattgttttgccgtttttaatttttaaattgagggtttattttcatcaaaaaaaatctagaaacggtgtttaatcgagtgaaggttgtgtttgatgatacaaagaacaagagaacaaccaaaattattaaccaaaccaaacaacgtatgttttcttttcgtttgatcttttcgttggtcgtcgaaactcatataagtttgataaatttttgtatttatatgtagagaacataaacttataaggttaggtgcgttatatatgtccttaacttccaatttagactaagacatacacgtgtttgtagaagatgaatttcttgtatgaatctgaattggtccaacttcatttttctcctctatattgtatttatatattatgtcttgttgagaacacgttgacgtacgaaaagaccaagattccccaataaaacattttcattaggatgctgacatatagtgttatgttatggaagatttttaatttgttcattttgcgctcaattttctttctttttttatgtaaactaataaatttttctttttaagaaaattctttttgataaatttctcaagcaaattttgttttctcgtatttccatgagtcgtaattcagtccatgaaagagatttgatgcatattgattcatgttgttaattagcgaaatacaattgtcattgtttcacttctatacatgtatgccttcacttgtagacccatttttcttattttggctactaaccaaaatgtatttgggaacagttttgtttgtgttgttcttcataaagtagggtactgttctcttttaaaatgatgacaagaaccaaaaacaatatatacgactataagtgtatatttttctattgaagaattctttgggatctctcatctatgtcatgaatgatcaagttgcagttaatcaccgttcacatgtatttattcaagtcttatatgttgtaagaatttgggttcacatgcatgtgttcatccaagcttacatcttataatgagaagagtaagataactttatatgggatgttacttggtgtaaaaccgaacttattcaatatttcttcgattttttattgaataacaaaagctattgcggtttaaatcaagctcacttgaacatagaacctggacatggtgctccacaagaattaaaattgaagttgaccgattcaaaatagaagacttgatctcattttttaaaagtataatatagaattgaacaccgtaacgtgagttcactaattctctatttatagttgaatttacgttttgaaattcttacatttaaatcaatgaagaaaatgtataacgtcgtggtttgcttactaactttgagctctctcttgctttctggattatcaaacacagcattggctcgagtacagtatgaatctccaaacctacgtaagattttatcattattatcattccgagcatttttccataacgatattgatttgtttgcagttgagattttctagaatacaatatagaaaagctaaaaccgaatattacaatagtttcgattccagtgcatgtatgggtaaaccatgaatggtggcggttagactgcttcttgttattaacatatttgcattttttgtttgtttgtcaaaataatcttctaaatataaatacgtataaaataaaattttacactggaaagtaaaataacaattaatttgaagaatatgctataacacataagttagttgaagtttgaaaaattgattgggtagttgctaatgttttctttttggaacaaaattacaggagaaaaggtttgggaacgatcggtgttcaaagaggtcaagataaaagtataccctagttgtacacctcctggaggaggcagtggacgaccatgtcctcctcctagatcctagagaaattctatcatagaatatttgatccaaaagaaagaatgattcatcatatatatgtaataatcttttcaacatttaataaacttattcctaactaaaaatataataggaaagtggttggaaacgaagaaatataaatggttttctgtatctatcattgacggctctaacgtcaaaactataatatgtgaaaatataagatgatatatatgatatatcaaacgctcaacttacttaattagaaattagtcaaattccttacgtaagagctttggtgaaaatgtatccaattggccatgtgtagagagacatgaagtattttacctacggcctacggctacgagaatctcataacgatggaaataacagttgatttagtctagtgcagttttaaacgtagtctcttttatgtcatcaagtgtttccaaatgtaaagtgcatatcgattttcctaggagaataggagtggaatttcaacgtatgatgttgaaaatattatccgatcttagtttcaagacttttaatgaaactttacgttattatacatgtactaagtactaaggagtctacttcacctcatgtgttttaacaaatatctccaaattaatttgaaggttaagctttttctaagagtaagcaaaaaatttaatgcattccattgtgtgattaaacataagatcctcacctaagtactaattccataatcctacaaagcacaatactagaaaaaagaaagataccgactaaccaagagtttttatacaaaccccaaaaaagaagaagaataaaacaccaaacactacaaattaaaacagaacattgaaatcaaaatgttaaaacttaaaagctacaaaattgcgaaatatgtatgtacactcataaagttggaagtccaaatatctatctaacttgcatgtcgttattaaatatcctcatctcatcaatctaacatcatctctaatccaacggcccaatcctcaccgtccaaggcaaagtgcagcatcaacatcaagccgccacgcaaagccaccgtcactcatcctccaaacatcacagaacgaagtaatcgaactcacctccttatcacgacacgtgtactgcaatctcattctacacgtaaaagtccggtacgttaccaaaggcttctccttcatcacaagccacacactcatcttactacactgctcatgatctttcccaaccaccaactctctgtaagaaccgttcgtccaaatgactctccctaaaccgtccgatataaaaccaggacacgtgtctctctcaagattcatcttcctctcctcgtccgtacaccctaactcatactctccctccatcaatctctccgttacacactccaccgtcaacaacgacgacacaaccgtttccgtcattaactctgtctgataacgtctgttataactagctccgtcattaaaactcagccacaacgccgccgcacctaactccggcgccgccttagccttcaacggcgagtctttcttctcaggagtctctggaagaagaggcaacgtcacgatctctctaccaccaccagatccgttcttcgtctcatcgtttctctgtcgtttgctgttaccgttactattaacggatccggtactgctactattattctcctttgaatattttctcttacctctccgtgatctcgacgaaacgttagttatcaccgatccattcttctccgtcggtgaagcaggagatccaccagaatcaggtctcggtgcaatcggacggtaccggagcataatccgatcaaccttcgacatatcatttccaccaccactaccaccgtacctcgcaatacaacaacctccccggaaattcatgttttgtctaacaaacaagtttgttttgttggagaagaagtgtttggtgtgtatataaagaaaagaaaactcttacgtcgacacgtttggagaaaaccttgccacgtgcgagaccaaacgatgaacagcgcaacgacgtgattggacgaaggttagagacgtggcgttttgtttgaatccgacattgagactcgaagtacgagggaagtggtgaccaataggagagcgaggagtggctattaggtgcggtgcgattaaaggtagacacataaggctgcgactttggagttacgtgtaacagaacgcgagggttttggttttgagatgagaggacacatgccgtgatcttgtttgctgttttctacgttcaaaagttttgagattcttttttttaagtttggtttctattattagcatgtaggatggggagattgtgacacgtggggagtaacgctgtgacacgaatctcctttggatgtggggttgcatttatttccagaagaagatactttttgcatgcatataattggtggaaagtataatattaatagtataatacacactttataaatatctactacgactacgaaatcttccggatttcactaaattacaaaacaataaaccgcatgaaatttagtattagtatctaactattcgtttgacaaaaaaaagtacagatatgatcaattaagtagatattagttgaagataagaaaaaaatataatcatgtaaaatgtcatgtgtcgtttaatagacatgttatctaattaattttcaatcactattatttcagtacgattcaatagttgtccacataacctatttataatccaactcaatgtaattctagaagaagatacttttagcatgtatataattggtggaaaatataagtagtataaaatatgcatatctactattttttcaatgttccggatttcggtgagttataacaagactgtaacctcataaaagtttatagaccatgaatatagaacacagtgcagaatggaaatgttataaccggccgaagttaaattttccattataattatttattttgtgtaattattgattaaaataagaaaatgagtaactactattatgacggtccaaattctaacagagaaattatgaatgccatgtcagataaatgcacaaaatatgttgtggttaaacaattgcaatgtggtcataatttttattttttattcaatttttttacaaaaaatttgttaaaaaataagaacattttactgcttataagaatgttttgataattatttaaccaaccatttttcttgtaaatactttatattttattaagattcacttttatggtttgtaaaatatttttatagttttgaaataataaacttgtaaattcataaaattatagtttaactttagttttctgattcttaaatattgaacaataactaataatattaccaattcatagttccagtgccaactctttaagataaattaaattgcatatatatattgcattatggactgaatgtgtgtatatgtaactatgaagtatatgaacatgacgatgccaactctttaagataatttaaatttgattgttcattggaatccaaattcttgaaatttgacaactttaatcttaaattcatcaaaataagataattaaacccgtattttttaaaactacaagaaataattaaaaaagaaagaaagaaatgttgatgcatattttattgaacactagcacactaataaaacgctcctgtttttattgtagctagaactttggttggattatgatttacactagatttgctttaaaaaaaaaagaaattcaagacatatttttttatggatttaaagtttttttttttgctagttctcattggaggaattggaacattcttaggtaacattcctaaaaccagacgttgtgatggtcaccataaattcatatttgcgttgtgtgcaaccggtggttctttggtactaggtcctgagggtggaacaaaccatctcctaactagtggttctttggtactaggacctgaaggtggaacgaaccatcttgtacccggtgattctttggtactaggtcctgaagggggaacgagccatcttgtgacgcgtattggatcaactgattttttaagcaaactttcggactgtcgaaaatcttcagattcatgtaagaggctcttcttgttggcttcaagaacaccaacaaagaggagaacaaacaatgctatcacagtaaaaaaatttgatttcgtcattacaagatacttttacaaattgttagaactattgactatgtttaagttttataacattgtcataaatcttatcttatcatcttagaactaaagaataagatttaatattttctaatatggaatgtgttctaagtatggtacactgaagatattttcccgaaaatattctttttaatatatagtagatttgactgaaaaaatataggcaaaaactattatttaaataaataataagaatacaattcaacattttataccccaaacattttcaaaatttatcttaccatccaagttcattgaagctcaaattgtaatgatgatatctttattcaaatatatgaattacttgtattttattcctttttttgttatccaaaataaatctataaatctgaaaaacttgaatttcactaactatggtttcatatcgcttatctcattgtgatgatgagatgatctatatacaattccgttggaatctgttggattcctgctctaccaattcttacagttgatcaccaattctttataagctaccattttgttttcaatgttatgcgattctaatgttttcaatcttccactattttactacgattttgtttttcctttattcacctgacatttccagtcgcaaacaataagccttagtgaaacacactgcacaaaactgcagcaaatgttgctctcaagacaaaagacattccgggggaaacaaataaaaaaactcaggagagttatttaagataagcaaaaaaagatacatcttaaactgatgccatttcgtttttcagtttcatgtagacacaaccttcttcaccacttttgtaacctcttccggggccttctctgccggtatgttcaccagattctccttcttcgcataatagtcaattacctgcaacaacaacaacaagaacaaatgtcaaattctctgatagtcctcaagttcatgtactataaggaaacataccggttgcgtctgcttgtggaatgcatctagccttgatctaagaacatccgcattgtcatctttacgttgaatcaatggctctccagtcagctaacaaacaacgaagttgatacagagatcaaatcacaagagagaactcgatttactaagtcaaaatgatgaatcagaatttgatggtttttcttacatcatcgactcctggaactttaggaggtgcgaatttagtatgatagcttcttccacttgaagggtgaatccaccttccagtaattctttcttcgagaaccgaatcatcgatcgcaaaattaagcaccttatctatctgagctccccttctattaagcatctcatcaagctacaagatttataaacaaaaaaagtcagaacatttacaagagcgagcagatacacaaacaactaaccacagaaaagaaccagaaaccttctctgcttgagtcacagtccgcgggaacccatcaagaatgaaacctttctgacatttgggtctgttcattgcttcatccatgataccaacaaccaagtcatcagaaacaagctctcccttatccattgcttcctttgccttcacaccaagaggagtcttagcagcaacagcagctctaagcatgtcaccagtagacaaatgacacaaacaaaactcatcctttatgaccggagactgtgtacctttccctgaaccaggtggacctgcaaattccaaatcatacatgaaccaaaactcaattcttcctttctattgaaccaaaaaacacaaattcacaatcccttcgctatgatcatcagataaagcattaacgataacagcaaaatgcaatttttacacactaaaacagataaaaatcggaactttcgctacacaattttcacagagatcaaacctaaagtaccgattgagtgaaagattcagaggtaacgaaagagatgattgtaccgatgaaaacgagacgtttgtcaggtttagaggcacatttcatacggcgaagaagctcagacatgagatcaacagtctgaatatcttccatatcaacagaagccgcactgctcgttgccatgttcgtcgtcgtcgtctcttacaagagaattagatttggtccggtggagttgtgttctctttttgaagtgcgtgtattggattcgatgcttccaatgttttctttcaccgttttacgattttacccttaactgtgccaacaactacaaaggcctgcccttcgaacaacaacaacctgcctggggttggtgacacacccaactctgaaaacgagtctttcttcttacacatctaatatcgcacatttttcataattacataaaatcaaatatcatataatacttccaacaaaccattatgttttaggtcaagtgaaccaaaaaaagcggactagaaaacatagaataagtagagtctaacacattttttcggttttaaggcacgatggaccggtcatttgtccaattaacactagtgttaagaaacttaatttgatattaagtactgaggttgaagattttgctagtttatggtagacttatgaatatcagtataccactagaccacattcacttttcgtcaataagacaattaaactcttgaaaacccacatttttcttttttttttttgaaagccaaactccatcaatgtttggttattaaagatatgaatgaatactacatcattagtttctttcttgataatttttgtatatttatttattaataagtttttgtatttttctaaattcttaacattaataaaagagttttccaaaaaatgcaaaataatactataaaattcaaaatagtacataatataagcttttttttttccaactttacatatattgtaaacgtttttacgatcacatacatctgctttttgaaaattctaaaaatataaataaactctttacctcaaaagtttcaatttgctatatacatttttttaaaatcaaatttaacaataaaaaataaaattagattacatattattttagaattaaattaacataggcccacttcttatgttgggaaaagggaacaacaaatataacaatttagcaacaaagaagtagaaaaaagaggtgatgtcataataaacggtaaaataataggaacgatgagcgagcggatctagctttcgtcaaaatcatcatcactgagtacatctgccacgtcagcttgattgggatctatttggtcgcccgtacacaaaatctcggctcactcactcacactactcaagtcaacgtttctaagattctccggcggagcgattatgtcaggtaaaactatcgccgatctcttcttcttcttctgattcgaatctctcgtccccattccctgatttttttgatttacatttgataggatcttcttcaccgagcttgtggctggcaccgaatccgagcaagagatggggagagctcttcttcctcttctacactcctttttggctcactctctgtttaggcatcgttgttccttacaagctttacgaggtctatgcgatcatcaaatgagcattgtttttaagtgtctgatgtatttaggagacgatgagacagagttgaagtagctattcacttttttttatctgctaaattagatcaacaaagtttatgaaatgatgtctcattgtttaccatgtcagtgttttagagatctgaaaattttactgttgtatgaagttgtcttttaagtggtattgaagaagtactaataagtgttagttactttgcaaactagcagacattcacggagttggagtatctgcttctagctttggtttcagctgttcctgctttcgttatacccatgttactcgttggaaaggttactttttgacaacttttgctttcactgtgagctaacgtgttcgtggtgctatacttgtttgtctactagctacttgcttccaattgaatgcaaatctctattgttttccttaccatatggactcagaatatatgcattattctttcaggccgacagaagtttatgttggaaggaccgctattgggttaaggcaagctttttttctatgtgcatgacattttggcttgccagttctagtttcaaactatttttagaacttgttttaacttccttgagtactggtgagagttctcaagatctcatccatagttgtactgattggaacatgtttttaccacaggcaaatctctggataattgttttcagctatgtcggaaactacttttggactcactatttctttaaagttcttggagcgtcctatacttttccatcatggaaaatgaataatgtaagcacagcattatctcggcagatttgttctattgagtagttttcttgtttccatgagcttatggcaggggttttgtgttgaacaggtgcctcacacaacattcttcctaacacatgtttgcttcctcttttaccacgttgcatcgaacattactcttcggaggctacgccattccactgctgatttaccagattctctgaaatggtgttttgaggctgcatggatacttgcgctttcttatttcattgcatacttggagactattgctatcgcaaatgtacgttgtgatgtctacatttctttgataatttcctataaaaagagctctctacttggtgttttatcatatatcacaaattcctcttatagtctgcttaaagactacgtttatctacttaatcattctagaatcttgtttagaaactagtcacttgacaataaccgctcatatgttctgtttttgttttcaaacttgtgcagtttccttactatgagtttgtggaccgaagtgccatgtacagagttggatgtcttttctatgccatttacttcattgtgagcttcccaatgttcttcaggtaaagaaagcatagttttctatcatctcatagaagcagtgaatcttttcaccttcatgactgttgcatatcaaaactgagacaagtgatagttgttagatacaccggattaattgattgaattttcttgagagtcttaaaatataggaattaaagacttaaatggagaaccaggtctttctcaagtgtcttgaggagttctttgaacagtctctgtgatatgcttccgtctcaccttcttattgctatttgattacctcgagttgttgtctatctgttttcatatgttttattcattgtttgcaggatggatgagaaatcaactgatgaatgggatttatctcgagtggctgttgatgctttgggtgctgctatgttggtaacaatcattcttgatctatggcgtctcttcttgggacctatagttcccttaccggagggacaaaactgccttcagtctggattaccatggttctccaattgaagattgaaagatcggttacttccaccaattcagggaattgacatgggactgagagagaaacctgcaaaggaatttccattaacactttacggaattgggaagcagttaatgcagggcatgtttctaaggcttttcttctccaactgctgatttgtttgttagttgtttttggttttcagtttctcttgatgaactttcccaatgtaacctttcaagttatcctttatagaacagaatggaacttcgttttttgttgtggactcgatatattggttcgtcctcttaagttcattaaaacaagaaagaccataacaccattgaaagaaccaaaacttgatattaaatggtaaagtctcatcacatgaagtagctaagggcttactttacttctgcaacctcccccgtagcatttgttccattgttgtagtcactaacttatatgggacgactgttgcagtgcataactgcaaccacaatcagaacactaatctctggtccaagatcaacattacctggtcctgtgaccatccatgattccttgaacaagtacacgttctcagttctttgtccgtagaccggttagtagtgggagatagaacaagactgctctccgtttttgtaatctttgcatctgagaatattaaggagatacgactactaaccgtaagagtttacttgttcatatatgtcatagttttaatgtggtttgtaatgagtctttggagtgtaagagtttaaaaatgatttaatataagatctaagtctcattcacataagataaccctgtttcaagatacaacaacaattctattataggagcatccttcaacttttaaatataaaaaacataaaacactgaatcagaatcatactgatactaactcaggtttattgtagtttcttgaataaaatctggaaagaataacaaaacattactgccacaagatcagaaaatgaaacaacccaaaaatatttcaagagtgttaagttgccattattgtatcatcaaaatagtactgccactaatgctttataccatcaattaatgcatgactgacctcgtttcttctaacccaagtatatgctattcacagaacaagaaaaatacttccctgaatccagactaaatcacactaactcatatatcaacacgaaggagaagagtatggaccaagaaaattgagaaatccaaactccgattaagccattaaggcaaaaaaccatccatgcaaagagacatataaattcatagggagagagacaaaaacacgtagcaataaaaaagcaaatgagtacaaaacaaaacaaaacaaaatagaagattgtgcaatgtaacgcaaggactcatgaagatcatcatacctttgctttgagaatcaggatggacaacttcagacttgtgtaaccccttctttttcgtcaagattaattacttcttttcgaattcaacgtgaatgtaaaaatctctagagatcaaattttaaaacatcaagcagtctaaacattaaacaacatcagcttaacacagtttaaacgcattaaccactttataaaatgttgaaactatttttgtaacccacaatattataaaacgcatgtttcttgttttctaaagaaaatctaaattttgaattgatcaattttttgtccaaatcttctatgatttccttagggagagccacaacctgattccaagcccaagaagaaggatgctccacgttttaaagttaatcttggaagcgagcgacaatgcttgggatggaatgttaaaggtagcagatgcatactctgttatcatagtctatgtcaaagtatgtggatatgaatagtttccatggtcgtacttgtccaagaaacttggatttgtattttgtagctactcgaacacaaaacttgaaaccaagaacattttttttggtgccaataaaataacacactggtctaagtgacatgtatgtttttatgagatttgctctccaatgtggctcaacctgtgttttctttgggtatatacatactggatttttggccgaagtcttggaaacagattatatctgtgatttggaaaatgcggaatcacccactattataaactgaaattttcttaacttatcatttctatgcaacaaacacacttttactatcaaatctaagtacagagatacgttacaacaagaaagtaatatcatccagctccatatatatagcaaagaccatttgattcaagagcataatcattatataaaacccatggtcataacatgataagtattaagacatgtacataagaattttgacagtgtataaaaagggtgtaagcccgactttcacatatataacttaaacccctgacttatatgttacctggccactatcatctttcaaacagacaagattgtccttcaagcaagagagtcctcgtcaatcgtcatcatcttctagcaagagccttaacttttccttctcgggtggtgaataaccaattgatttccttcaaataggtctggtaagtaactctccaggtcatctggtgtgtactttatgtactttccagcatgcctaccaccttctagttgactcctattccttccgaagaaagcccggtaagccgggattactttctctgatatagatattctcagttcttcacgaagttgaggatccgggaccttccaagccgtttgcagcctgtataactcttcaaagctggcattaaaacctctgaatctctcttttaacgccatcttggaagaattgttgcttctttgtccataactcggactaccacttgaacttccacccatactttcgtccctcaaagcagatagcaccctgctccaggaagccctgaggtaaccggtagcatattgacgtatctgccctcttcgttttctaacccaatcatcacccaagagtttaccaagctcagaatccttcaccttctgaactatgtagtaaatgttgttcatcatgaacacatgttgcagcccaccatcttcatacaactttgatttatcttcaagatttgattccaacgacgtaatcaaccccaatattcttttcgcaagaggagacatctcttctgtactatcatcaccagatacgccacttgactcattactctccagaagcgaatttaaggtcaccgcataatccacaatcaatttcatgtaattcatcacataacgtatcattggatgaacctcaccatttgtcgtcggtctctttgatgtctcattccgaacattattctcaaactcaacaaaagtccccctcgcagcatcacccagtgcttccaacacccccttggtctcattacacacaaaacagtcagtgaccatcacctctaaagtctgcaacacattagccaacgcatcatacatgtccagaatcctaaacaacttctctgatgatcttctaccaatcgccacagcctctccgaaattcaacaactgcatcacacagcttttagttgtctcgttaaagcaaacctctttactcgactccgaactgctaaagatctcatcacatatctttttctcaccaacaagaagaaccctaacagtaatcttcacagcttgaatccacttcttcatcttctcatccatagacttccaatcaatcttctgaacttcttctatactcagcttctcaacaccaagaatcatcaaacaatcatccaaagcatcacgcctaaccgaactataaacctgaacacactccttctcataaccagcgcgaatcatccgctctgcaatctccttcaaatcttcaacagcagttggattaatcaaatcaacccaaagatcacaccctatactccctcctctctcatgaaacaacctcctcctactcccactaccatctccatcagcaaccaaaccaaaattctcaaaatcctcaacaacatcaccatcagcaaaggacaacgaaacacgccgcatcgagccatagagtcgctcagcgtctaaaggaacagtgttacgaatcaaaatccgtctaaattcatcttcaagctgagacatagccatctgcaaagcactatcagctctatccaccatatcaggcttattctcagacgaaagatcctcaagcaaagagataatctcatcaacagctgaaagaaactcggtagcttcctccggagattcatcaaacgaaagagaaaacgaagaggaacgatagttaccagaagacgaagacgagtgacgagaagaatcattaccaccatcccaccgatgaataaccgattctgcagcctctaaacgcgccacaagagcgtcgttttgattctcttcctggttcgtcatcgcggttttgatatttgataaacggttatcgaagcttgagaagataagtaacatatcttcacgaacctcttttggtgtgttgaggcttttcatgatctgttgcgccgtagcgagaacacggtcttcagctcccccaccaccacctccggcttcggcgttgatactcgccgccgtggttgttgttgcggccatctatggagaaattcgaaaagggaaaaatcaaaatagagaggtaggtgaatcagaaagatgaagacatggatcgtgttgtgagatttagagatcaaaacttgagagagattgaattgaagaagaagagtataatttttttctagggtttgagtggaacaaagacagcgaaatggattgtttttggtctttccgaaaaaaagaaacaaagtcaatacgttttcgttgacctaaatgttttggtaccggttattttccggtttaattctcttctacgaatcacagatagacagaaaagtacggtaatgtttttggttactttcggtttagtcttttttttttcaattgctgcaagttttggatagagtttttagactgtttcaaatttagttcaaggagttttatttagactgtttcaaaatggttagattttgtgattttttaattgttcattcagtatgggtttagctttagaatgtttcaaattgtattccgatcctaatatagattcagaaaaacggaccggaccaatgtgattgatttgatagcagcattattgcggtggagtactcttccggcgtattgacgctgtcgtccgcctaccgtatccaacggttgataattatagttgacaataacagattttctaatctctcaaatcaatttttttctgctaaacgacagatatctgtgttcacacttcacaccatcaacattcatctacctgttgtttattcaatatagccaacacaattgatttttttttataatggatatgttattatttgtaaatttaacatgatgattgtacataaaaaggttagtgttaccaaactctaactctattatagtaaagggaaatttgactctataaccaacaaaaaaactataattaagaaactagcacctcacaaaaaaaaccttgatattctttatattttatgtattaattccaatgttgtcctttttttttaaagatattattgaataaaggtttttaatagatttatgaaattaagtgttattcaattatgtctttataaaactactttaaaaaatctgcttttattggattaatgtttatttgatatattctaaaataaattaaaaataagtgttattcaatatttatttgatttgtttcatttaggatttgaatgtacttttattcataaaacatgaaaaaaataatccaaacattttatcaagtatttcaaaatccacgtaaaacattaaacattaaaatcaaaacccacatattatcaagccaattcaagtctattaaaaacctcaatctaataacaacctcttaatctcattttccccatcaacttaatcttcactttcatattatcactttgcctccttttttttttgccaagttgtcataaaaaaatgggtgcaaaattccctttctataccgtcattatcaccgttagtgctaccattacaatcgatgtcatcgttatcgtcaccactactaccatcgctattgtcaacatcaccgctacgttttatctcggttgcttgagttgccaatgttgtatcttagagtatagttttttttggaatcagatcagtttaactccatcatttggatcacttagaatataacgttctttattcgtcgtatgtttagtttagtattatgtgttctctattactgctactatagtatatagtaagacactacaatgttctatactattttaaaagacatgctttgggtttgaatttacagtactgattttaaatataatttataaaaaataatatattacaatatttattcttatgtgatcctatatagtataagatcatatagtataacatatatatttttttgttacaaacacttaaccacgtaaatgtttatatccatttgaaaaattcaatcactacatcaattcacgtttctcactcatttacgcgtacgtccacaattccaagtgcagctacgagtgtgtcattctcctttcacacgtgcgtttgcatcctttacaagttggaaaagagtttttcgtctttctatcatctatatgtgttactttcttcatttaccttattatgatgctatatatttaataactttagctagaatggttattcacctaattcaccctatatcaaatttacaccgtaatacacaacacaattctgcactttttttttggtgttaaaagcagtgaatgataaaaaaacttttacctttattgatagcaatgctaaaagaatcatacaaacccgttacatgatcacactattttccgtgtgttatacatatatataactttagcataaagaaacaagaacccataacaataaaagaacatggaatctacttctacttgtgatgattcaccaataacctccacaagaacacttcccttctttaaaatgatggaaccggctcgcgtctctcactaccatctctcgtcctgtaaccaaagatatgaactcaaccaccttgtggcaatttttgcatatcctatggttctgagtaatctgcaatggattccattccggcgtattcaccaatccgtaagctatggctagtttctcgctgtgatatcgccctactcgctcttcttccttttcatctacgtctggaagaaggtgttgctcctcctctgagtacccatactcggaaatctcttccattagttcatccactttttggtatatctgcctgtttcatttagattcacacatcgtaaggttatgagattatgaaatgaagacagagaaagattttagtattgtcagataatttaccttttcaccgtctcattgtaagaatcaaacctatctcctgaaagaaagctgtgagtctgatctccaacctcaacccaagtacaagccggcatcatgcttaatcctttgctctccaatgtctccaaaacccctgcagcttctgcagtttttcccatactgttgtacatattatacatcacaacgtagtttccgagcttctcgggtcccattccatagagtttttcagcaaccactcttccaagctctaagttttcctgcatcctacaggcattcaagagtgctgcccacatgttcaccgtggttttcaaaggagctcttcggataaacgcaatggcttcatctaataaaccgtctctacccaacagctcaatcatgcaggcataatgcatcgcccttggtttgatcccatgaacctcactcatcgatagaaaaatctcccaaccttgctcagataaacctgaataggcacaagctgatagaactgcaagaaatgtgacatggtttggagcgacgtttgctgcaatcattttctcaaacaacttaacagcatcagttcctctaccatgatttgcatatccacccatcaaagcgttccatgagattatattttttctcggcaatttatcaaaaacatatctagcagtatctactctaccccatttgctataaaagtctacaagagctgtgtttgcaacgatttccgattcaaaaccgtttcgaattaaactagcgtgtgcctgcttagtaagctcaagctttgcaagctttgtagaaattcttatcattatcgaaagtgtgaactgatcaatagacacacctgagtctcgcatgtcatacaacaaacacagagcttcctcactataaccatgaagcgcataacccgcaataacgttgttccaagcaacagtagttttctcgggcatacactcaaaagcacatcgagcatcttcaatatccccacacttgctatacatatcaatcaatccacacgagacaaaggtattatcaacaactcctaacttcaacgcacaaacgtgtaactgtttccccacataaatagaccctaagccagccgaggcccgtagcatcaccgcaaacgtatgagtctcacaatcagaaagctcctcccacatcatcttaaacaactcaaaagcttcaacataattcccaaaattaacaaacccagagataatcgagtaataagaatacaaatttctctcagggatttcatcaaacaacctacgtgcatcaataatcatcccacacttgacatgcatcaacaagattctgttcatcatatactgctccggctcaaacccattactcatcataaacccataaacccttttaacacaccgaatcgatttcaaacgaatacaagcttccactaaagcatcataagtactaacaccaaccttaaaactacagcgaatctccagaatctcaaacaattcaaaagcttctctgaatctattacacaaaaccaacttctctatctgactacaaatcgttacaccagatttactgatctgggtatcatccaaaatctgatctttcgattccttaacctcgattctaattggttctggtttcagctttggttttggtttcagaccttgaactacagaagaacaactgagtcttccaaatgggttcttccatcttcttcctcgtaacgagaattttcgcgggaaagtgagaaccttgggattggaagaagagtctcgaatctcgtctaatcttatgctctggtaacgcgagagtggaatctccatgattggaagagaatggggtcaataagagattaggagcaaacagaggatccagatcatattgatcggaatcgcccgagaaagcaccgtggaaagatggatttgtttacttgatgctccgcaatgtctgaagcaaatgggttttgttgctgaaagaagaagaaggaaaagaagtgatttttgaaatagagagagaagagcatcacacagcatcgggagctccgctaatggcagttggaatttagactttgaggagagaagcaggtagttatgaaaactacgtcgtttttggcataagcagatctaatcacagtttaatttaagaaaattattgatttgcattgttgcagtaaacaggtttttatgacattaatcatagcaaaatacgtttgatggaaatagttttatttttattttgaagattgtttgatgtttatatttaacaatatctttgacgtttgaagaaaaaaaaaactacattgatgatcacatttgtttgttaagagatgagcaagaaacaattgtataatctacaaggaatcaaaactaggactgtttctttacttactacctcacaacatcaaacgctcgaagaaatcatgaagctaatgtggttggctcgcagctatctcgaacacaagccaagacatctctgtattctctaaagatagtgaaggagtcatgtacagctccattgctgcttttcttgtattcgaagagaagagaggagtgatcaaaagccgtcaacttcacaaacccgtaatcatagtctctgaagatactccacttgggtttcagcgagctgaacgaagacaagtgacttcctgcaccaccaacaaccacgtgtatagttcctttgaaggctcctgagtagtgacttttctcattgtccatacattggttctggtaaatggggcatgttctttcatagttatgaacatgaccgtagaacgcgatgtctactttatacttctgccagagcttttgcaagctctctcttcccataggttcttcaaaggaaccttcttgaccataccaatcgtttgttgaataaccgagaacacgatgagcaataaaaatcaaccaaggctgagcccttctgtctacagaggcaagacaacgctctatgaattggtattgctctgacccttctctccaatcatgttcagtgtccgctacacagaaccgaaacattccataatccgcagagtaccagaacttagctttgttctcagcaggaaaatcaaacatggtttccgcaggaaccccacactcccctccagagtctttaccaccatagaaggatccagagtctggccaatcccgctcgtggttgccactgaagagaaacacaagttagtgccaagaatctggaaatcgttaaagcgaagacttatatggccggtcaagctaaccttgcgaccatgtatggaacagtagaagcaataggttcaacttgagctgtgaactgatcccactgcgagatgtaaccatttgcgtaagtgatatctccaatgtggaaaacaatgtcaatgttcttcaagtccttgatgagttgatcagtggtgttgagagaaccaggctgataatcattgtactcgtttgaaccatcccgctctcccttcaaatacatattacagaaacatataagtcccgagaggaaacactaacaaggcaatgtttttatatagaaaacaacaagcaagtaccttccccatgtccccgaagattatgacccgttgtaacgagtcttgtccaggataaggagaggacttgaaagtgaaattcttgctccaaactattgatccattcatcaactcatgacccatcctgtatgtgtaccttgaggtagttgatgatccagaaagttacaaaaccgttatccaaacgatgtgtttaaacaagaaaggaaattgatacttctaaacagtgtatatacttgaggtttggccaaagatctttcaatgaagcagtgtggatgaaacctggatcacgccaaccaacagtacgagcaggagcacctgtgtcaaacagtgtagtaagaatcaaaatgcaaattcagataaagagaaaagtgcatagatttctagtttcatacataccacacatgctgttcctggtaaaagtcaaggtaccagctggcgatcgtctacttcgagttcccttacgactccattccacaaacggaacagcctcacctatgttgtaaccacttgtccatgttacggtcatctatcaaaatcatagtgcaaagcatgttttagttcatatatcgatttgagagtcttgttaaggctttgataaatcaggctatggaaaacttacctcgtcccatttcttccctaaagcaagacgtggatagacaggagctttaggattgataaacgatacatgatttgaaaccgagacaagtgttggctgtaaagagcaataaaagagatcaattagagtccattggagataaaacacaaacttgagaggttgtgtaatctaatcaactaacatttgagagtcccccagtgaagagggcaaaggagaaatcagctctctggtttataagcatgaacttcaaaaccgcattcccagtcttcatatagtcaggactggacttggcatacatatactgccatattagaggaaaactaaatgagatgaaatgcaatgtcaaagttgagaaatcaacagtcaaaatgtaatggaaaccttgactggagctgagcaaataaaaggagctatctctttgtcatctgttggagcacaagaagatgagctataacaagagaaacacaaagacaagttgttaaacacatcaatcaatatgcaaacacatgattcataaagagggtttaatggatgtaaaaaaaatactcgaattttgctggtgagaagactccaacccaatcgtctgaagaaggctccggatttgagataacaacatttacccattctgtgtcctgaccctgtatcagcagccatcatcaaaaactaaatcatatatctcgattcggcactggaatcagtttacaggaaagaccaaagaaacataacatatctcagtttggtctgatgctaagtttgtttacctgggaaccaagaacaagaggggaaacgtgaataaaagcagagtgatgctgagctaaatttatggcgtatatatcaatttgagacagtgcttgatctccacgtccattttcgtgacttgaagacacctgtacgatgaaccatagaagcactaacaagaaattcctagccatcgtcgagagtgctaactttctcttctttgctgtgacagatagatgaaatcagaagctaaaaccccccccccccaaagaatcttttgacctttcaaagattaaaactttccaatcgcatgatattttgaattttgaagactcttggtttttgttctcaagtacatccctttctctccctccctccctcgaaggcgtttcagaacagaaattttctttttttaggaggaagacagagcatagagaacttgtgtctgctttttttttttacttgtaataaaataattgtaatcgagtgagcacataatgtcgtaacatttgttgtcattatcaaattcccaatgtttttatccttttcttttacctaacgttctaaatggtacataaaaatagccaattggaaaaaggatgcatattacttgaagaaattttcatttatatttctatagtaaagaattttctccctttgttttgatttgttttcttttcatctttttattgaaagagaaatttgcatttctaacctacaaaaatattataattaggtaactaacactctaaaaaaaagtaactaatattgtttgtattttctgtaataatgccaatactatccatgtttgaaatacacgctcttcatcttctcccttccatagaaaaccaactattctctttcaccaactattaacttttgaacatgggattggttctaataaaatccagtctaccttttatgaagcttttgattttgccaacgattaacaaaagtgtattgggcacagaagcaagacagttaatttccagaaatgacatttaggttttgctcgaaattgaattagaggttttgatttacagaggcaagacttcagattttgttggagtctttggttttttaagagactttggttttgttttttgaaattgaattagtcgagattctcgctaataaacgctgaatttgatcaatttttgttctctgtttccttcatttgatttttttttttgggtctctctaattttttggcgtcgttgtttccttatcctgaaccaataaatcgattttgattttgagaaatttttgagagatactattctattttgtgaatatactatttacgtataccttgtactatatacgttttaaaatgaattgtttgttttgattaaggatgtgaaatgatttgattagtgttttatattaaaagtcttgggttccctatatactatcttagggtttaatatccttccatcaaaaagtatttaattgattatttggattcatcaaaacaaacgtttctatttgaacaaatatatactattctatctttctatgatgatctttatagaatttgataccactatttatttttttaaaaattcgtttccgatttttaaaattcaaatcatattagataaacaaaaaaaaatctgttttttcaatagtattattaactttaaccaagtaatattgttaaactaatatagtaaacaaaattaagaggagtgaatatatattagtcatatatatttctctttcctcctgtcagtgacttctctttctttccaagcggatccgtaggaaggagtttagtgtattttcacaactgacatgtgctatcaaatgaattacacacattatggtgttatatatttaataactttttcaaaaaccatcatttttgcaattcacccttattgaaatgaaaggaaaaaaaaaaaataattaaaagaaaaaaataatgctgatactgcattttccatgtagtttatcaagctgactagacaaccatatgtgctttaaataattggaaaaaaagaaacatataaaatccaccgcaatacaaggttatttccttctcaaaaagaaaaaaaaaatgaaagagtgtctttttgatttttttaggctgagtgcaatatccaatgtaaaacgaagaaaacaaacaaaaccacttaatctctctactgaatattgtggtaagaaaggcaaatattgttgaagagtgtctctctctctacataatgctggatttggtttccttttcgataaaatattattgttgatattggaaaagattacaaattacatcaccaaactagactccatctaatatttggatacagctacatgaccttacaatttcacaaacagttctacagcaccaaagcagagaacatacttacagagatcatctaaacgccagcttctggtagctaagttcttcatctgtttcctatgcgaggctttgcaaaatgcggagccagtctcttctcgagctcaaccaagctgaaaatgatgtaaagaaacatgattaatgagaattataaaagtctctgctatatcataagtgaggtttggaaattctgacttacatctcaaatctgcgcttagcttctttctgttttgtgcggtagaggtcactgtctttcggtatgttgctcatgggatcagctacacattttgtacccaaaattaagaacaacagtacatcactaacatacctcattaagagtagacaatcataaaggaaatacacatgaatgttatctaacttgatagatccacttaaaataattttaaagattgtcaccaaatatattacactttcgaatgttatctaacttcaccgatcgacttgcatccaaagagtagtgtcactaaatgtctattacactatagaatgaactctaactaaacatatcttcaacatgaagagcaaaaaacttttgcatttggggatctagctacactatgttactaatgaactcggatatagaggaaatagcgttacccgaaagcgtagcatggtgtttctcgccaaactctttgtgaacttccattgcagtagctctgctcagccggattaatccctaatcaaaatgccaaaacaagttgttgacattgcaaattaaactaaataaagacaaaagcagtagactttggaagctaaccttcttctccttccttttaagaatcttgagatgacatttcttgacataatgagtcaaatgataacgagaatgcctagaagaaagttcttgtttaacctcaggattcgcatcaagccattcagaaatatccttagatttcaccaactctccattatccaatgactctaaccacgaatacactggtaaccattgatcagtcctctgaaatcgagctggatgttgttgatctgcttccacattttgctgtatatatcattcacaacacatacacaaaatcaatccaaatcctgagaaacaaaaatggtatcaatcaatgagtgacgttacctcgttttgatcagatgatggtgttggtctcatgtaatgttggattgagaggagacgatctacaatctcggagcgaggcatgtgacggagatccgccggtaaggaatctaagttggtgccgatccaagtctcgacttcgccggcgcttacaacggctttggcgtcggggaaagcggagacccaagctcgagccattgtctcccattcctgagatggctctgttcgttggttcgtgtttgagattttgtcatccgattccaattgctgctgctgcaccttttcatcttctagggttttgtcactcgaattcgacattttcttctttttggtgtttttacacagtcgccaaaatgttgtctttaaataaagtactttagttcgcacaaccaaatcttaatactgtaataaataaaatactgtaacaaattctcaagtgttttactgtcttaactcttcttaactcttaacagttaacagtcatttatttgtccaaattttaaacgtcatttattagttgttactatttacttaagctttgttatacatcacatgtataatgtatttaagcttttgggtttagatactttttactccaattgaatgatggaaatttttaccctacatcaaaacgaatccgtttaatcttcgttgtataaactgtcattaacaatgagtaatgtacttttatataataaaaattgcaatgaataatgtaggattaataatgaagtaaacaagaaacaatctccaaaaatcaccaatgtccccggaattagatatgtgttgttgtaagaaactgaggctctttctattgatacacacactcttgtcacaaaaaaatgaattggaaagtatccaaaactggattctataattacactatacaatttaactagaggaacaatagaatttgagaacaattcaaagtttgtaagaaaaaaatgtgcttacttattcatcttctgctataaagtttggctcttcccctcggcagaggtactcatcgcacgtagaggatgttccccaatctttccttagcctcaatatatcttctgtgaaagttgatcccgaggctccaatgaatacgctggacatggcgcatatcgttttatcaagcattgcatccacctacacattcaataatacagaatttagcccatgccatgtttgatacatcaggccatgctattaataataattcaaaatgcaagtatttaggatttctattctcctacaaaattcataaatccggaagcttttttttttttctgttgaagagcaaccaaatgcaaacccaggaaaatcaaacaggttttcatgagatttatcaaggctcaagattcttacctgagagtcatcctctataccatgtcgatataacaatgcatcccacttttcagctgaattacgcggtggacgtttgacaagaggcacaatttttccatctaccacaacaagtgactgaagcagacttgtctcactttctgcagcatctgttgaaagatagatgactgcgccattggatctttccactatccgagcgatgcactctgcagcttgtggaattggatagaagcaacttggcgattttgcattgctgccatgaaaaaaggttctccattttcagaaaactacaagtctaacctggtccctagtctagttttaggaaatcaatctcagtaagatattgtaatacttcggtgcagtgcctacgtgatgtggatgtgatttacagtactaaccagacagattcacaaacaagaatggaatgttgtttagataatcacattttaagaagtatgagctgcactatgaaattcagggtaatgtaccaaagaaagcaagatgaaaaagccataccaaaatttgaggaacccatgtctgcggaaatgaagtgcgatgaaattctttcccaagaaggtctggatgaatctctgtgcggtcaacaagatcagcttactaggttcgattagtgtcttacacttgtggttaataggtccaccaggttgcatcacccaatcttgctccatatcagcatagaagacatccccgattgcaatcacatcatcatcagacttaaacttcatctggacgtcttgcacagttctcttgctcggcttctttatgtcttcactccaaggagcctcaagcttcccatcaatggaaatccccaaacctttcagctttttaatatgttcctcatccacataacaaagctgtggtgatgaaaagtaacatatgaaccgatcaatccgaaaatgattctttttcgccttttccttaaactgatcaaaagcaacaacaacatttcttcccaagcaagtgttaatccgctctatatctatcactctatcatactggtaatcaaacttagagctaggtatcaccaaaactcgatccagcaatgcagcaaagaacatatgtttctctaaacatatcaaatggttactcatttgacctgagagacaaatagcgaatagaaacttatcagatctaggcttccactctacagttttccgatctgacaacttctgatccacttttctacatctattatatgagaaattcaccgaatcaacatcggtgccaccggagtaattgctactccggtgtggtgatagaagcacctcttggatctccttattcaatgaaatctgcttcgaaacagcagatttcacatcctcaaacaaaacagacgatcccaaagcgttctcagattgattaagagaaggattcaccaacgtaccattccaaagagatagaagcgcgagctgttgttgtctcagaagatacaaagcacgaagctcagattctttgacacgattcgacaatggatccagcttaaaactcgagaaattcgccgcaaatagttcacgaggatcagtgagtaagaagagaagaccgattgagataattagagaaacgaagacaatgacgtaacgcttgttgagcgagatcttcccacggtgttggactcgatgtaaaatgtcgtcgatctgaaacgccgatctctgattcccgccgattgtggtggcgttggaggaaactgaatcctcccggtgacggattcgagtgtcgttttggggaatcaaatgctggtggtcttcttcgtcgtccgacgagtttcgctccatcgccgaagagtgaactcaatttcttagaatctaaaagttccgcaacaacaattcgatagatgattcaaagagaagaaaacgaaaatttctagggacatgaaactacattgaagaagaagtaaggatagagtagtagagaaattaagcgtgaagaagaggattaatcattgccgctgtaactaaacgagttagtgagatggtgacagtggttggaggagactgagttggtacgattcatagcgggtttacttgattcaaaattattagtacaaccggtttaatttgattaaccttgggctaagaaaaaaatattgttattttattttatatgtaagtatttcagaacaaattacaatcccacaccaatagttattctagagcagtgacatgtaaaccatcgacattcaccaagaacccgtttcctttgcaaacaatgatgagcacattcttgacagaaaccaattacattatctgcatgtgaaactccaagatgttcatcgcgtggaagttcatctactatatttaaatcaattggagggttcgctgttaaatcgaaagaatgagttttctcttctgaataagattttaccgtggcatttgacatacctatattaattcaaaataaatattatataaaattaaattttcaaaagaaacattttaaaaaaatatacataatatcttcattaacgaaatttaaacttacatgacaaaacaaggatcataagagtggaaaacaaaacaattgtcctcatttctattttcaagattttgattaaaaaataattttaaaaaaggaatatcaattatgttgattttgctaattgtttgactttggagtatggagttcctatggtttcaaatttatatacttttttaaacttatgttaaacatgagttactactttagtggacgttttgttatatatgaaggttattgaaagtattctatttattgttcaaatataacttatttatagaagtgtatttaatatatctagtaatcagttcgtcattagataaaaataacctatgtcttaaacatttattcaattagtataaaatataaataaatcagaaaatccattcaaatttgtatgtgatatttatgttagtggtgtcataagttcaatttacaaatttgtatgttttttttttgtcacataaatttgtatgtatttaaatatcaaaaataagaacaagaaatgattcctttatagacaagtatattataattcatatatatatgtagatcaaagatcctttatacacacacacatgacatagtcacacacaatgattcagtggaatccctttttcacagatcaaagatgcttacatgttcgattcttttgaatacaaaatgcaagcagcatttccaaatgacaatgacaatgttaaagcttggcatttttggttgctgcaagatactcgaattttttatatggacgtatttcataactttagggttgatttcataaaaagatgatgtcgtaaagtccatgaatccaccacattaggtggcgagttcgttcttaatcaaattaagctaacatttatatttatacgtaacttcaaatgccataccaaactcaatgtatctgttttcttttcaagagagggggaagaacaaaagacactacttagtactgagactgagagacaatgataaacagattttaccagattgatttgcagtcatgttgtgttgcgttgcatttgcatctaaatcacagctgaagcaaaggcaacgccattacaacaccgacaatcgatactagcaacaatactatccaacccggtaatgcttctttcttgttccttctcctctctttcaatcccacttcttgaatactttcctttttaagaccaacgcttttctctgattcgactttcgcattgtccttctgaggaaaatcctgattctcagatgttgttgtctgttgagtggctgcttcttcttcagctacttgttgctggctgtacttctcgacatactcgggaaatagtttccggaatgttacactgccacaacagtttgaaaaagatgagaaacataacatgtagaagctatcttgttctctaatcaacttctgagatgtatcctaaacatttttttggtgggaatggaacttaccttttacaattgaaagcaagagatgacttcgccaaccgttgtttctcggctacactagtgtttacacttcccgttgtggggctgttatccatctgtggaccacaaggttgtaatgcggaaagaaatttaatgaacgcaatggagaataaaatatcacagtaaaaactaaaaaagacattgccatgttaaatcagtaaagatctaatgaccaaggataaactgagaggctctgcaagatgaaacgttccataagcttaccataaatgagagaagtcctgtaagtatgctgcgttcagggaaacaaattggtcaaataaggatccattactctgtttattttaataacttgaacacaatttgaatgtacatcagatcttataccttgacactgaccacattggattccagctttctggatgaactgtacatggaatgatggaatgataaagctaattagataacagacaagttcattgaaattaataaacaaaggaatgaaaatgaagactgtgcttacagtcactcatagacaagcagattttcttttgcgtcacaaatcgaccatttggtgtggtcattctgcagcaacagtagtttagttgattggaaaccaggaataaaacataggagagtgatattttaagtgagaattctgaagaacgaaagagcttacgtgattccaggtggcttgtaaggatattctggagggaacttgatctttccatagtaaaatccacctatcaaagagaatccggatatcagaatcatatactactttggaatgtagaagatcacatttgaaatgtaaatctaagatttgaacctgcaaaaggcgttccctcactgccttccaacacataatctgtagaataaaacccaatagttcaaactcaattgactacatttatataaatagtgcagtaacactagtagcgaggataaaaataccctaacttgtagcagaatagcatgaccattctcagttaggtaatagataagaaaaactttaggtttacttttcggtttctataaacaaagcaagttttcaccattacatattactggtaatcctgaaaacatgataccaatagtatctctgtcaccatagcaacacgctatatgtacctaaagccagtatccccatagccaaaccttcaatagaataactagaaagcagaaaataaagaaaaggaacattaaatagccagataagacttacgccattcaagaatgtcatttggggaaggacgagcaacaacatgcgagactggttcctagcaatccagaacagaacatgtcaaagatacttccaaagtaacattcataagaaaaaaacttatcctagaccaaaaaccatgaaaactagcatagagcaaagaaaccacatttgataaaaaaaaaaatgaaaatcgaatgggtagaatgataccagtgacagacaaatcaaggatgggaacagaataagaagaaaataataccttgcaaagcgctctgtattctttttgaagacgctttatacaagctttttctgccatctaaatgcttcagggagttccaataaactgtagttcctgtcaaccaaaacaacgaattgtaaactgtagaaaatataatccaacctttaagtatgaaatgaatgacagtaacataaaccaaattaaggtcatcttcgataaagaaaccatcctgcttaagtcatacatctggaaaactgacatgaacaagcatgtataatctactccatgacattgccgtatagttaagctattactacaatctcaagtcacatatagagaagcaacacttcttaaagtatctgttctaaatacaaattgacaaattgatacacacacacaaaaaaagatcaccgttcaacaaaattgcctaaacccatgaaattgtgatgaaaacaaaaaaaaaaacttaaaattccaattaaacaaaacaaacatacacacaaatattttgcaatcagataaaattccaaaacatatcaaagaatattccctaaagatccctattgattttgagtcaatcaagttaatgaaatctaagaaaatcagaagaaagaaagaaaataatcggcgtaccagtttgatcaaagtttcgttattggatgaccaagtataaatcaaaaacacagggaagtgaaatcgtgacaaggtaagagcagatccaaggaaagaattgtgaaaatcggaatcgatcaggagctggagctaatttgagattctctttctccgtgtgtgtttctcgttgattgatgatcaaatcattcgtttctcatatttcgacgcggtacagagacaaggagagaggaaagagagagtgtcgaaatatcaaaaggagattggttttcctttaaccggatcaaaattattccagttgagtcggttctgtatttaattataattatcctatcccggttcggtatttgtcataatcagacctttggggaattgactattttggtcaaaaaaaaacattgaccattaatacaatgatgctaaagtcaactgtttcgaatcactttaaatatgaactgtcttgaagctcatgttagtcgccgaagcaatgacccaaacaaatgtagtagcttctgtgttaaacaacgattgcagtctcggagaagttttgaacaagttctcttacactgcgagcaatacatcattctcggatataggaggaacacatcaaaagttggggaagaaaagttggcataaatcgagagcatactagacgcaaatgaaatggagaatatgtgtactagtgttttgaaaatgtcttgtaagaggtataaacaaaacaaaaaaacgtgttacaaaactctctccatacaatctatggtaatgtaattaaagttctctggttctagcgtgtccatcttatgaagagatacaatatgacaagcgttgcgatcatacccgcatatttaatccaggtatcaacacgattacgcctctcaatgagcctcaatacagagttagagagcccaacagtgttcagaacatccaaagccttcctctgcgcactctgagaattcaaaaacccaatgttaaaaaactgttttcttcattgacttaaagcttaagttagggtttggttaccttcaaacgatccctttgttcagcatatttagagagaatagcaactccactttgaaacgaatcttcaagcattctctttgaattcttaacagagttcattccttgagcctcctcatcaaatatttgcaaaatgtgagctccttctccactccctctacctaacaaatccgctctctctttagcttccaacatcttcctctgattcctccacatgtacttctctagactttggttcaaatactcagcctcttctcctacttgttcactcttcctacagcaaaaaaaatccaaatgctcaagagtttaaccactacttcagctattttgatgatctaaacttcctcaccttctccaaagatcacgctgggatttgacagggatcgaacgccagagaccgtccatattggaacaaagagattgaacctcggtaatgtctcgtttcacggaggaggcgaggtcggtaggatcagagtcgaacctctccaacttctcgattccattccgagctcttagtagaatcctttttgcactactatatacctcagacaaccctcccactgtcccagacgccattatacaaaccacaaagtgaccaagaacaccgcagaatcttcttctctttgctgaattatatcaatatcaacttctaatctggaacatatatacaaaaacatatttaaaccagtttactcaagaattaatagtaatctacatgacattgacctataatttggctcttaagtaaaacttgaatcaaaagttaagcacctttcaacaagatttgcataaaacttaaaatctaatccagacaaatcactcgatcacgaaccagcaattcgatcaaaatcctagaaattatgttaagaaaacatctaatcggcaattcatttgattcgatcgactgaaaccaagaaattcaacaaaatcgcattgagagaaatctaagaaaagctttagaaaaaatttatccgtgtaccagttcaatggaggcttgcttgggtttggaatttgaatttgttacacaaagcaattcgtgaccagatccgaggaaagtttgtgaaaatcggatgagaaattctgcgagggattaaaaaagaatagcaaggagttggtttacttaaaccgggaacaaatcccaattaagcagacgcgcttggctggttctgtttacaattcggttttgtaaacaaacacaagaaatgtaacaaattaatcaaagaaaaaaaatgttctaaaaatcacgatattttttttgtttctagtaatcacaatggtttctcccttttcataaatggcaaatctcccataaaaccatcttttgtattttctattttttcatggttattttcctttataaaaaaaaagggatatcatatgtacattgtatggtttttagtattctcataaaataaaatgtcttttgaatttaaaagaaaagaaaaacactaaatatgagttcagatttatgagctaattctaaaaacactaaaaaatccggccggtaatttgagttcaaaaacactaaaaacactaaatatgagctcagaaaagaaaaacaattcgaccggtaatttgaacaaaaataaataaatccgaacgataaaaaattaaggaattgctaattagcctctacgggatcattgggggattgacactatcatggtcaaagattgatcaaacaagctgtccatataatggtttgattaacatagttattactccagcaagatttagcttaaatacgatttttaggtgtgtatattttaaagttcttttgtttacatcataacgttctcataaaaagtggatataaaaaaaaaagtatatatatatatatatatatatatatatataagtttcactttttcaaaattgtgccagttgtaaaagaaacgcagcccatgctaatgaaaaagttccaaggtatagtagtagtagcttcacctaaaacaatttgacaaagatatattctttttattatttattagtttccgattttaatgcaaataattattgaaaatttgtattagtttacattgttaaaaatatgtttgattagaagaagatcttaaattttataaaactttctctagtacgtaaaactcaaactctcaaatatatgaaaattttgttttgcaattttcccatgcaagtgactcaagtcccaaatatttgactgtcttcttctcgctcgtccagtcgtccctataaagcttgttaggaaaacaaaaataaaaatgaatgaaaataatgttgatgccttagcaattagcatagagacaaaacacagcctgttaatgttttacctgcaacttttgagatctcatgaagttggatttactaatattggtaaacacataaataaacgtgtatacatgtgcttgtatgaaagtgaggacactctcaacatcagtgaatgttccataaattagttgattaagataaaaaaaatatctcagcatctgaaataaatgattcggagaagaaaaattaattcacgtgatcagatctcaaaaaaagtcgcaggacaatacatacatatcttacaaagccaacaagctttacaagttgtctttctctatctccttctctttaagactttaactcatcatatttctacctaaaagttttctcaagacctaaaagagaattcacaaatgaagagattccatccatcaagatcgatctcaatagctctgtttctggttttgttagctttctttagcagcaagtttcacatagagggacatagagatttgagagatttgcaaataagcaaagagatgaagcagaagtctcttggaggtgaaggagatagcttacggaaaatcccgaggagtcgctatagccccatacagaacaagtaagtacacgatcaaatattttccaatcttttcacacacaaaaaaaactaaattatttgagattttgacatcaagattgtgtatttttgtaccaggagaggtccaagtaggaaacatcagatcacatcacatgaaccatagatttcatctctagttttttatttagatcttctgattttttgtattttttttttgttgtagaatagtattgcctacacttgtttgtgaatgcagcaatgtagagtttgatactgttactattcttagaatgtttttttcttttcttactggaaagtcttactctgatactgttctattgagtcaaggctctttgtttagacctctaaggagtgtttattggattttgtagattttgcaacatcttgaagcttatatttgtatttattacttgactttgtatctgttgtttcaccgcatttgttcttcctctgttttgttcgattttcatcatgtatctgctcgtcttgatttcaactgatcagattctgttgtcataacaacaacaaagaaatggtattgtagggtttcaaatgaatgaagttaataacatatatatcacctctcacaaaatgccctcgatgtaaaaagaaacatgcacaagaaaacttgagaaatttcttgaaggatcaaactaaattagttaccgagtaaatagatgccgtggaacattagagttgtaagttactgacttactagtatgagagaagaatgacttcctttgttcaataagatcattggagataaactaatataaccatatctgtatacaaactttcatgagccactacttctaaaatcgcctaaaatggatatttaaaaagagttgtaacaaaatgaaaaactccaaatcacatcatggaagccaacagaaaacggttttccaattgtagaagtgattgagaataaacaaacagtttagacagacataagagatactgagttactgatgatgaattcaaagatatttcatgtcatcctactaaatttgtttaggggtttctcacttttgtttctttgtttttaccttatgttccaaacttcaatcttacagaagctgcaacaaggattgaagtccaagaagtatgctttatgttactttgataaggaataagaatttaagagcttcaagcgtggatagtttagtgttgttgttacttcttctcatactatctatgaattcaaaacatgaaacaaatttactgcaatgttggaagcgatcgtttgtttgtcatatcaaccatgatgtatcttataaaacagataatgtgtgcgaggaaaaaaaaaaaaaaaaaaaacacagataatgtgtgcaacttaaagtagaagttattgtggacattgtgtaattatatttgatacaaaaaggctagagagaaaaatcaaagggtcttaacgagaaagaagagatagctaggtcccaacaggaacaaaagaaacattgtctagagagtaatggtttataattttagttttaagttccaaccagaagaagctggagcagcttggggcaacacagctatgtcccatccatctgttgctggagccacatgaactacaaaaaagacacacaacttacaaaagcattaacatcgaaatcagactcaaaagcattaaggatctttgtccaaacttaccacttgcaggagcaggtgcaattggatgattagcttcatcatcatccaacattcctagttagtggtcgtctcttcaggctccttgtactagaagaggttgttctatacaacgaacgtaccatatgattattgatcaatacgaattcatgtaaccacatcatgatcaaactctccaatattggagcttgagagatattccccttacaatgacgtccaccacatgatgtctttcagtctttgtgagttctaaaccgcaacgataactccagccatttgctaattgctaccgcttcttctttgatgttttagccatattgtaatttcggttcatgattaccgaatttctgtgcttcctcttatcgagccaagaaccgaaatcaaaccaaattgaacaaactttagttcggttcggtccaaaagtccaggctagtttcgcttttcattgatttctcgtgccattctctaaaagattctgaattttggcagccttggccttgagcctcttgtcttattggtactttttgggtaaataaacgaaaataccaaatttgtagctttctgttggagttaaatcttaatatcgattttgaagattaattgttttacgtctgtattatatatgcttcttgtgtacgaattgaaattacgtaatttgatggtggaatacatgttttatttttgtttgacaaaattgatggctatttgtcaacatacttccatcaaaaaatatcatgaaataattatatgcttggttcttggaaatactaaaagtttgtattcgtatctgtatcgtataaatgagttaaaaccttttaagatttatttctatattcagcattatacttttctacagatatttatctcataagataataagtcacacctttgcgaccccagttcatggtatatgtaacggcaaaaaactatattatttaaaataacatgccagtttagtatcagaagattcagaaacgccattagccaaaactaattaattaagagaagaaattaacattaaattttttaaaacataattaaataacccaaaaaaaaaaaaactcaacagtcaaagaaactgttggcatttcagtcatttccttgaaaaaaagcgttagagccgttaccgctcaccatgattatcatcaatctccaccgccaccgcttcaccgtcgtcgccaatctccgccgctgccgcaacccacaaatccaacggcgtacattcaaccttatgcttcgctctccaatccaacgcctgacaaccacgcgagcaataattaaccttcccacaaacagaacatcgccgaaactcatgagcccgagtctccggccttccacaaccaccatgcgaacacatccttaacccttccgctaaatcaacccgacccgaactaaaccactcttttaaaaaccggttaaccggatgaatctcctgaaccggaaccacgcttaaatcagttaaggtctcgttctcgtccccagatttcagagagaggtaagagcgtagagaacacgcgagctcacgcgcgttagcttgaatcaaaagacgacgaccttcggagacgtcacgaggaacaccgtaaccgtcttgaagacagtgaccaagctctcgtaacgcatcgacgtggcctaaataagcagagcgtgcacaaagagcaacgccggcgcgtagattcttatcggtttttgaaccgccgcttccgttaaactgaatcaccgataacgaataaagcgccggcgcgtgtgatttaatcgccgctttagccattaatgacgcgccgctcactggattttgtagacagtaaaatcggatctgaagaagaacaaaaaccaaaatcagatttcagaagaaactcacgaaaaatcgaaacggagaatttgaagattgcgaacgaaccattccgagagagtacgaagcgtcgatgtttccggcattaacacagagtttgaggaatttatgagaagaatctgaccatttctccgccgtgacggctagggtttgagtaccggctttagataaaaccagaggatgtaatcctaaccgattcaatctcttgcatctgtaacgacaaaaagactccgtcaagaaaaagaaaatagtttgctgaaaaacgagaagatgcattcgccggagcggagacttacgtggagagaacggtgaggaaatcggaaggagaagaagcggaggtagcgagtttgcggaggatagagatgatgagatcgtcatgtaagtcttcgaaatggttgttcacagtattgttatggttattctctaacctctgttttttgttgagatgcgtcattgaagattgataattgttggttttgtttaagttaagagattgagagagtggagagaaaatctggagaaaggagatggtatgtacatttatagacacacatacactcgtgatttaagaaactgctttaatggattcaaaggcctcgtggctctttctttctccttcttttttttttttttacactatcggaaaattagggtcaaagccttaaaagggcagtagcgtcattccgatcttcatttatttttttttcattttaccgtcggttactttaaccaccatgaaatttgttttaccataatttacaattgagatattatagccagtaatcaaggtgattgggatcaattgtaatacattgactaacaattaatagaatagaacatattcatgaagaaaatagagaataattaaataataacaacagggtaaaagataaatagttaaagtttttttttacatcaaatagtaaaagtttattaaatattaaactagttatatacttatctttattttttgttgaaatgttaaatttgattaattaacataaagaaaactattacaagaggtttgtaagaaaatccacttgtctttaatttccaaactatatgataactttactataaagtttagatattacctattaaaaatattttaagaaatagataaaaaaaacctatatgattataaataaatgaatatgaattttaatgggatttttcttctaaaaatgactcatatttgtttttaaaaaataataatatttgcttactaacttttaaaagacaactcattttcatgtaaagaaattatgcttttggatatttatttttagtagatatttttcttgacttcttaaaattagatatttattgatgaatacaaaatataatctaataaattgtatttatatcgatagataatataatatttgtagacatcttctaaaatgagatgtaagtcatatcgataaaatatatgttttaatggtaataataggtttcaaggatcaattttgttcgttttttttttttgatcaaccagttttgttcgtttcatagttatataggctgtggctataagtctagcaaatgatcgttaattcataattttccacaatttaaaaccagaaaattgtagtgtttaaaatctccattcgttaatcgttttaacttatcgtcgaactagcaactactataacaaaacaaaaaaacaaaaaacaaaaaaaatccaaataactcttgtaaaagtgtcaaatatattagtagtgttttcttaaaaaggatataagaagattacataaattaagaccattattgctcgttagttactagatgcattttgaagaatttacaaaaaaaaaagaaagtagaattaatcacatgctaataaacagtatcgtttcgtaatatatgattccattgtacaaccacgattaagttcatcttatcacactatcaaatcgcaaagccaataagaacctaacctgtgatcagtgtggatgcgaccattttctctaataacggtttaatgttaaaaggtggagtgttatatgtatgtgattgactttggccaaaatattgcatcccacgacatggctttggaaagaaatatcactaagcaaatatgaagagggacacattagtacggaagacaaaaaaaaaagaacaaatcatgtggccgtcacatacgaacacatttggttggccatcgtttaattgtaagcaaagttactaaacacgttttcatttgttatttattttgtgtattcttttggagtgaacttgtagaaaagggcaccctaatcattacatattggtgtagaccaagaaaacaatatacacctttcacttataaggttatctcttcagataagcatctggaaatataataatatctacttcttataaatagtgaatagattagtcaaacttttcttttttgttggatctatatatattagtcagagttaaggatgcaaatagtcgatggattaggacacaaacctcatgtttataatgctaaatatagcatattcataacttcatttgactatcaaataagaggaatcgatacacttttttatttttataataagattcctaatacacttgttagatacttaagtatatcttagtccggaatcaacatgttactaatatcgataagtgacacaatttagatatttattttggttggtgtgtattaaatggaacatcatccttatcttagatacaccaagcatgcatccccaataagaacacgcatagtccaagttgagagacaagcaggggaaaaagagttttgcaatacaagttaccaatcagctaagtaagatactttattttgtttttgtaggaccattgataagcaacaaaatattacaatattttcgtgttctaaacatcaataatagtaataaaaaaaagatatttatttgagaaagaaaaaaggaagatatttattaaattgattgatatgaaaatagaaggaattgagcaggtttttggattgcatgtggataagattttgaaggatgaagattggagttggtggaagactcatccttttcaccaccaccatgaaaccagacaaccccaaaactaaaatgaattattttttaaaaaacattaaattataaataagtatgaatgttttaatttcttttggggggtcgacgagtttggttgataatgagtgtcgcattttgttcccacaactgtaccatttgcatgccatcatcatcttttgttcaaactcttttttttttttttgtttagcagaatcatttagttatacataaaaaaggtttgcttgcaagaattgctatgaacatatataatttaatgtgggatctacttcggtttagttcgctgagtatcaacaatacgcattaatgtttttaaaatggctaaacacttatttatattgtaatcaaatttacttgagaactatgcagtacacatggatctatccgactatgtgtattacttctcaatttgcctagtgaacatattttccatgacatcctcgcattggaaataaagattcaagagttcgttacgtcaaccttgaaattatactattcaaattcaaaaccaattaggaagagggaaatttgtgaggaccaaattttttttgttttgaccatctctaatcctaatgtaaatcattactaagcaaacaattacctacaatgggaaatggtcgattgttcttgctgagatatgctttccagcttctagtttatttgatatggaaagaaagaaacggcatacgacatggtgaaacaccacttcaatcaaactacttattcaaaaggatggacaaggaggttcgaaacagaatatcatctatacaagaacaagggaatagaagatacgagaaatgtatgtcgatatagtttgctacgatataagagagatcttttttcttcttaaatagttagcattgtttagtctcaaaatttaaactaaagttgtatttgatatacacacgtttttcgaataaattttacattttttttaaaagagaaaaaaaaaaaaagagtgtacacctagtatatatatttgttttgtatatgtacactattcctaatcacatccgatggctaatactactttgcattaagagtaatcaatttttttcctactacccaaactatataatatacgaatattttcaaagctccttacaagtgttagatcttttggtattacgaaagattggttcatatttgtgtgcatggaaccaaaaatttaaatatttctgattagaaacaacacgtaacttgaattaactacgataaattgtgattgtcgtttgcataatttcatttatacacagttaagggggatacataattaattcagcacagatttctcctgtctccgggtgaccaccaagcgtcaatatgagtttctatctgtcgatatatacatctaagcattacgtagatacacgaacattacaaattaaactaacattgataataaaagtagaaaggaatgtaataatttaaaatgaaacacagttcaaccaaaacgtgacgatcataacataacaattatgtcatggcgatgctttgtatttgtacgtctgtcacagaccaacatgtgttattttaactcccaagttttgaaagtataggtattttagatattaaatatagttattctaatcatgacgctatttgaagtcattcgccatgtacacaagcaaacttaagttctgaattgacacataattttttaaaatattgaaaaatcttttcaggagtttggtatgttagcacccacaataatgttattaaaaatgtcttacgtatttgaaacagtctgatacatatatagttattatttttggccgcaatttgtgtctttttcttttcatgttttagtgtaacacagaaacgtaaacgcaaattaaacaatcataattattctctaatatggcataaacaatttaaccacaatgcaagaagtggttaccaatcaaattagatgcatattcatggtttcaaattaatctactctaaattattttgatacagtttatgaggtttttcaactcaaaactaaaactaactattagtgaatgaatcgcatcttgcattacatattagtttaggtctatttgtaattttgacttgggttcttgatacgtttaatctcaattcgctaacttggagaccaaactaccgatttgataagcctctaaaacattgtttccaaagtgcaataattcgagtcatatatataattatatactcataagtagagggatagagattatagtgaagaggtcaaaatggtagaggagttcttttgatc

SEQ ID NO: 870 - DNA, 46323 bp, Arabidopsis thaliana
acttccattaaacaccgttaagaaatgcaagacgagtcacatgtgagcaatgtccaacatcgcacgaaacaacaatgactatgatcttttaatatatacatttcatgatatttgccgatgatttattggtaatcatttttattttttggttattatacagcgaaaatataagacttcttctaacattaataatcaattctaagccaaccagcttatctaaaccccttagacatgctttctagtactacttcatgtaggtttgtataaaaatggccacaatagccaaaacttcgtcatacagttttcttgtagcaattaattattgcatctttgattttttagtttaactttatgagatgctataaactagaggcttctctatgtggagtccatttcatggaccggctaaaaagtctcgaaaacaaacgaaaaagttccaaacaaaagaacttaaagagagaagatgttggagcaattgagaaattatatgatgacatgatgagattccaaagttaagttgccacatgcttcatcatgaatttagggagtttcaccaaaaggagtcaataaaattaattgaagagagaattgctgcatgttcaagatttaccaataaagacaattttttaaaagagaaataatatcaaagaaaaagaagaaggcatgttagggaaaatgcttggcctcctttaggcaaaccgttcatgtgtttcgttgtgtgttattttattttgtaccaaaatatgtttgttagtttgggctccaaacacacgcaatgtatatgttgacacttgagagtctatgatcatatgcatagttgcataccttatgccaatagctcactacggccgcgactcacattttgagaccctaggcaatattattttcttttttcatttataattatacaaactctattttaaatgaaaatgtatgtatataaaataggactttttgaaagaaaaagtcatttaaaaagcttaacctgaagctattataccactaatattcccaaagttcttttgttggtgatcgttcttagttctttaacaaaataaatgttcccaaagttttcttaagatgatatacgatactaaacatgatttagtggatagattcaagaactaagaacgataccaccaaagtttaaaagttttaaaagatgttgaagaaacaaagaaaaaacaaaaatacgatgagtttacaagttctgcaacgaaacaaacaaaatgattctaatagttgtttcttgtaatttttggagaaaaatgtgccttttaatgtattattttcaatagttgtctttgggcagctatttggatcatgcctaatcttagtcgggaaaattaaagaaaagatgattctggttttaaattatatcatctggaaagtgttttctagctattatatagctgtctaaagtcaaagtatttggtggtctttgtaattccttgaattgctactttgtggtttatgtatttttcatacatagcagaaaattacattttcgtttctatcatggtgttctgatatcgtgtgggagattttatattagtgatattaattcaagatctgagtaagcacttcaatttaatgagaaattggtaaatagatactgtagtgttattacacacacacacaaaagatacagtagtgttctggttccgacatatgaatctagaatctgacaatgtaggagaattgtgcctctctatgtaattgggaaacttagatttgttttttatcatagttattcaagagaacccaacaaatttgaggagacaacctcgcattggagatgctcttagacatctaagattctagctgcccacgataataatcaattggcccatatttattacccaacttggggagactataggtcgagctttggatgcaaaagtgagaacagaccaagctggactacgaaatccacagctttttaaattagtttgctctacattcaaaacacgtcgatttttcagttgtgaacaaaaaagaagaaccaaaaaaacattgaaacaaatgggatccgattacacaaaacacagaactgacttgtgcctttcacttaaaacacgataacctctaaatcttcctttctcaaaacatagaactgacttgtgtatcctttgctttctgcaaacacaccaataaaaagagcttagaagaatagttccaaaacttaaagcaaacaagaattttcacatcatgtagtagaagaaagcacatatcttcctcagccttatgctaaatcacaaatctcttacactatcagattctagactcatatatgcattagtctgcaaccaaacaactacattttctacctatatagaaatttctcattgactcaatgttgaatttatataactaacataaaagcttccacacgattttcttttcacgaacgaaataagaacaccacgatagaaactaaatacaagatccacatagtagcaactaaacataaaatgggtccttacaacaatcaaacacaagaactgatcctacgtctacattaattttctcatacaatgtcatctacacgaaccattatgaagaattccatcaatgcacaaatcatcatcatcatcattcacataaggagctaaaattcaaatcgaggaattttacctaagtggcaccgacgatgatgttgttgatcggaatgaagattagcttcacaaagaagccaacgaatcccattaccacaaacccaatcgcggtacgaactgcaactttcgtgaattctacaaaaccgaaaccaaatgaaaaatcaaaaccatattcaccaatacacagatctatcttcccaatcggaataatcgaaaccacagatcatccaaatcgaaggaagaaacggagatatatataaaaataacctttgcgatctggcttgtggcaacgcttgacgagacgaatactatccttagcgaagtctctgagaggatcaacgacggaatcaatggcgtccatggcggcgattctttagcttcgattcaaatgatctgaaaattgaaattgaatctcactgtttctattcttttggtttctctttattaaaatcggaggaaacgatgaaagatcgtcacaacgaccaatcacaaaacgagctttgatgacacgtcggatacgtttaacacgtcagctttttaaatgggctcgtaaacaatttatggcccaaatccactacaggcaaagcaaaccacatcaagtaataataattacgttttttgattatataattcagttcttgtaggaaaaaacatcgtaatttaatatatacaaaatgtgcagttacttttggtaatgagatattggatacaaaacaaagaaaattttgcgtttgaaggttgctgaatgctgattgccgcaaacgagatcatacagtttttgttgccactctactgatttgcgtctctttttcgatatatcatcgttacaacttcctcaactaaatgttttggttactcctcaacttctattcaacgatgtagtagataatttatctatttgtaaagaaacttaagtctccagcatttgaaactaacagaaagagtgtgattttattcagatcatcaaagcaatgatcgccatatgcatattcatctactaatactactagatggtcatgtttctgacaatagaataaatttatactgtatctgtaggtcttgaatgattgtttgaaaaaatttcaattgttgaacaatattgtttttctaggattttatgtctcttcctcctttattgcctccttatcttaacatagagaatacctcagtttttcctcattctctttgagatatgaattgagtgttgcatattcttttgaattttatccattctgaaaatctagaagcatccaaaattcgtttcttcaaatcttcaaagtgtttatccttttttaaggaatacatattgtttgttctacatattttatgcctaacaacttgccttcactctccattttcacaataaaaatcataacatttttttttttgaatatatttggaaattcaagtctttaggtcctaacattacacactttaaattcaaaaacataacttgaaaagtaattcaaattctcacgaaagcggttagaaatcttaaattacaaaccacacttcagtttttgccgttgtttcctccatactcaaaatctttagttggtttttttagaaactcataaaacgaatacatttgaagttttaaataagaactttttctctctaaattaacggtaactatggtactcccattgtttaaaaaaatatgatgtttaaacacaaagtttaaataattaatttatctttttatatattttttctaaattaaaaacataatttaatatttagttaattaaagtgagtttggccaatgaaattcgttactgcataatatatatatagtcataaaagtatataaattctacgcttgcatagaaatttgaattatttgtctaaaacatcttatgttaagaatcaaaataatttggctaaaacaacttataatataaaaccgagaaagtagtgttttggagtttttatttatgttttctggctactctttaatgtagccatttaaagtaaaaagaaaatgaaaccaagtatatatataagagtgaggacccttttcataaacagaaggatttattgcttctaaaaattaaattgtctagattgttttctatcttttcataagaagaaagatttattgcttaaaaaaaaagtaaatattcaaagatttttttttatctaatgattacgaagtgaaaatatttggttttattatgtggctcctaattggtcgttacgaacaatgtttgttttacgaacacttgttatccacaacaattttcaaggtgttccacaactatattttcaatagatcttttacacattagatgttcatatcttgaaaacgaaatatactatgtgagaaacaactcatgccaaattgagaaaactggaataatatatcagcggtttgcaagtaaaatttcgttgcataataaaaccggagtataactttcacgcgaaaatccattttaaaatcaaaatgctggaaaatttacgaacatagattcgggattcaaaaagatctcttactagatcctaagatcatgatgcctacatattcacaacgtatacaaaattaataccatgagccatggggattttctactttcataaaggataactagaagatggagctagtagtatatgttttttatggtaattgacatttatgcctagttcattgtgttttttcgtaatgaactgcgaatattttggtgattctttggcataaactaatctaaagcaaagaagaaaataagagttaactaaaattccattgtcttccatttgctttcgttaatgccatgtgttttggtgttgttgatgttatgtttagtcttctatgtgatatttcacatggaagactacacataacaccaacaacaacagaacacatgacattaacgaaagcaaaacataataacaacaacaacaacaaacatgactcgatagagatacaaattctcacaaaagcattacaaccctaaaacccaatcaacacttttcaattaccgccgctgcttcctccaatttccccagctgcctcctctccgtcaccaggcaccgccggccactcctgcatctgtggcggtgacgcgtacacaccattacaatcaaacaccggatatcctatcaccgttcccggaggaagtacttcaccgtccggatgtagcacgggatcatcggtaacgacggaagggtctcttgggacaacgtcgccaaggaaggtaaatttgaaactacgagtcgttgcggcggagatatcggatctcgtgagcgtatcggatctcttgagagtttggcgaccgccctccacggtatgaagccacgatcgcattgtgagatcaagaatgagcatctcacaggccttcgatataaggaccggagcctctgcagtgaccatgttcacttccgggttggacttcatgattttctttatcctggttagtggaaacgcatgatgcttaacatcagttgcgtttcccatctgcgcaatccaataattccgcatctgcggtgagtacggcagcggcagtgaatatgacggcaacggcattgattgataatacaatggtggcggcggcagttgggaagacgatggttgcggcaggtagtggttgttgttgccgttgttctcttccattttgatctttacgtttttcttgttcactttctaggctagggtttccatatttaaaggctgattaagtgggctacgaaatcagcccaactattttctcaaaaataaaatttattttttattaatattttgttttgtgttatacaatatttactaatatatgtgaaatcccaaaatacaaaacctcactttctattcattataaatttttgttaaccaatactttttggattttataaattttaaaacttataaaatttagataaggtgaaagctattagtcaactatagctttagataaggtggattttatactaaccaatttagggaagtatgtgaaagctagcatatgaggaatgtcgtcaatggttttgtgcccaagatctgattagtcaaagaagaaaactataagtggtgccttggagtggtaattagtgggaagataccaaactgagaattttctaatgcgcaatggaaagtatgtggagtttccgcatagataaggtgactttggcttcgagtgaaaaagctatagttgtgtacttaaaatccaatgcttggcctgcttctttgtgttatcattcttaggagattgcaaatattgtcagcatttcaaagatgcaaatatgtatgtcaatttgtcttgtgcatgagaccgatctaatctgaagcattaatttaaaggtagcaaaggaacatgtttcatcattcaaagatatctcaatgcagataacaattccaaatcaatgaaaacacaagtggtggaaagagatatttgaatagatggttttcgcgccaaagttcgttaaaatatcaagcttaaaatttaaacatccaaagatattgtttatgtaaagaatatgtttctcttaaccttagatattatttttaaaggaaataattactacttttagggccggtccaaacataatttgccgtcacctgttaaaaagaaattacaaaagttaggaaattaggatcgaactggtcacctaaagcggatatccatcaacttttcggaaataaactttttatgaaatgatgcgcctatatatttatatagagagttctttgcctaaaacctttgtttcatgagatttttaggctttaatcgaaagtcgaacctgattacttgaacaaacgaatcatgcaaaatctagaaaaaacaatgatgagttcaacatttggtgtgaaatttagttagctggataaaagcaatcaaaccagattattttttattgatatggagttattgaaaacatttatgcatagtccttgtgatgataatcagccccatcccaaataaaattagagatgtaaggttacccaatttgtttttgctataaaaagctttatttaaaaaacaaaatcaggcttattatttttaaaacaaaaaatggggttttgaactataattttgggctaattataagttgttttataaaatatgggttttttatatatcaattttacttcaaaaataaaaaaagtcttgaccctcacaccttacgactcacccattgggtcgaggttgatgataacaagctcggcccaaataggatgggcaaaagggcagtagcccatgattccatgattttttctgaattattttttaaaaaggccatattttataaaaaaattaatttgactgaaaatatctaataaatggcccaatatatttggagaaaaaaacttttacatgaaatggggcccttaatattactttaaaaaaataattaatttgtaatcggattagaaggagagtaatcgaatgagtgattttttaagggattagtcattaatcatggatagaatggacttaacgattaagcggagagtaaccggatatgatggacttagcgattaaacggagagtaaccggtgttaggcggaggattttagaacaagatattatgtaagagactaactccaaaagacaatcaaattctcagaaaagcgcttacaagtctactaaaaaaaacaatttgccttccacacattgtttacatgaaagcaaatccgacgaattgaagaaccctaataaacaccaccaaatttcaaatttcccacataggcggttacaaaccctaaatctacacttcaatttccgccgccgtttcctccattatcctcagcatcatcctccccgtcaccagccgctgctggccacgcctgcgatggcgcgtacattccactaccaaccataggagttcccatcaccactcccggtggataataatattgcggtactcctccaccgtcaggatgtggcatagccacaaagccaggatcagcggtggcgatagactcgtccttagggacaacatcaagaaggaaatcgtaggtgaaagagctagccactgcgttggagatatccgatttctgaagcgtgtggcgtttgttctcctcggctttgagccacgaccgcatcgtgagatcaacgatgaacatttcgcaagcctttgcgaagatgatcggagcctctgcggagaccatgtgcacatctggatcagccttcatgatcttcttaattcgagccaatggaagctgacggtttttgaaatccgagacggtttccatctgctcaatccagtaattacgtaactgagggttggatgatgccatcggcggcagctgcgagtacgacggtggttgctggtggttgtcgttgttcatgttgtcgccgttgttgttgttgttctcagccatttacaatttctagggatttggatgttggaagtgagatttttatcggagggtttggctggcatatatttaaaggaaacctaaaagcgtagatggctttaaagcagtcaaatgtgaatctttacacatataatattttctttattattatggctttttttgtgagaataattataattgtgacttatgtgtgtgactggttattattattaaaatgaaaaagaaaatggtgaaagatttttttttaatccatattaagatgagaaagctaaagatatctgattccctataaaattgaaaggtaaaaaatgttgttaagaagttattttcgtataatgaaacgaaattgaaagtcaacaattttttgcaaagatttcatacatttaattttttctagttgtatagtgctacaaatattgaattttgacaccgttttgggtaagaaatccacacattaaatattttttctttcctttttttgggtaagaaatccaaacattaaacattttttctttttttttttggcaaagattttttttttctaaatgataaataatacaaggaagtaaatcttagtgtagccacccataaaagtaatatttagtttttgtaatatgtaaaattgaaatataataaagtaatacttaatttttcataaattattttataactttttattatgttgatgatattccatgttataaaacaattaatcaatgtttttatatccaacccggaccgtacaatactaccggttaacccacaattcggacatttcttctatttgggtttagtgttaacatttgacaatcttaaaacccaaagagtcccataaaaatcgtctttgacacacgatctggtgaaccaaccaagtatcgaatcatgagaatcatatatatgaaagttgtccaactttttccatctttccgatacatcaatactagagagagtgacaatgtcataacaacatattaattacactaattatttaatttaatgtatttaagaatttaaaattattcattaattcgttcttatataaaatttgacatgttttaacttaattaattaaataattttagtttaattaggtacaaagtatatcaaactgatatataaataacttatctaattttagttttataaatcgtataaacttaagcataacttaaaatcaaaagaattttaatgaaattttagattttatttaagtataaaaattaaaaaaatatgatataagaattttatttcatgttttcatatactataatatatattggattagtgacaatgagtattagttgaatttatgatttattttaaactaaatataagatactaaatcgacactactttttgtttatttagaaataacaattatttcttaaaggtaagtaattgtaaataagttttaaacaatgtaattaaaaacaaaaacaagtatacaaaatgaattatttactcgagagttagagaaatatatagaaatgataattagaaaaaacaaaaacaaaaataattcaattaataacttcctcataagagttcgctaaaaccgcgctaaaatttcttgaaagacaaaattcaaataaatcgtttgtgcgccaaattccgttggaaaacaaagaataagaacgaaaaatgagttggaaaatttttaaaatagattcaggtttcaaaataagttttttttgctagatctctggatcttgttgcctctagaatgtaatctaacaaaaagctgcaaacacaaaagagtcttgacaagtaaaagtgattaaaaaaaaaagaaatagccgaataaacatccttgtttacagtaccctatctcttatgaaatagattataatatatgattcttttctactctcataaggaatcactagaagattatgtttccatgggtaaactgaggacttttttatccgtaatccttgtgtttttgtatgcataaattaatctaaagccaatattcataaaccattagattcatttgaaagacaacaacagaaatacattcttttttttttttggacaaaacaacagaaatacattcaacaactaaaaaacataacattgaaaacataagcagaactcaaaaagaaattcaagttctcacaacagcggttacaaaacccaatccaaatattaattcccaccgtttcctccatttgccccagtcgcatcctcctcggtccaagctccaggcatctgcgggtgtggcgcgtgtattcctaaaccgtaacaaaccggagttcctatcaccgttcccggcggcagttcttcattgttaagatctggcacagccacatgatcagcaacatcgtccacaggatcagcagcggcgacaacgggctctccctcgtccttagggacatcatcacgcaagaaatcaaagatgacggtttgagacactacggcatcaacatcagatttccgtatcgtgagtcggttgctctcttgagcatggagccatgaacgcatcgtgaggtccatgacaaacatttcacaagccttagataagagatttggagcctcagcagcgatcatactcacatccggatcaaacttcattatcctcttgatacgagagatggggaactcgtgattcttgacattcaagtcaccttccatcccctttgaccagaaactctttagttgctcgttatctttcggtggctgttggtggttgttgttgttgttctccattttttttttgtttgaagtgtttgggtttgagatatttttatgtggaggtttgcatatataaaggaaaattaagcgtatataagatatggtaggataagattaagaagtgatctctttacatatatgaatctcaacctatttagtagtttgttaagaatatttaatgttattaactgtatgtgtgtgactgacagacttgtggttggtattataagaagaaaaaagaaagagatttgtttttacttaaagtgtatattatataccaaataatagtcttataaaaatgaaacaaaaaaaaaaatacctttttctctataaaattgaaagttaaaattttgctgtacaaaacttagttttgaatatcttgttaaaaatgatgttttcaaatgttaaatgtgaaagcataatttgctcaaaattttaagagaattttaataagaatttgctcatgatgttaaattgaattttacttaatttacattggttcaaattaatgtatgaaacgatatataacaataatatatgaatgtacaaagtacaaatcctgtagtccctctaaaagttaaattttggttatttctctaattatttgatttgttaacatgaggaggtagacactcaagagagaatctcacattttgatgtttaactgcaaaataaaagagagatcattaataaatatgttagtaaattttgtcaaacaaaatattaaatttaaataaaaagtgaccagtttggagttggattgttccaaaaagtgaacagtttggagttaaacaagagtagccgttttattttggcgcctccttcttcaagatattactgcattactcctccataaccacattatcagtttcatcactcctcagtagcaccaaaactcttgtgtggagaagaggaaacacacctttcaatactcagtttgattatactcgtagcctttcgaaccaatgcacttcaaagcctatttggcgaaatctcaagtcttatcacatctatagacttgagattttcccaaataggctttgaagtgcattggttcgaaaacataaatggtggaaagagatagatggtttttgcacaaagttcgataaatatcaatcttgaaattcaaaaaccaaagatatcgtttccccttaagatcagatctcgaagtcttagataaggaatccataaaacttgttaaaagagtactactcctaaacaaacaactcatgcaggaagctttgcgcgggtgttggaacttgtttttgatgaagtggttgtggccacttttccggtgaagacgttcatcggaatgaccggtttttcggcacaatagaatcattgttgcaagcactacgcggaccgtggtggtgcattggaatgtcaaaaatgaagttatcatttgaatgagaaatgaaggtccaaaatagctgccttggtatataatatacagtaagtaagaggagaaatccaaacatacatgggttgggtttgagatttgagagttgggaaatgggcttacaaccaataaaaaatatctaccttaatgatagagttttgtaacaacaacaaaaaatcagttatgacaattaaggtcagaaaacgtttttgacattgttgtgagaatcaaaatctcataaattttcgttaaggtgagatcacctcatgaatatatatacgttgagcttgggctatgtaagtcaagtcattgtcttctccttctcttcataagatcacaaacatcaaaattcctctcttctctcttcttcttttgtttgggtctgagagtgtaacacaagactagtattcgttcggcttttgattttgagtgttgccaatgaaaagagataacaattttctcatgcgactctaatcgtcattaaaccctcgcactacgaggagatgtttgagttataaaggagagatcatcaaagctctcgactctgttaagcaccgtcaatctccgttcctcaatcatctttttggtattgttgaatttcattacctgttctatattagttgctttaagtattaggtagtgtctatgttaaaatattcgtcgtacaaaatctagtggtgggaattaacaaaaaaaaataaaaaatctagttgtgggttttatttttctatttttgttcaaccattatctatcttctaaaatagttatggtctactctcaaagaacaaggttgcgtataatgtaaacatggtttttttgatgactaaatgtaacatttatacaaaaaaaaatatttggagaaattgtttcagcattgttacaaaattagaacttatattgttgcaattttaggaattttaattttccaatcaatttgtctattttgaaagatcttgtggcactattttgacgaagataagatggaaaaggatgatcaatagcggaaagaaagagcaaaaggaagagcaaaatggaaatggatgaccttctggatcattttcacctcctttacctataagcaactgaaaagcaacttgatgtgagaacctgaatagttctttccttgggtatgtccttagattttgatggcgacggtggtatgcattggtccataaggttgtctctcaagaacctttcaagttgagtatatattggcttagtggtgagaaaaatggatatgtgggtttattgaagaagtagattgattcagggtattacaggatgagtggatgcttctcaattgggaaacatataagcaacgactctctcaactcgttctcacatagagttgatgtggacaataggtaacaaaggataatgcacatatatcctaaaaaatgcaatattttggctctttatgcaaactggtcactatcttggaatatttcaacttctttagaagaaatgaacaagtatgaaatggtagaagtgcttcaagattttgaggaagagtgagctgtgacggttgtgccgcttgttaaactcatgggatttacaacttacaactttatttttaagtcacaatcgtcaaacattctttttcattgaaatcttgaggcacttcatacttgtccacaacttcttggggagttaaaatatcatgtgaccaatttgcataaagagccaaaatattgccttttgtcgcttatatgtgcatcaatcctttctcacatattgttcacaaggcactatgtgagaatgagttgagagaatcattgttgctatgtttcctaattgagaagcatccactcgtcttgtaataccctaaatcaatccacttcttcattgaacccacatatccatttttcttgccattaagccaacaaatgcacatcttgaacggttcttgagagacaaacttatggaccagtgcataccactgtggcattccataatcatcataagtagcccaaacttggttttctctcaacaaagcttgagtctgatccttgtcgaagtcttagacatctggaagactcgaaacactcataaccaccacattttattcatcttttttgatcaatgcaggatgaatatccaaatagatgcaaagatcaaatggttatgttatgtgtgctcattatcgcaagccctttggagcaattgagtacttgctccatggataatcctttttaatcgatagaattatgctaagcagcaacaaatcacgagactgagtcagtttccgagctatgatataactaaagagttgtcaccagaagagtcgtcggtatgaatataatctactcggtagtcactagaggagtcactaatcagggctaaatatgaatgtatctcgaagcagggctatatgattggaatgagagtttgatcatatgttatatcattttgaaattcttatcatcatttatgtcaaagtttttatgtgatttgcaatgagaagtggagcttataagatattgttcctctattttgttctgagagatgtaaagacttattaaatagagagcaatcatgtcgtaactccagtttaaaactgttacatatcctgctaagaagactcgacagtttcttgctcaccaggaaatagggtttcagataacgaaaacaaaccaagtacaattcacaaaatttatttcttaatttttatttttattttgacttacactttcattttagtagactttatcttgtttcctaagtctcgtaggtctttgcttccttctaggtcttgataaaggattttcttccttttaggttctgttgaaaccctagaaccttttttttttcaaaaaggttttaacactagaaccttgtttacagctttcttctcttttattattcaccagctattgatttgatataaacgaggctaagaaagagaaaaaaagagagacaattaatgttcaatgtatcgtttacatgaaagaaagagaaatatagaaacgcctagttaaaatgaatcggttctacaaactgatattttgttattattattattttcaaactgagcttttgtattttgactgaaggaaaaacataactggcaaatataaaaattattcttctgagaagagagcctcggaggtgttgtttccttatttcttgggtactaattcatcatcattatcatcctcagatggtcgcagcttatggtcattatgccgttcttgtagcataatgtataaataatagatgcaaattaaagaccacatgattatttgtgttcattgttgcaagccatttgaagcttttgaagtgtgtctagctccatcgatggctcgtgttactcctgtgaacaatgaattagcatgaagtccatgaaacaacactagtcatcaatggagccggatactcaaaagcttgaaaacttccaacatggaacacacataacgctgtgatctttgcatatattggatattcacacttcatgctaaagcgcggaatagtgcccacatgctgagacgatctgatgatcttaatgatgatgatgatgagaagttagtacccaagtgatcatgaaacacctccgagattcttctcaagcttagggtcgttttcgatcgctgttaaaatagtacacaatatcttttggtctcttagttttgatcctgcaaaagaaaaagattgataatcagaaagtagaaagtgggaaaacttttcatcaaacgctttagtatgatttaatttcttatgcccgaggcacaggctagagaccaaaaaaaagtactctaaaatctgatatatatcccaacgaaatacagaaaagaagcctcctaaataataaaatcaaagtaaataacacgagccatatatcaaaggtggtttctgtaaaccatacctttgccttgagagtgaagaagcagtttcagacttgtgggtgattaatatgagaaagaacaattttatctttttcttctttaacgttaaagtgaaaacttcaagagataaaatttataggatgataagtacatgtggtagtgaggattaatagaacatgcataaaactatttatggtaaatattccattcctttgtatattcacaaattttatattctctgtattccctcagtcaaaatattcgtttctgatttcatttgatttccatatacaaaatcgctgtttgtagaaatgaatcttttctaaatggcgttttcattaatttatttctttgtttcaagaaaaatatagtttgaacaaagactttttttcttcttaatctctaaaaggtaaccaaagaatttctactctaaacgaaccctactggatattgagaatcttgaaaaccttttttttttttttttttttttttgtaaatatgatattttaaattttgtcaaaaaaacaaaacaattattgtgctggattttttttttcttctcagttattcttaaatgttcatttctgtccgtgtatagtttgatggcaagtacgagaaactgtacaaatcagcatctggaacaatcataaaccaccactttaggcacatcgttaaacctggaattcagctcaatatgtttgtttcaaaggaaacgatagggacctgcttcttgtacgtttgggagtattcaatagaactctaagaacaaggaaagagataaactctcttttattaaaactcaaaaatgaatgacaaagcaacaaagctaatggaggaaaatccaaataaaaaatgcaaatgtaaaaacaaaaaaaatccaaatttaaaataaaaccaaaaccaattttaaattaaacaccaaacggtccaaaaccagcaagtagccgtttgctttaagcgcctctttcttgaagatgttgctgtatctatcactcctccatgaccttattatcagtttcctcagcagcaccaacattattgtgcggagaagaacaaacaaacgtttcaagactcagtttgatcacactcgtagcctttcgagccaatgcacttcgaagcctatttggagaaatatcgtgtctaatctctgcgtcttcgctcattcttgttaacttagaaacatgaagtagatttgttggtggaggttccttttgtttgcttccttcacaactaatcctgcttagttggtttattggaccagaaactctccgtgaaggtaaaagttcgcgtctctcgagaaaatatttcgaggcatcagtgagtatcttcagtgcctctttaacaccactaccaacagattcgtcacggtcaagggaaatgtcaatagctaatgtgctataacgattaaagattgttataaaatctgcggttcgctcgaccgctaaaacatcataccaatcaacttcaccattgacttgcttctggaaacccatgcacacgtcaagaagtgcattgagacggcgaagaccaccaagtgcaggattaatttgttttgccttgagagcaaactctttggctccagcaaaatcacccgctttatatttttccactgcgatggctttcgctcgtttagcttcttctcgaatgatttcctttcttgattcgtccatgtgcatcatttcttcgtcaaaaggtccttttatgtctcttagtttagatcatgcaaaagaaagagattgatcagaaaataaaacaacccaaaattgaacattgctgaaagcagaaagtgagaaaacttttgccccaagttatccatagagataaaaataattccaatatctatgaaaacataaatggtggaaataggtatctagatagatgttctttgcatcaaagttcgataatattaattttgaaatttaagaaccaaagatattgactcccttaagatcaaatcttgaagtcttaggtaaggaatccatcaaaattgttataagaaatatctactcctaaacaaacaactcatgccaaatttaggaaaacggcaataatgaatagacattttgcggccgaaagtttgtaacaaacttaaatccgaattgagttttcccgcgtaaatccgttggaaaacaaagccaaaactcttacgaaaataaacaacatggtaaactttagaaaacagattcaggaatctagaacaggcttgttgctagagatcgtagagaccactggattaagatgaaacttaacaaacatttgcaaacacaaagatgctgatataatctattgaaaacacaaaccattaacaccatcaatcaaacaaactttaccattcactaatctcagaaaaatggttttaacataaatcaaagcaaaatcacttatctctttcttatacaacactacacaccaaaccaattgatagccaaaaagaagtccataaattttttataatttagggattataaaatcctaaaagttgagaacccatttgtcaaagcaaatttgattaatgacagaaactctagaaaagataagacaaggactaggaaaaaaaattcaaataaaagcaccgcaaggttctataccttgtgagtgatttagacgaagaattaaattttcttagcttctcttatcttcgttttgaattaacgtttaagtaaagataaaaacactctcaacacctttaagatgatgaacatgtagtaaagattagtaaacaaatacgactcttaaggtaaaaaatattaattttatattttccagttatgtttttaattcagtcaaagcactcatcagttcccaatttcatattatgtccatacacaaaatctcaaaacgaaggagaagagaatagaacaagaacgatacctaggtttctccccacaatcaaactgaagcatccaaatttcataagttcaaaaaccataaagtgatacgtatttgacaagaatttcgtacatgcatataaatgacattttatggtaaaacatttcccctatttcagtgttccatttcaatactcaaaatctatagttggtatttgtagaaattaatcaaatatagttggttttttaatttttctttcaagaattttttttatatctattaaaattatgtttatgtaatgtaagttatctaactcttttagggcaattatttttttaatgttacatttaaatacttgtgaacaccaattaaagattttgagtatggaattcaaaattgcttacatatatcttccaaagaccaaatgaaaattgcttacacaattacactatcttcaagtctttgagactcggtgatgaagcctcaagtaaaacttcctcgtcctataaaccacactcaaactcaaaaccatagccattagacacaacatggacatgagactgcacgtgactgaataacacaccgagcccgtgcagacgagcgactcagtctctgtggtgggtccggcttgctttctggcgtagtagtcatagatgttactagcgatcacacctgagaacacaaatgacccaataggcaaagctgtaatctggaaattgtaaagagaaccgaagctcttcaggccaaaaatgtcagagactgaagcaggagcaatcgcccaatgagcgccataacccattcctatcacaatggtcactacgtagatcttccctggccaatctatggcatagtagatgagccccaaagacattatcgcctgaaccacagacattgccaacgttcttggaagtgagagtttccttttgaagaggcagaaagagatgaatctgtcagtaaaaaacacagatgcttcttaaaagcgaaagtgaaatggttaagggttttgtaccttatgattagctcagagaagtagccaccagcaacacggccgagaaaattggagatgctgatcagtgagacaaatattttggtgttgctgtacccgagggaataacaaatctgaccaagattgtctataatcgtgattcccgaacctacacctagaaccagagacataaatataagccagaagtcagcttgtcccaaagcttgtaacaaggtgaaatcttctcctatacacggcgctcttttcttttccggcggtctgtcacttctctcaattaaagttctagcctcatgctgatccacattggaagttccttcttcaggcttcactgaggtgacattattacccgagatgaaaaccgatgaaaaagggacaagaactggaacaaccatgaaaatgacaaggatggctccagaggttgtgataatcgtttgagtcatatcaaaaacactctgaagtaccaacaatcctagtaaatataccgcaaggacaacacagaaaccgtaaatagccaggaatcttaaatcatcagatcgcaagttcgttctgcaacttctttccacgggtctaacaataaatagtagagcaagaaccacgactggtggtccaagagcaaccatgagaataaccgaagaatcatgagaagggttgaacatcaaataaacctgagtcaagattgctccactcaagccagaaaaccctttcaggattcccaccacaggacctcggctttctgggaagttatgaatgcatgacacaagcgacgctgtattgtagtatgtttccccatttgttcccacgaatatagcaacaaacaactacatgaacaaataaaccagaatcaagcaggatcacactcatatgtaagctttaacatctttttttttttttttttttgaatatctggaagttcaagccaaaattagagaatcgtacaaataatcaaaagcaaagcacaattactaacgaaatcgcaaatgtgtaagcaattttgatttgtaaaattcatctcaccatccagagaggcaaattaggcaattggccagtgacgacgagccaaacaacaccgtagccgaaaaggttctgagttgcaccgacgagtagaaccacccaggaaggtgagacttcagataaagcaccggagacgaatccgatggcgtcaccgaggtttttagctacgccgagaagagcgatctgtttctgattgtagccaagggaagtcttgattgccggagacatagagccgccgaatagatagccaacgccggcgacggattggacccacatggcgcagacgaaaactagccatcggtcgttgactaggagctctagtttgtgacgccacaaagtcatcatagtcaaacgctctcaaaactttctatttctttttttttttcgttgattcatatgattacttattttgtaattttcagtttcaaagaaaagtttggacaacaccgtaaatacaaataaaatgtttacttatttatatacaattcatgtgtaaggttgagaaacaaataagcaacaagataaaaaaaaaaaaaaaacacgaatcaatgaagaggtatacacttcacaagcttaggtttaaaaattggtttgcaaaagcattcacttttgtatctccccaaaatgaatctgttagtttgagttgcgcttaaggtacaccaaaactccaagtccagcagcaagagcagccccggctgcaaccgttttgtaagcggctgcccatgagtttgactggtcgtagtccatatcctctgaacttagacctctcctgtgccctctttcttctgtgtagtccaaatgcaattttaaaccctgcaccatttggaatccccaacccaaatatactcttctttagcccaaaatccacattaaccaaaacgagaccgcggatttaaggtatcatttcatcctagttctttacactaattgacaataagtatggatgtacaatttattaccttccagcctattgattttgcatgttctacagcagctccaagatcattatctgatgctaaaacaactttgtcattgtcttcatcttcgtactacacaacacaaaatatgtcaacaaaagaagaaaatttttcctatcttctcgtttaataagttttcgaataaatatgtaccattatctgaggcaagttatcaggctcaatgtcatcccccattctttgtaggattgctgttatcagagttgtcaaactctgtgtttctgttattgaaaagtaaaaacaaaaggttaatggactaagcagcattggcataataggtgtcctgtttctcaagagttatgatttaacgtaccacacataaatctatgcattcgtccctttttatcttggagtttaaaagcaaatgtgttgggatatgaaaatgattttgttacttctatctccgaagataatttcatcgactcttcttcactgaaaaatcatatgatccagtttaagaaaccaccttatggtcaaaactaaatggttcaaaggaatatgagtagaaacctcctcgtttcatcgccatcttcgttaggagacaaagccatagcagagtcccaaaacttttgcatcattgagtttgctgtctcattgtttattccagccgtacttccagccttgtcaaaaggaaataaagagtttatagcaaaacaagaatagtatgcaacaaatatatcatgttctttcttctctcggattgtttatcgatcttgtctcatgttttcgacttcaactagaagagaataatagaagaaaaaaagtgtaccgtagtaacagcagcatgagttatgtggatcacatcaataacagcgacaacatctccatctgtatgtaatcatcaacattagacaagtgttgaaataacaatgcttcatactttatagctcaaagtcagttttgaggacattttgttacctttatccaatacaggaagatgcagaaatttgccattatgcatgatatgtaaggcttcaacaattgccatatcaactgttgcagattctggattcggtgtcataacctatagaataatgggattgaaaagaaacaacaaagacgaaaaatgagtactcatataaatctaagagttgaaaagaataatttcaaccagattcaaaactaacgagcataagcatacatacatatatagcgaaaacacgaacttaacgaaaactttaccttctccacagtagttgtctcttgaggaaggttttgggatatcacccgcatcaagatgtcctttgagctaacaaaaatcacaatttaagatcaaagttccactagaaaagattaaaacatgatattgtagagaaaaaatttcagaaccatagaaacgaaaaagaagacaaggggccaaatatgacacttacgttagaatcccaactaatttgttctccaccatcaccatggctgcgctagactgatattccaccatcttcatggttactcctaacacagtctcatccaatccaacctttaaaaccctgtacgttttcattccaaatttactcgttaagctttgcattatttctctcaataaaacaagtataagatcaaaatgatttcaaatatgataataaatatagaggagatattacctactttgtattctccggaattatagttgaaagtgaaggcttgaatattcgttctctaagtgtctccataaaagtgtttggtcctatcgtatatccaacaaaaacgccatcagaggcatgcaagaagacatttgtgatggattcaaatggagatactcaattccatatttttaaacataccagcaatagatgttccccagttcttttcaacgccttcaacagccgcagcaatagccttacccttctcaactgatctttccatgcgggcaatagcatcatacaaacactttgcaatatcgagaagcgcgataacttctccattctccaccaccggcaaatgtctaaacttgcctgcatatccactagtcagctcaagtaccaagaccaacaaagaacttataaaagaacaagaaataacaaaccttgaaccatcttttgaagagcttcaacagcaatagtatcagacaaaacaaaaacagggttcttggtcataactttagatacaggtgtttcttcaaggttaagttgtttagcaatcacttttgttgctatatccttaaaaaaaacaaaagagataaaaaaaaaaacataagtgaaaagtccagtttgcatttagaatcctgttcatgaaaacatgtataccctatctgttaggatcccacaaagtaatgcattagaatcagtcagcaataacgcatcaacacgacgagcagccattcttcgacaagcttcaaataaagttgtgctatctggtacagtaagagccttacacaaccttagtctctttaccgttctctcaccactcctttccccactcaagcttctacaccaagaaacaacatgcaaacatttacttccaatctcatatattttgaaacatgtatcattcctcagaaaaatgaagaattggaagagaatggggtgatgattacatggaagaacgagaagatgtgagagatcttcgtgggaggagatcagagccaccaccaccaccaccttcgttttctgaagcttttttccttccttgaaatgaatgaccggagaaggagagacttttcctcgacggaccaccttggttagccattttcaactattccgatctcctccttcaaattctctgaaacactttaataaaaaaaatcatcagattttgatttttttttttttttttgcagcaaatgcatattcgaattggaacttaccaaataatctttctctttcggaaaatttttgatatcaattcacagaataaaagagaaattcaaaactgggaatttcgaatcttcacttcgataatgatcgacgatttcgaatcgcctagttggggcacgatcgataatgcagttcgaaggaattggaattttttttgtttctgggaatcaatcgaaagaaattttggaagagaaagacgaaaggagagggaaagcaaagggccagaggagataataattaattgaataattaaaaaaaaaaaaaaaaaaaagaatccgtggtggaacttttcttcattttgccaatctgttaaccacgaaaatacagatttgcccttggtatccgatcgggctgtgagtatcacgctacgcgggaacgacgacgctgacattgttaatgaggttatttatttaaatccggaaactaataatcagtcccattctttatgaattcaagagcacatgtgccaatttggttcaagagctacgataagtaattgtttttaacaatgttatttcttaattatctatgatctatattcactgtgataacaagatgataaaaatgacgtgaatgcaagatatattaatacaaagctttttttaaaaacaatttactcatttacaaagataatgataacattctgagttaccataacacattaaaaacagagatatctgaaatggtaagttttttccatgtctcaataaaatatatattttcaaatttttctataaaaactattaatttgatattatgttttatgtttcttgcatttctgtctatcatgccagtaatacttgttaatggttcgtaaagagttggaatgagatgatatagtttcatcccctcttataattcaagagtaatcagtgattagtattaagtatcttctttgtcatgaaacaccaactccgatgctcccttggtatagaaacttcaagggaagtatgaatacacagtaactggtatgtacgatgtgaatgacaaagataatagtattcgcatcaccgagttgtatgtctaagttaaggttcttggagagattggaaaaacgtagtgttattaaggcagaatcaatgcttttgcatcataaactatcatagattttttgtatgttttttctatttatgcgtttatttttcaggactacaaaaatgacggtaataatatgtcaattgacataaagttgtctttaactgaagagcagatggagcattttttgaataactataacaaaaatccaagaggatttcttggtattttgagactatccataccttaaagaaccaacaacatgtgtttgcttaattagtggtcaacacctatatcactaattaagaaaaaaaagcttacagttcttgttatattacactttcaaatgttttgtggtctttttgtttaaacatttcactagtcttttttcgaaaaacatgcaaattaaataaccgtttataatatattatctccgcattttgaacaagatttgttccaatggtaagataacgataccattgttaatatttttgtccaacaaaattatgcgattatcaagggtctctcatagttaattttaatggttttgttggttacaaaaatagtagtagaaattggactttagtatataaacaaactcatagtacagtattattctaaatctttaatccagtacatctccaaagtgaatttcgaattatttggttctgtgtgaataaataaactgggctttattgggcttaaggcccatctccgttgtcgtcttcaaggtcacgcttacagacttggctccgccgctccggcattgagctccgtcgagagaatggcgagtaatcaacaaccaccgtcgaatctacagacctacggtgtaccaatttacgccgtcgactggattctagaggaagctgtcagatccaaaatcactaaggatcaggatgatgatgatgatgatggatcgtcgtcgtcgtcgtacatcgttttatccggcggaggaggagaaggacgaagtggaatacctaatgtcatcttaatctgtcgtgttgatctccacaccaattctctctctgaacaacctgtaagtgcgaataacaaagctccttctcttatgatgaatcattcacaattctctgaacattctcaatgtttttcgcagattggtaggcgtgtgattggcactgatctaccttatcgtatggctattcatcctcgtcaaggtggtcttatttgtgcattgcctaacagttgcagactgtttgattgggaaaacattatagaggatgataatgaggaagagtcagagaaagttgttaaagagttaaaagatgttggacaacagttgtctctctcgtttaatcaggatgggactgttctagctactggtgcagaggtaggaaggatcttatattcattctcttgagaaagaaataaactttggtggtggttcttcttatgtgtttggtttttgatgcagtgcaggatgggactttgagggtttttgaatggccaagcatgaagactttacttaatgagtctaagacacatgcatcagttaaaagcctaactttcaggtgagaaagggatcatctttggagaaatgattgtaaataaatttcttgatagtgatatttttctgtttgcagcgaaagtggtaagtttcttgtatctcttggagctccactttgtcgggtttgggatgtgaatgcttctgctgctattgccagtctatcaaaagagaaggtctgttgggttttgctctttactagtttctcttaactttattgttgtattggatctgatgagagtttgaatactgaaatgcaggacgagatgtttgcctcgtgtagattctctgtagacaattcaggcagtgaagttctttatgttgctgcaaacactcgtaactcatatttattctcacagtgcaagaacataagaaccctttttgtctcagccaacaattgagagatttgatttgttttgtgtagaacgtggtgggagtattataacatgggatacaacatcatggagaagaagaagttcaaagcttattaaaagaaacaactctatatctgcctttaatgtctcagctgatgggaagcttcttgcagtgtaagtttatctttcttctcacttatggggccaaacagaaatactatattttgttttcatgtttttttcttaatgcagaggaaccctcgaaggagatgttttaataattgattcgacaaagatgcaaactaaccaaatcgtcaagaaagctcatctcggtttggtcaccgcactgactttctcccctgattcaaggttttttctctactcctttaccgattcaatgatgccaaacaaacaaacagatacgaatctgaaggaagaaaagatgaaaccattcaaaagtgttactttgggtttggttttgcaggtgcttagtgtcagtatcttttgactcaagggcaaggctaaccgtgatcaaacaaaagggtgaaaaacgtatgtacatttacggtttctcctattatctttccatttcaagaacagggtctccataacctaatactctggtttttctacgatgaaattgcaggtcgagtatatctgtgggtggcggcattgttgtttgtgttggtatacgtggttttgtattatttgatggtggcaatggggatcatacattagacatacgtaaagaaagcctctaagtaaatccacacgacaatacatggaatggcttgaagaaaccaacatacagatttataccctcgttaagttttcttagactttgtgttttgagtaggtcgtagagattcttcacagaaactttcatgcttttattagtttacatcatatattcatattctcgtttctatcttttagtattaccacaatgaaagtttgaacttcttttagtcaacgagacccaatgattaagacattaagtgattagaaaatgagagagaccacccaaccatcgtctaacgaatctctcgggacattgaccaaagacatcaaccacagtttgaccacgacacttctgacgtgtaacaccatgtattaagccatttcaccaaccatatcacaagggtttcaatatcatcaacgcaagtaatataacttaactatctctcctctcttttcttaagataacttctctctctctattcgttggtataaaaaaagaagactaggaaaatgacggagtggcttccggtggtggtcgcgacggtgttgtttgtggtgctgagcccgggattgttgtttcaggttccgggaaacaacaactttgtagacttcgggaagatggaaacgagcggatactcaatccttctccacgccttcctttactttggccttgtcactgtcttcaccgtcgtcatccactttccgggcacttaattctatgtaatctttacttacaaaaactttttcttcctatctatgcttttaccttttctatattatcagttataccatgtttcccgtgttcacctaattattatgctaatgttttgttacttttacgttataatgatatcaaacttgcgatgcgtaagaaacttgtttcgaattagtaatgacaaaatggatagttgactagttatacatttttgttacgttattagtatgttggagtatattaatgttacaaatgttataaaaagtttaaccaaaatagacatcccaacaaacatagacaactatataatgaatagctcgaaacatctccgcagccatttcattttcattaacatatgttttagccaaaaggataagagtggttctcctaagattctatagttgcaataagatgtgtacataaatagttatctactctctaaactgttaacttgttgctaattgggtactacaagaccaacagaacctacacatcaactaatcaaatgtcaataaaaacccacaattcaacatttacactacaagaaatatggatattgatagcacattttaatagctcaatttttgtaactgctattaaaaataaaatgttggataaagacactatataatagcagttacgaaatgctaaacgctaacatgactaaccggacaaataaagtttaattgaaaaacctaaaattattataagcaccaacatttacccaaaaatattacacttagccaccaaattattaaagatacggctttgtgttttcttttttcaatgaagaacaaaatattttgtctcattctctcacaaaagaaaaacctaaatccctccgttcctccatctccaaatagacagcaaaataaaaaatccagaatttcctcttgtcttcgtcgatgaccagcgcaaactttgaggatcccccttcttctcatcgtcctctccaaagatgttcttacccaagcttttgttctgacatctccaaggtttcatcatggtcagaactcaacctacatatatctacaaaaccaaatcgagacctccacagtaataccgtctattcaaaaccctagatctacatattttgtctctccctaaagttgcaatcgccagtctgaggttccattactcctaattgtttttgcttcacatctcattcaacgcctaacctattacattctcgtttatttgggaaaattagattcgaaattgaaatcgattccaaattaggatttgagatccggagaaaccgcttagtctgctaacgacacttctttttttttttgtattgcggtcatagccaatcctatcgatgttgttaagtttcaaaagtagacaaatttacacacttatctataaaatcgttttgtgtatatttggttgagcttcttgtgtatgttttgttataggcagacgagattacgcagaagaacatgttgcaggaattatgtatcaaggctcgtgttgtctgtttattttaaatataatatccaagagatatttgcagccatggtaattcatcatatatgcctctcaatctccatctatctttaaccatgaagtttccgtttacaagcttgattttctagaattcaaatgtggtatttgtaactttcattaggttattagtttgaatgacaaacgtcttttctatagttttgaggttttcaatctggttttctcattgttgttgtaaggttttctcattcttatttggtaatagtttgtttatactaggacaagagaactgatttgaaatttttctttgttccaggggatataagggaaacatggaactcaacaaggaagatatcgtgccattgacaccagcagctcaaatcacagcacctccaatcctacaagatggctcatctcaacaaggtaatttattagcattttaagtaactgttacaatatttcagttttttcaggtacagtttgttgtcttttttctctcatattaaagttgcataggagggttttagtgctcaatgcatctagaacagaactcaatgatttggtctatagagtccatattctgtttcgttttctaaattattaaataagtgctttggcttttctttgattctgtaatccttaactctagtaattcacgagaatcattgacatatgagagtttttcacttgctccacatgttctttgttttctttttatggttaaaatactaaattttgcttagatatttttgcagattttataagtcttgtaacttcagaacctaataacgtttgtaacaaaaaggacaaaattaatggatgattgccattaacattttgatttcggtttatttgttttcttacagctgaggatgcgtttggattagcagtttggttaggaagaggtttatcaagtgtttaagctcagagaagagatagtgatgttaattctaagtttcatgtaagatctgctcaagtactcatttttacactattcgagtttgaagtttgattggagagaagaagaagactgtacaagattatgagaagaattggagaagcgagtcaaggttagaaagaagatgtgatatcattttacttgtggcatttgttattgtaatgttagttaagacttggattgagacttgtatggagattttatatatattgaatttgatcaaaaagaggtttcttgcaaatgtgtaacaaaatgtcccaaacttataggctgtttatagatttatagccaaaaaaataaagctacaacatatcagatcatagcctataaaatatagctacaaaataatagtttatagcccttaaaaagagttacaaaagtataacatcaaaattgtgcaataacaaaggaaatcaaagcatttcttttacgccataatatgtgaacatttaatagcatagcaagaaacgctattgtatgtgaccactctaagatagctccggcaaacacagcgtttatgaatccgctatgtaaacgttattatagcgttttcggtgtgttaagaatgtccatatttcttgtagtgttaacaagaacaatgatgatgataaagaacattgaaaaatgagggagaagagaagagacacaaatagatctttctgattctatctatctacctacttcttcttctactactcccaatgaaacgggaatgtctgcggaagacggacagcctcgttaccggatataaccgatccatcagagactgcactcgcattctcaaacaatcccgacccgtaaaaaactgtctcaactgcttcttgggacaaagaaagtggtggttgaagcaaatgagggactgacgacgaggaggatgacagaagagagagagcacaatcagagtcatggatgcaactcgtcattctctcacacaacgatgcggttctcgagctttcttcttcttgcaagaaagggaattgttttgctatgcttctggtactgtttggagaagaagagattggaaacattatccctgtctttgcaggagaagaaccaacaacatagctctggctctgcccataactcgaaccattggcggctacagcaacgcttacaagactatttccccagctcgggttcaacacagatgtagttggaaacacatgtgaaccaccagaaaactctagcaatttgctacctgaaaacataaaacaatgcttcttcatcaacaaggaacggtctattggattcaagaaactaactaacttttcttaaaacagaaaccttgaaaacccgtaaagaagttggcaggacgaccgatatgttcaggctgcggcttccgtcgtcttcgattatgtccatcaagacgtttcctacaacttctcttcccttcatcaaactcctccaaagcatgaaacctaattagacacaaatgttaacatcttcaccaacccaacaagaagcttaaaccattaacacacaatcttacctgctgcattgttgacaaaacctctgtttatgaccattaatagtaaccacaggagtttttgaatgaacatcacaaactttatgtctcttatgatactctctacaattactaaaatcagaatcacatccatcaacaagacaaatcggcatctggttggttccaacaccattccctcttgttctctttgaactcgagcttcttgaaccttctggtttagctaaagcactatctttccacttactaagactaatcacttgctctgtatcaccaaaaacagaggaagagtttccaatgtttcttccaagttttagatcaaatgaaaaatccgcttttgactgtgacgacccaccaaacgagatcgaaccatccattggtgataaatctggttcttgatcgaatccagataaataaccagagctaagtttgaaattccagtccattcaaagattgtgcttttttttcttctctcactataaaaacacatacatacacaacagcaatcaaagcaatatcaagatttgtcctttttgatattggtactctaaatttaagaacaaacagcaaaaacaactagtaaacataaaacccatgaatctttaactcaattaaacttcaacttcaatacatatgaaggaaaataaaaaagcataagcaaaaagcaaaaacacaattataaagagtactctgaaattgtagttgaagctctaacaaaatgatctattttgatattgaaaaaaaaacaaaaaaaaaatcccaaaaaaggcaaactaattgtactgaaaaaacgaaatgagaagtgcagaaacatagaaactagaacagatcccacaaaatgggaagaaaggaaaacaaaaaaaaaaacaaaaaactttttttctgtctactcaattccaagcaagaattaaaaaaatgcaataaaaatgaaagattaaagtaagattataaacatgttattacattaaaaaaaactatagaataagaaaagtttgttgtttgaaggttgagaaatcttaccaaatccatacacctaccagtagagtcagtagaagaagaaactccaaaagagaaagatgaaaatataaaaaaatgggacaagtgaaaaaaaagaaagagaagatgatggagtttagcaagagaaagtggagacaacaagtgtggctgctacttcaataatgcaaataagagaaagaggaaagagagagagaaattgatgataatagctattactaagttaagaaatgatttacttactttaattgtaactttactttcctgatttagggttttattgatatcattttttaaaaactttgagtaagaaaaagtgaagaaaagaatggaggaaagtgacagctgttgttgattgttcttttgcttactttttcaacttttctttgtttatatttttctctgccattcatcaattctgaactctgagcatccgatttttatgaatgaacagagtatacttttgaaaatttcaaattactcataaatcttgtatctttttactgacccttatccaaaatatattagttttcaaattgtgatataaaatagatgtggttttttcttttttataactatgatgatgatgaaaatgaaacaataaattggaaagtgatactaaagaaagaggtataggatgcttagttgtttacggcaaaaaacatagcatgtgaatgttgtgcttcgcattacacaacatcttcttctgttttttttcttctctctttccaccgatacgcgttattttctttgactttcatagttacgggtcacacaagttgtcaattatcagggagaatcgtataaaagtcttccatgtctttaaaagttttgcagatggatttaaaagatttggggtccaaagcccatgtttcatttgtttcggcccataaattgtcctaaaaaataacaaattggttatttattgaatgcacagttgttttgaatttaaaaatttgtagttgacgaaccggaccaaaccaaaacaaaccatgtaatttgaataaataaaaagaaagcaattttccggttaacaaaaaatctcaaactcagtgagtgagtcaccgaaaacctcttgtagtagattcgtgacgggtttgatcatctcttcgaggtcggttctagggtttcactacgagaatggacggagatgagctcaccgagcaggaaactgctctttatgaccgtcaaattagggtatggggagctggtgctcaaagaaggtacttcacattgaatctaacttctatggcttcaagcaacaacaagttattgattttccgtttgagtactaataaactcttcttgttgggctatactcggtgaaagtttatctctttctgggttttaagctaatttagctgttgaaattttgattagggcttctctgaattttgttttgtgtttttgcttgcagattgagtaaatctcatgttttggtatctggaattaagggcactgttgctgaggtacctcttactttattttgtgactctctattagctatgttgcagtagagtgagtgttggcatcttacttggtttcctccatttggtgttgcagttttgtaagaacattgtgttggcaggagtaggtagtgtgactctgttggatgatcgattggttacaacggaagtcttcaacgcaaacttcttgattcttcctgatgaaaatgcttatgtaggcaaaaccgtagctgagatttgttgtgattcacttaaggattttaaccctatggttcatgtttcaatagagaaaggttactcctcctttcttcatttctctctaattttagtagaaacaaatgattttagtaacatcgagtctatgtcttcaatttcaggtgatttgtcaacacttggtgttgattttttcgagaagtttgatgttgtggttatcggctacagttctcgtgctactaaggtactgttgatacctccttcttttagttgttccagttgtttttgtcttttgttgccatgtagattgatcacttgaaataatgtgctttgttatgcagaaagcagttaatgaaaagtgtaggaacctagcaaaagatgtagcgttctatacagttgattgtagaggctcatgtggcgaaatatttgtcgaccttcagaattataagtacacaaaggtactcatctcgtttttttcttttgacggttgtatatcacatgcctttcttttggcatataatgtgttaactttctttctctattgtcaattttggcttcatagaaaaagcttgatgaaacagtggaatgtgaactaacatttccaagttttgaggtacaacaaacttaacttcttactttcctggaacatactttcgcatgaaaagtaatagaaattcaatctattaactggtcttatttctccaggaggcagtttcagtaccgtggaaaccgatgccaaggagaacagcaaagctctactttgcaatgagaggtctggctaacaacaacagctaaccttttgaaagcttggtttcttcctacgtaactaatccggttttgtgatattcttgcagtgatagaactatttgaggaaactgaaggacgtaaacctggggaatgttcgctgtctgatctcccaagagttttgaaactcaaaaaggaactatgtgaaggaaatgtaagtttctttaacctttatttgtaagctctacaataataacgacaaataacaaactttgtcactcactttgaatccgaatgttgcaacagtcggtcagcgagaatcatattccagatatcctcttggagagactcgtatctaataacacagaattcccaccggcttgtgccatcattggagggattctaggacaggtacagttctctatctcgcttctctaggactttgttagttatctagattaagcacttagcagagtaatgtgactcaaaaaagttgtatttgtacgtacaggaggtgataaaagttatatcaggcaaaggagagccgttgaagaacttcttctactttgatgcagaggatgggaaaggtgtaatcgaggacctatcccacaagctttaacttccaaacatgaaaggtgctgtgaaacgctgctcttagtaattagttccttgttgaagattgtattggaaattagactttagagtacttagaacttggctccttgtcttttgtatctactaacttggttcgctcctaaagacaatctgtaacccactatttactttaatccatcaatttacacactcctatctatgtgaaggtgttctattttgtccggaaattttcgatttcggtttctggctctttgagtggcatctttataatataacaaacagcaaaatttgacagtctatagtgagttttgttatggttcattgcttagtgacattatttgttgttgagggaggtttcaaaccaatagagatgaaagtggaaacttctccacaagttgagaaaaatatttgataaaaacataagttggatgaggacaaacacaaaagataccaaataatgatttggagattctcttatccttaatcttaaatactaaagtctatgacagtgacatctgaacagaagaaagctcaagagtatataaattgtagcttagcctctggtgaagcagaatcacaaagtcaaggatatggatttaaacaacaagatctttaacatccttcttcctattgtcacggtttcgtttcttttagtgttcatgccattttcaatattcttcaagctcctccagttcataaggggatgcaaagagtccgagaaagtcaacggaaaagtcgtcatcatcaccggatcttcctcaggaattggcgaggttagtttgtttgtaatcctagaaaagcttggtctattttttataaattggttagttatttggtaaaaaacaaaagcaatttgaagttgatttaatggtgtagcacctagcgtatgagtatgctcgtagaggagcatacttgactctagtagctcggagagaggatcgtctccaggtggtggctgaccggtgcaggaagcttggttcaccagacgttgctgtggtacgcggtgatgtctcagtcatcaaagactgtaaacgttttgttcaagaaaccatctctcggtttggaagatgtgagttagtcactattattcgaataactaatattactacttgcttaaagaacataaaaaatataacaaaatttacatcagtggatcacttggtgaacaatgctggaattgcggaggccaaatttttcgaggactattctgaaatttcggatgttcttcccattgtggtatacatttttagatttaatacatagtgaagtcttttttacaatatatgaaccttggcaaaatttgcagaacactaacttttggggaccggtttacgcgacacatttcgctataccgcatctcaagaaaacaaaaggaaagatcatagcggttgcatcacctgctggatggtctggagtaccaaggatgagcatatatgctgtaaatgcttcttcttctttttctttctcttgttctctaaattaaccaagcgtaacatattaacataatgaatgtaacatttgtttcaggcaagcaaagcagctatgataaacttctacgagactcttaggatcgagcttcatccagaagttggtgtgacaatcgtgtttcctggtctaatcgaaaacggaaatactaatccggaccttttagctgaggtattttactatcatcatttttcattttagtctgtccaagttttatgactgaagtctcttttgcagaaacaagactggtcgcaagttgtgaccatcgagtcagcagcggaatgcgccaaagcggtagttaacggaatctgcagaggcaaaacctttgtggcagagccgtcgtgggttcgtgtcctgttctggcttagtgctatatgccctgagcttctgatctctaagcctaaaaggaattaaccagttgtgttgtttaataattgcataatagagataaaaatctgaaatacaacatgatggccatctagtttttctagttctgttcagttttttttttttttggttttaggaaatgttcaacctttttttttctttttgtcttttttcttgtcgtgttttaaatagaaaataaaataatcaataatcaatcattgatccaaattacacatcgaagtgtttttataacagttttaacatgttcagtttaactcaaactagtataaatttgttggaaaaaatccagatcaaaagagacaatatcatactaattggaaatttgactttgctcactcatgcaaaccgcaaaaattttgtttaccaatctcaactactagacaaatataacttttgttcgaattcagtttaaaatatttcagtatggttggattctcttctgtttcgatacacacatgtttagtattaggcaactcacttattcttaaagacacatagttaatatacatagtcaaaagtaccattaacaaaaacaaacctacattttcacccatttctttgataattattactcattgcacatactcatgatacatctcatccatttattatgtattgacccctctctaatccgacttgatttctggagttctgatagattccgggtacagagtactacgtacaccaggaatgtccatgatcctcttgttgagtgcagtatcctcggacataccagttccagtcatgtacagtaaccgacaaccccactcaatcaactccggacatagcactttccaaaggtacgtcaccttaaaccatgatggctctgtcacgtatctttgtttccggcacacaccgttcactatcgacttggcacatcctgatgctgacgctaccggaaatggtcctacttgaacctagttaattttgggcaaaagaacacacaattcaacaatgacctcaatattaattatattggttaaggagttaaagatttatttaacttacatctctcatgtcttggttgactattaactcgccttcaccagagaagtacttgccttgtgtgagctccgactcgatataaccaggtgtgacgattgtaatgtgtacatcgccaccaagctcaattctcatcgtctcaaagaagctcaacaaagctgctttgcttgcctaattaacatattatatgtataataatattcatcaatccctaagagcttactttactaagtaattaaaagaagtgaatatatacttacattgtaaaaactcatccttggagcggttagccacgctgcggaagacgacatagccacaatcttaccattactttgtctaaggtatggaagcgcagcacgagtggtataaaccgatccccagaagttagtatcctaattaatcacaaatcattcattaaagatcaggacaacgaataaaattaaagggttggtaattaattattttaattaccaaaactgcttttgtcctcgttatatcttcaatgttctcaaacattgaaatctgcgtcatcccagcattatttacaagatgatccactgcaagaccaaagaaattcaatgttttgtagaccaaacttgtgaatggtaacaaaaaaacggtcggttttgatagagtgatagtgattagcgtcccgtggcgtgacttacatctgccaaaatgggtgatggtgtcatcaacgattcgtctacagtcatcaggtttggagacatcagcatgaacggtaacaacattgggagatccgagttcacgagcaatctctgccacttcctctagacggttcttccttcgggcggtcagggctaaacatgcacctctacatgcgtactcatatgccaattgctgatatttcatatacgcaaatagactcaaatcaatcattttaccatataaaatatatatccgtttcacaaaaatatcgtttatatgttttttgtttttttttgttttatcatttatattttcttattcatatatatatttgttagaaaaaaacctaatgttttaccctgaaaatacactgataattgtagcactgaaagtcatgatgatataaattaatcatttaagattaaatgtgtgaaacttagtactattgtaccagtgaccaattaggttattaagtctacaattttaaaataaaggcattatgaccaaacctcgcctataccggaggaagcaccagtgatgagaacaactttcccgtaaagattttcagagaaaattgtcgagaaaatagactgcaagaacttgaagaagtaaaaaggaggcaagaagaagcagagaccaaagaaggtgaagaaaggagcagttaggttgagaaagtcgtttatcaactccatttttgtcgatcaaaacgtaaatgatttagctctcatcgatcattctcttttatcagcgatatataaatacaacgccaatactaagttggattttagacaaaaacggtgatgagacgaagagagacaagacacgaagatcaagtggtagtgtggcaacattgcatggaaccgagacgacacgttgtgtcaagatgtggaaaatgcacgtcgacgaccccttcttcttctttcctttatccacataacatctttggtagataagatcaaatcttcgttccacctataagttattgtcgtttccaaacgacactattctttaattgtcgtacttcgtgttattactcggtaattaatcacaaaaatgcttctcgctctaataaccatgcacatgggtgatgatttattttgggtattagtagtccaaaaattatattttaattgatcaaactatgaatttggtcctaatttatatcaacggactgatatctttaatacttagatcaggtgacgtgacaacatacggttggtcagtattttcgctttaataaaaaaaagataaacaaaatttctttaataattttatgttttaacatattaatttttgattttgtaattttttttttatacttaatcgatctcaccaatacaaacatatttaatagaagtatcataaaaaatctcaaatgataaacaaatattataactaatactaaaaaattacttataatactatataaatatcacctatatacatgctataactttaattatttatattaagatattaattaattacaaaattctttaaccaaaataaattattaattaatagatcatgcgagtacctattcacaaaactacaaaagtaataaaacaaaataatttgagaaaatattaagaaactcgtttttgaatatatatcttatcttactttaccaatttaactccaaatttaattaagaattaatccgtaaaatcatgtcaatgatatcttatacaatcgaatgtttggaaattttgaagaagttaaatgatgattctcgtattaatataattatttttattaatacaataggacgtattatccatgcatgatgttagatatcacatatatgtcacgccttattcatatatatgtttttcacgggatcgtttattttattatattaatttgttgcttaggattgtgtagaagctgcttgcaaattcgtgaaacttttatcactaaccgtaagtatatttttgcttggaaattatgtttggttactttttgactctcgaggcctatgagaataatagaaagttagtctcattctggcaacctctgttcatatttagagatgttatcgggtgcttacttcactaaaactcgccccaaactcaagaactattgattttatcatctctcatgttgactcttgaattcataacatgataaccacggatctaatctctcgtaacatgaatgaaatttcatagaaggtgcggtcatgtctttttatatttatatatactttaggctttcggttccattggtatttccgtatttatatatttctacgcatttgatagttgggagcaaaagacaagcacaccgcttttactttcgacgtgtgcacgaaataaagtaaatcattttaagatatggtcctcaacatgctttaactaaggattggtcctctacatccaatttaattaagcattcgaaaatggatttggtgaaagacaacaaaatactaaaaggagttaaaaagacagttaataattcaaaaggtgtttgcacgcccacatggttactaagaaagttaaattaagtataacataaaacgctcaagcatgtgattagtttaatcttaacgatgaagaacccttaaaccatgtgctgcatgcaagtagctagggactataaatattgttccaaaaaatagtctagccactccatgtccagtcacatttcgtatcctttagtaccctaagtttcctttgctactatacatcaagatatatcccattttattttcaccaaaccttatttacctatagtataaatggatcccgtaatcgccatgcaagaggcccaaagtaacaacggaccaagaacctacaagaagccatttcttaattttcttgaccgcctctccttgtcatttatcgtagttgttttctgcgttattgtagtttttagtccaatttggcttcaattttctaatagttttttcttattcaccatccctagagttattaattacatcttaaaccctaaggttttattcattctcacaaatgttatcgtgatcatcctcatcggagaatcaaggatttctagaccaagatcttctcttccagctagcgcattactgagaagccattcttatggtttgtggtctaatgaaaatgtgagggtggaaatgggatatcaacgatttttggaagagaatattgatcgaccgaggctcggagaaggcaagatatgtaagcttagtccgttggagatggattcattaaaccagagggctgatgatctgatcgctcgtgtgaacagacagaggaggcttgaaattgggctgttacatagacgcatagacgaaggccacatatcattatagttgtggccaaatgtgcagagagagccttgattgttaccaagaaaccaattaacataaaggaaaatgcaaattttcgtacaaaggttacaaatcaattaataaagttaagagtttttacgagatgttaataggattaaattcataatcggtggaaatatttttgttactttctctaaaaacttataagttaatattttacaaaaaaaaaaaaaaattaaagtaagccccacaagtaggggtgtcaaaatgggtcaaaattcatgggtcaactcaactcaactcaacccatgaaccctaatgggttgatttttaactcaaatgagttgatgggtcaaatgagttgatgaatcaattggtttgatgagtaaaatgagttgggttgtaatgggttaatagttttaatggtttacccaattaacccatcaaattttgtaaaattgaattaaaccaactaaaatctctaaaccaatatttaaccaacacatctaaaccaatttaataaaatcatcctcaaatttaagaaatcaatcgtttgaacagttttgtttcgttgagttaaaatttgaaggtcatagagattgtaacctaaagagacggggattttaatcttctcggccccttttgattgaatcaatttttgaaaaacttctacttattctcactgccccctcttcttctcaatatttctgaaaaccaactctaccctctctttatgatgggacccttatcttatcattctttatttcttttttaaattttatatctaaccaactctaaaatcaactaatcaaattcattctctctcctttcccaataaccatcaaaatctattaaaatgcctaataaactcattcttcttcttcttcttcctaccatttgctccctaaaaacgtttttcacttttttattttctttaattcttctccatacaccatttaagttcatcattaaatcaacacaaaaaaatcgtatctacatatcttttctcttctttgtgttcttcttcatagaccattaaaaatatttgtttactttttcttatagtaagatgtgatgttggtaactagtatacttggttgaattcgcagattaaatacaggtttttttagaaaaatttggggattataaatttaggacaattgaaacaaatgtgtacgactatgttgatagactaatacgaaaatataaaattatagactattttttttctcttttccattttaagtgataatcaaaaagacttcagtcataagctttgcttataatgaatatgattaattttcttgtcgtatctgaacaaattaagttgttctgtcctggtacaaccaagaacaacccttacaactaaggtctattgccttgtcttgtttttagaattttataaaatatgaaaatttaagaccaaatttataaaaaaagaaaaacttaaatgatgcatacacgatagtaatgaaactacattacaagtttttgaccaaaaaaaatcatcttttctagaataatgaaactcttatcacaaaattcaacattcatacactaacaaccttatactttcatggttactttgtatatttgaactatatttttttaattt

SEQ ID NO: 871 - DNA, 66087 bp, Arabidopsis thaliana
tttaaatacttgtattttgataaatataaatatactgatacattgtaatggtattttgatgagataatatcatcggttccaccaaaaaaatcttatttagagttgataacaactagatttaataaattctcgatattgtacaagtatgagcataaatgtgcaaccgagtacaactatacaactatgaacaaatttgtgcaattatttaattgatgttttcaaaatatcagcgccacatcatatatttgtcaagttttttaagatatgtagatattttagatactttatttttttttccttcgtttttagatcaaaacttcataataaatttttatttttttcaaaacacaatcattcataatttttcgtaatttttttttgtcaaaaaatcttagattcataaataaacctagaagcatagttgtacatacgtctaccagttgtacctaaatgtcctaaacatttagattcatacataaacttcaaaaaccacaagacaaaccaaacaattatacttcaaaccaaaacccaagagaattgtacctaaaagactacaactaccaagtcttctttgtcttatacttctctttctctttttccttctccttctcttcctcctcctcttcctcttgtaataaagacacaaatgttcgaggctaatatacacatacaaaaaaattcgtccatgtctgcaactccttattaacccacttgaaaccagatttcttccaaaattgaccaagagaaatcaatcattttaataagaatttacaaataaagttacagtttttactcattatctctcaataaaaacaagaaaaaaactgttacatgtcgttccaagtcaatactaagttaagaagttaagaaccttcaagaaactcactccatctatggagatatagagtcgtctccatcgtactcatctatgacttcaatcaatttcctaattcacaaaaaacaacacaaaatgaaacgagaattgagcaattgaactaaaatccaagagcaaagatgtgaaattggaaaaggaaaataagaggaagatgaagactatgaatctgaagtggaattagctaactgtagttgttagaataactagaatttataaaagggatcccttattccgcctagtggagagaacaatggaagctgagaatttggttatggatataagattttgtgggtttcaaatttgaggtgagaaagatgatgtaaagttgtctgagtatcgtggataaataaagaagagaaatgagaagatgtaggttttttaatttgggatttagaaataaaagatccaaacttacatggatttagatctaaagtgtggttgagttgtaaatatgtcaaatatcatcagatttttttgtcttttatcatttatctgaattaaaataaatagataaagacatttttcttatatcgggggctaagcagaaaatgtttcgagctttgggggccaagtagattaaaatccaagagacggcgtgaaaccagataagcgatcccggtggtcttacggcggagggatgaccgaaccgctcgggccaacggctgaaatgctctaatccccggagtctgcgccaccgtatgtgtaggtgaatcaaaggagagacaccgtaggttaaaatattctttttcattgaaatcttgaggcacttcatacttgtccacaacttcttggggagttaaaatatcatgtgaccaatttgcataaagagccaaaatattgccttttgtcgcttatatgtgcatcaatcctttctcacatattgttcacaaggcactatgtgagaatgagttgagagaatcattgttgctatgtttcctaattgagaagcatccactcgtcttgtaataccctaaatcaatccacttcttcattgaacccacatatccatttttcttgccattaagccaacaaatgcacatcttgaacggttcttgagagacaaacttatggaccagtgcataccactgtggcattccataatcatcataagtagcccaaacttggttttctctcaacaaagcttgagtctgatccttgtcgaagtcttagacatctggaagactcgaaacactcataaccaccacattttattcatcttttttgatcaatgcaggatgaatatccaaatagatgcaaagatcaaatggttatgttatgtgtgctcattatcgcaagccctttggagcaattgagtacttgctccatggataatcctttttaatcgatagaattatgctaagcagcaacaaatcacgagactgagtcagtttccgagctatgatataactaaagagttgtcaccagaagagtcgtcggtatgaatataatctactcggtagtcactagaggagtcactaatcagggctaaatatgaatgtatctcgaagcagggctatatgattggaatgagagtttgatcatatgttatatcattttgaaattcttatcatcatttatgtcaaagtttttatgtgatttgcaatgagaagtggagcttataagatattgttcctctattttgttctgagagatgtaaagacttattaaatagagagcaatcatgtcgtaactccagtttaaaactgttacatatcctgctaagaagactcgacagtttcttgctcaccaggaaatagggtttcagataacgaaaacaaaccaagtacaattcacaaaatttatttcttaatttttatttttattttgacttacactttcattttagtagactttatcttgtttcctaagtctcgtaggtctttgcttccttctaggtcttgataaaggattttcttccttttaggttctgttgaaaccctagaaccttttttttttcaaaaaggttttaacactagaaccttgtttacagctttcttctcttttattattcaccagctattgatttgatataaacgaggctaagaaagagaaaaaaagagagacaattaatgttcaatgtatcgtttacatgaaagaaagagaaatatagaaacgcctagttaaaatgaatcggttctacaaactgatattttgttattattattattttcaaactgagcttttgtattttgactgaaggaaaaacataactggcaaatataaaaattattcttctgagaagagagcctcggaggtgttgtttccttatttcttgggtactaattcatcatcattatcatcctcagatggtcgcagcttatggtcattatgccgttcttgtagcataatgtataaataatagatgcaaattaaagaccacatgattatttgtgttcattgttgcaagccatttgaagcttttgaagtgtgtctagctccatcgatggctcgtgttactcctgtgaacaatgaattagcatgaagtccatgaaacaacactagtcatcaatggagccggatactcaaaagcttgaaaacttccaacatggaacacacataacgctgtgatctttgcatatattggatattcacacttcatgctaaagcgcggaatagtgcccacatgctgagacgatctgatgatcttaatgatgatgatgatgagaagttagtacccaagtgatcatgaaacacctccgagattcttctcaagcttagggtcgttttcgatcgctgttaaaatagtacacaatatcttttggtctcttagttttgatcctgcaaaagaaaaagattgataatcagaaagtagaaagtgggaaaacttttcatcaaacgctttagtatgatttaatttcttatgcccgaggcacaggctagagaccaaaaaaaagtactctaaaatctgatatatatcccaacgaaatacagaaaagaagcctcctaaataataaaatcaaagtaaataacacgagccatatatcaaaggtggtttctgtaaaccatacctttgccttgagagtgaagaagcagtttcagacttgtgggtgattaatatgagaaagaacaattttatctttttcttctttaacgttaaagtgaaaacttcaagagataaaatttataggatgataagtacatgtggtagtgaggattaatagaacatgcataaaactatttatggtaaatattccattcctttgtatattcacaaattttatattctctgtattccctcagtcaaaatattcgtttctgatttcatttgatttccatatacaaaatcgctgtttgtagaaatgaatcttttctaaatggcgttttcattaatttatttctttgtttcaagaaaaatatagtttgaacaaagactttttttcttcttaatctctaaaaggtaaccaaagaatttctactctaaacgaaccctactggatattgagaatcttgaaaacctttttttttttttttttttttttttgtaaatatgatattttaaattttgtcaaaaaaacaaaacaattattgtgctggattttttttttcttctcagttattcttaaatgttcatttctgtccgtgtatagtttgatggcaagtacgagaaactgtacaaatcagcatctggaacaatcataaaccaccactttaggcacatcgttaaacctggaattcagctcaatatgtttgtttcaaaggaaacgatagggacctgcttcttgtacgtttgggagtattcaatagaactctaagaacaaggaaagagataaactctcttttattaaaactcaaaaatgaatgacaaagcaacaaagctaatggaggaaaatccaaataaaaaatgcaaatgtaaaaacaaaaaaaatccaaatttaaaataaaaccaaaaccaattttaaattaaacaccaaacggtccaaaaccagcaagtagccgtttgctttaagcgcctctttcttgaagatgttgctgtatctatcactcctccatgaccttattatcagtttcctcagcagcaccaacattattgtgcggagaagaacaaacaaacgtttcaagactcagtttgatcacactcgtagcctttcgagccaatgcacttcgaagcctatttggagaaatatcgtgtctaatctctgcgtcttcgctcattcttgttaacttagaaacatgaagtagatttgttggtggaggttccttttgtttgcttccttcacaactaatcctgcttagttggtttattggaccagaaactctccgtgaaggtaaaagttcgcgtctctcgagaaaatatttcgaggcatcagtgagtatcttcagtgcctctttaacaccactaccaacagattcgtcacggtcaagggaaatgtcaatagctaatgtgctataacgattaaagattgttataaaatctgcggttcgctcgaccgctaaaacatcataccaatcaacttcaccattgacttgcttctggaaacccatgcacacgtcaagaagtgcattgagacggcgaagaccaccaagtgcaggattaatttgttttgccttgagagcaaactctttggctccagcaaaatcacccgctttatatttttccactgcgatggctttcgctcgtttagcttcttctcgaatgatttcctttcttgattcgtccatgtgcatcatttcttcgtcaaaaggtccttttatgtctcttagtttagatcatgcaaaagaaagagattgatcagaaaataaaacaacccaaaattgaacattgctgaaagcagaaagtgagaaaacttttgccccaagttatccatagagataaaaataattccaatatctatgaaaacataaatggtggaaataggtatctagatagatgttctttgcatcaaagttcgataatattaattttgaaatttaagaaccaaagatattgactcccttaagatcaaatcttgaagtcttaggtaaggaatccatcaaaattgttataagaaatatctactcctaaacaaacaactcatgccaaatttaggaaaacggcaataatgaatagacattttgcggccgaaagtttgtaacaaacttaaatccgaattgagttttcccgcgtaaatccgttggaaaacaaagccaaaactcttacgaaaataaacaacatggtaaactttagaaaacagattcaggaatctagaacaggcttgttgctagagatcgtagagaccactggattaagatgaaacttaacaaacatttgcaaacacaaagatgctgatataatctattgaaaacacaaaccattaacaccatcaatcaaacaaactttaccattcactaatctcagaaaaatggttttaacataaatcaaagcaaaatcacttatctctttcttatacaacactacacaccaaaccaattgatagccaaaaagaagtccataaattttttataatttagggattataaaatcctaaaagttgagaacccatttgtcaaagcaaatttgattaatgacagaaactctagaaaagataagacaaggactaggaaaaaaaattcaaataaaagcaccgcaaggttctataccttgtgagtgatttagacgaagaattaaattttcttagcttctcttatcttcgttttgaattaacgtttaagtaaagataaaaacactctcaacacctttaagatgatgaacatgtagtaaagattagtaaacaaatacgactcttaaggtaaaaaatattaattttatattttccagttatgtttttaattcagtcaaagcactcatcagttcccaatttcatattatgtccatacacaaaatctcaaaacgaaggagaagagaatagaacaagaacgatacctaggtttctccccacaatcaaactgaagcatccaaatttcataagttcaaaaaccataaagtgatacgtatttgacaagaatttcgtacatgcatataaatgacattttatggtaaaacatttcccctatttcagtgttccatttcaatactcaaaatctatagttggtatttgtagaaattaatcaaatatagttggttttttaatttttctttcaagaattttttttatatctattaaaattatgtttatgtaatgtaagttatctaactcttttagggcaattatttttttaatgttacatttaaatacttgtgaacaccaattaaagattttgagtatggaattcaaaattgcttacatatatcttccaaagaccaaatgaaaattgcttacacaattacactatcttcaagtctttgagactcggtgatgaagcctcaagtaaaacttcctcgtcctataaaccacactcaaactcaaaaccatagccattagacacaacatggacatgagactgcacgtgactgaataacacaccgagcccgtgcagacgagcgactcagtctctgtggtgggtccggcttgctttctggcgtagtagtcatagatgttactagcgatcacacctgagaacacaaatgacccaataggcaaagctgtaatctggaaattgtaaagagaaccgaagctcttcaggccaaaaatgtcagagactgaagcaggagcaatcgcccaatgagcgccataacccattcctatcacaatggtcactacgtagatcttccctggccaatctatggcatagtagatgagccccaaagacattatcgcctgaaccacagacattgccaacgttcttggaagtgagagtttccttttgaagaggcagaaagagatgaatctgtcagtaaaaaacacagatgcttcttaaaagcgaaagtgaaatggttaagggttttgtaccttatgattagctcagagaagtagccaccagcaacacggccgagaaaattggagatgctgatcagtgagacaaatattttggtgttgctgtacccgagggaataacaaatctgaccaagattgtctataatcgtgattcccgaacctacacctagaaccagagacataaatataagccagaagtcagcttgtcccaaagcttgtaacaaggtgaaatcttctcctatacacggcgctcttttcttttccggcggtctgtcacttctctcaattaaagttctagcctcatgctgatccacattggaagttccttcttcaggcttcactgaggtgacattattacccgagatgaaaaccgatgaaaaagggacaagaactggaacaaccatgaaaatgacaaggatggctccagaggttgtgataatcgtttgagtcatatcaaaaacactctgaagtaccaacaatcctagtaaatataccgcaaggacaacacagaaaccgtaaatagccaggaatcttaaatcatcagatcgcaagttcgttctgcaacttctttccacgggtctaacaataaatagtagagcaagaaccacgactggtggtccaagagcaaccatgagaataaccgaagaatcatgagaagggttgaacatcaaataaacctgagtcaagattgctccactcaagccagaaaaccctttcaggattcccaccacaggacctcggctttctgggaagttatgaatgcatgacacaagcgacgctgtattgtagtatgtttccccatttgttcccacgaatatagcaacaaacaactacatgaacaaataaaccagaatcaagcaggatcacactcatatgtaagctttaacatctttttttttttttttttttgaatatctggaagttcaagccaaaattagagaatcgtacaaataatcaaaagcaaagcacaattactaacgaaatcgcaaatgtgtaagcaattttgatttgtaaaattcatctcaccatccagagaggcaaattaggcaattggccagtgacgacgagccaaacaacaccgtagccgaaaaggttctgagttgcaccgacgagtagaaccacccaggaaggtgagacttcagataaagcaccggagacgaatccgatggcgtcaccgaggtttttagctacgccgagaagagcgatctgtttctgattgtagccaagggaagtcttgattgccggagacatagagccgccgaatagatagccaacgccggcgacggattggacccacatggcgcagacgaaaactagccatcggtcgttgactaggagctctagtttgtgacgccacaaagtcatcatagtcaaacgctctcaaaactttctatttctttttttttttcgttgattcatatgattacttattttgtaattttcagtttcaaagaaaagtttggacaacaccgtaaatacaaataaaatgtttacttatttatatacaattcatgtgtaaggttgagaaacaaataagcaacaagataaaaaaaaaaaaaaaaacacgaatcaatgaagaggtatacacttcacaagcttaggtttaaaaattggtttgcaaaagcattcacttttgtatctccccaaaatgaatctgttagtttgagttgcgcttaaggtacaccaaaactccaagtccagcagcaagagcagccccggctgcaaccgttttgtaagcggctgcccatgagtttgactggtcgtagtccatatcctctgaacttagacctctcctgtgccctctttcttctgtgtagtccaaatgcaattttaaaccctgcaccatttggaatccccaacccaaatatactcttctttagcccaaaatccacattaaccaaaacgagaccgcggatttaaggtatcatttcatcctagttctttacactaattgacaataagtatggatgtacaatttattaccttccagcctattgattttgcatgttctacagcagctccaagatcattatctgatgctaaaacaactttgtcattgtcttcatcttcgtactacacaacacaaaatatgtcaacaaaagaagaaaatttttcctatcttctcgtttaataagttttcgaataaatatgtaccattatctgaggcaagttatcaggctcaatgtcatcccccattctttgtaggattgctgttatcagagttgtcaaactctgtgtttctgttattgaaaagtaaaaacaaaaggttaatggactaagcagcattggcataataggtgtcctgtttctcaagagttatgatttaacgtaccacacataaatctatgcattcgtccctttttatcttggagtttaaaagcaaatgtgttgggatatgaaaatgattttgttacttctatctccgaagataatttcatcgactcttcttcactgaaaaatcatatgatccagtttaagaaaccaccttatggtcaaaactaaatggttcaaaggaatatgagtagaaacctcctcgtttcatcgccatcttcgttaggagacaaagccatagcagagtcccaaaacttttgcatcattgagtttgctgtctcattgtttattccagccgtacttccagccttgtcaaaaggaaataaagagtttatagcaaaacaagaatagtatgcaacaaatatatcatgttctttcttctctcggattgtttatcgatcttgtctcatgttttcgacttcaactagaagagaataatagaagaaaaaaagtgtaccgtagtaacagcagcatgagttatgtggatcacatcaataacagcgacaacatctccatctgtatgtaatcatcaacattagacaagtgttgaaataacaatgcttcatactttatagctcaaagtcagttttgaggacattttgttacctttatccaatacaggaagatgcagaaatttgccattatgcatgatatgtaaggcttcaacaattgccatatcaactgttgcagattctggattcggtgtcataacctatagaataatgggattgaaaagaaacaacaaagacgaaaaatgagtactcatataaatctaagagttgaaaagaataatttcaaccagattcaaaactaacgagcataagcatacatacatatatagcgaaaacacgaacttaacgaaaactttaccttctccacagtagttgtctcttgaggaaggttttgggatatcacccgcatcaagatgtcctttgagctaacaaaaatcacaatttaagatcaaagttccactagaaaagattaaaacatgatattgtagagaaaaaatttcagaaccatagaaacgaaaaagaagacaaggggccaaatatgacacttacgttagaatcccaactaatttgttctccaccatcaccatggctgcgctagactgatattccaccatcttcatggttactcctaacacagtctcatccaatccaacctttaaaaccctgtacgttttcattccaaatttactcgttaagctttgcattatttctctcaataaaacaagtataagatcaaaatgatttcaaatatgataataaatatagaggagatattacctactttgtattctccggaattatagttgaaagtgaaggcttgaatattcgttctctaagtgtctccataaaagtgtttggtcctatcgtatatccaacaaaaacgccatcagaggcatgcaagaagacatttgtgatggattcaaatggagatactcaattccatatttttaaacataccagcaatagatgttccccagttcttttcaacgccttcaacagccgcagcaatagccttacccttctcaactgatctttccatgcgggcaatagcatcatacaaacactttgcaatatcgagaagcgcgataacttctccattctccaccaccggcaaatgtctaaacttgcctgcatatccactagtcagctcaagtaccaagaccaacaaagaacttataaaagaacaagaaataacaaaccttgaaccatcttttgaagagcttcaacagcaatagtatcagacaaaacaaaaacagggttcttggtcataactttagatacaggtgtttcttcaaggttaagttgtttagcaatcacttttgttgctatatccttaaaaaaaacaaaagagataaaaaaaaaaacataagtgaaaagtccagtttgcatttagaatcctgttcatgaaaacatgtataccctatctgttaggatcccacaaagtaatgcattagaatcagtcagcaataacgcatcaacacgacgagcagccattcttcgacaagcttcaaataaagttgtgctatctggtacagtaagagccttacacaaccttagtctctttaccgttctctcaccactcctttccccactcaagcttctacaccaagaaacaacatgcaaacatttacttccaatctcatatattttgaaacatgtatcattcctcagaaaaatgaagaattggaagagaatggggtgatgattacatggaagaacgagaagatgtgagagatcttcgtgggaggagatcagagccaccaccaccaccaccttcgttttctgaagcttttttccttccttgaaatgaatgaccggagaaggagagacttttcctcgacggaccaccttggttagccattttcaactattccgatctcctccttcaaattctctgaaacactttaataaaaaaaatcatcagattttgatttttttttttttttttgcagcaaatgcatattcgaattggaacttaccaaataatctttctctttcggaaaatttttgatatcaattcacagaataaaagagaaattcaaaactgggaatttcgaatcttcacttcgataatgatcgacgatttcgaatcgcctagttggggcacgatcgataatgcagttcgaaggaattggaattttttttgtttctgggaatcaatcgaaagaaattttggaagagaaagacgaaaggagagggaaagcaaagggccagaggagataataattaattgaataattaaaaaaaaaaaaaaaaaaaagaatccgtggtggaacttttcttcattttgccaatctgttaaccacgaaaatacagatttgcccttggtatccgatcgggctgtgagtatcacgctacgcgggaacgacgacgctgacattgttaatgaggttatttatttaaatccggaaactaataatcagtcccattctttatgaattcaagagcacatgtgccaatttggttcaagagctacgataagtaattgtttttaacaatgttatttcttaattatctatgatctatattcactgtgataacaagatgataaaaatgacgtgaatgcaagatatattaatacaaagctttttttaaaaacaatttactcatttacaaagataatgataacattctgagttaccataacacattaaaaacagagatatctgaaatggtaagttttttccatgtctcaataaaatatatattttcaaatttttctataaaaactattaatttgatattatgttttatgtttcttgcatttctgtctatcatgccagtaatacttgttaatggttcgtaaagagttggaatgagatgatatagtttcatcccctcttataattcaagagtaatcagtgattagtattaagtatcttctttgtcatgaaacaccaactccgatgctcccttggtatagaaacttcaagggaagtatgaatacacagtaactggtatgtacgatgtgaatgacaaagataatagtattcgcatcaccgagttgtatgtctaagttaaggttcttggagagattggaaaaacgtagtgttattaaggcagaatcaatgcttttgcatcataaactatcatagattttttgtatgttttttctatttatgcgtttatttttcaggactacaaaaatgacggtaataatatgtcaattgacataaagttgtctttaactgaagagcagatggagcattttttgaataactataacaaaaatccaagaggatttcttggtattttgagactatccataccttaaagaaccaacaacatgtgtttgcttaattagtggtcaacacctatatcactaattaagaaaaaaaagcttacagttcttgttatattacactttcaaatgttttgtggtctttttgtttaaacatttcactagtcttttttcgaaaaacatgcaaattaaataaccgtttataatatattatctccgcattttgaacaagatttgttccaatggtaagataacgataccattgttaatatttttgtccaacaaaattatgcgattatcaagggtctctcatagttaattttaatggttttgttggttacaaaaatagtagtagaaattggactttagtatataaacaaactcatagtacagtattattctaaatctttaatccagtacatctccaaagtgaatttcgaattatttggttctgtgtgaataaataaactgggctttattgggcttaaggcccatctccgttgtcgtcttcaaggtcacgcttacagacttggctccgccgctccggcattgagctccgtcgagagaatggcgagtaatcaacaaccaccgtcgaatctacagacctacggtgtaccaatttacgccgtcgactggattctagaggaagctgtcagatccaaaatcactaaggatcaggatgatgatgatgatgatggatcgtcgtcgtcgtcgtacatcgttttatccggcggaggaggagaaggacgaagtggaatacctaatgtcatcttaatctgtcgtgttgatctccacaccaattctctctctgaacaacctgtaagtgcgaataacaaagctccttctcttatgatgaatcattcacaattctctgaacattctcaatgtttttcgcagattggtaggcgtgtgattggcactgatctaccttatcgtatggctattcatcctcgtcaaggtggtcttatttgtgcattgcctaacagttgcagactgtttgattgggaaaacattatagaggatgataatgaggaagagtcagagaaagttgttaaagagttaaaagatgttggacaacagttgtctctctcgtttaatcaggatgggactgttctagctactggtgcagaggtaggaaggatcttatattcattctcttgagaaagaaataaactttggtggtggttcttcttatgtgtttggtttttgatgcagtgcaggatgggactttgagggtttttgaatggccaagcatgaagactttacttaatgagtctaagacacatgcatcagttaaaagcctaactttcaggtgagaaagggatcatctttggagaaatgattgtaaataaatttcttgatagtgatatttttctgtttgcagcgaaagtggtaagtttcttgtatctcttggagctccactttgtcgggtttgggatgtgaatgcttctgctgctattgccagtctatcaaaagagaaggtctgttgggttttgctctttactagtttctcttaactttattgttgtattggatctgatgagagtttgaatactgaaatgcaggacgagatgtttgcctcgtgtagattctctgtagacaattcaggcagtgaagttctttatgttgctgcaaacactcgtaactcatatttattctcacagtgcaagaacataagaaccctttttgtctcagccaacaattgagagatttgatttgttttgtgtagaacgtggtgggagtattataacatgggatacaacatcatggagaagaagaagttcaaagcttattaaaagaaacaactctatatctgcctttaatgtctcagctgatgggaagcttcttgcagtgtaagtttatctttcttctcacttatggggccaaacagaaatactatattttgttttcatgtttttttcttaatgcagaggaaccctcgaaggagatgttttaataattgattcgacaaagatgcaaactaaccaaatcgtcaagaaagctcatctcggtttggtcaccgcactgactttctcccctgattcaaggttttttctctactcctttaccgattcaatgatgccaaacaaacaaacagatacgaatctgaaggaagaaaagatgaaaccattcaaaagtgttactttgggtttggttttgcaggtgcttagtgtcagtatcttttgactcaagggcaaggctaaccgtgatcaaacaaaagggtgaaaaacgtatgtacatttacggtttctcctattatctttccatttcaagaacagggtctccataacctaatactctggtttttctacgatgaaattgcaggtcgagtatatctgtgggtggcggcattgttgtttgtgttggtatacgtggttttgtattatttgatggtggcaatggggatcatacattagacatacgtaaagaaagcctctaagtaaatccacacgacaatacatggaatggcttgaagaaaccaacatacagatttataccctcgttaagttttcttagactttgtgttttgagtaggtcgtagagattcttcacagaaactttcatgcttttattagtttacatcatatattcatattctcgtttctatcttttagtattaccacaatgaaagtttgaacttcttttagtcaacgagacccaatgattaagacattaagtgattagaaaatgagagagaccacccaaccatcgtctaacgaatctctcgggacattgaccaaagacatcaaccacagtttgaccacgacacttctgacgtgtaacaccatgtattaagccatttcaccaaccatatcacaagggtttcaatatcatcaacgcaagtaatataacttaactatctctcctctcttttcttaagataacttctctctctctattcgttggtataaaaaaagaagactaggaaaatgacggagtggcttccggtggtggtcgcgacggtgttgtttgtggtgctgagcccgggattgttgtttcaggttccgggaaacaacaactttgtagacttcgggaagatggaaacgagcggatactcaatccttctccacgccttcctttactttggccttgtcactgtcttcaccgtcgtcatccactttccgggcacttaattctatgtaatctttacttacaaaaactttttcttcctatctatgcttttaccttttctatattatcagttataccatgtttcccgtgttcacctaattattatgctaatgttttgttacttttacgttataatgatatcaaacttgcgatgcgtaagaaacttgtttcgaattagtaatgacaaaatggatagttgactagttatacatttttgttacgttattagtatgttggagtatattaatgttacaaatgttataaaaagtttaaccaaaatagacatcccaacaaacatagacaactatataatgaatagctcgaaacatctccgcagccatttcattttcattaacatatgttttagccaaaaggataagagtggttctcctaagattctatagttgcaataagatgtgtacataaatagttatctactctctaaactgttaacttgttgctaattgggtactacaagaccaacagaacctacacatcaactaatcaaatgtcaataaaaacccacaattcaacatttacactacaagaaatatggatattgatagcacattttaatagctcaatttttgtaactgctattaaaaataaaatgttggataaagacactatataatagcagttacgaaatgctaaacgctaacatgactaaccggacaaataaagtttaattgaaaaacctaaaattattataagcaccaacatttacccaaaaatattacacttagccaccaaattattaaagatacggctttgtgttttcttttttcaatgaagaacaaaatattttgtctcattctctcacaaaagaaaaacctaaatccctccgttcctccatctccaaatagacagcaaaataaaaaatccagaatttcctcttgtcttcgtcgatgaccagcgcaaactttgaggatcccccttcttctcatcgtcctctccaaagatgttcttacccaagcttttgttctgacatctccaaggtttcatcatggtcagaactcaacctacatatatctacaaaaccaaatcgagacctccacagtaataccgtctattcaaaaccctagatctacatattttgtctctccctaaagttgcaatcgccagtctgaggttccattactcctaattgtttttgcttcacatctcattcaacgcctaacctattacattctcgtttatttgggaaaattagattcgaaattgaaatcgattccaaattaggatttgagatccggagaaaccgcttagtctgctaacgacacttctttttttttttgtattgcggtcatagccaatcctatcgatgttgttaagtttcaaaagtagacaaatttacacacttatctataaaatcgttttgtgtatatttggttgagcttcttgtgtatgttttgttataggcagacgagattacgcagaagaacatgttgcaggaattatgtatcaaggctcgtgttgtctgtttattttaaatataatatccaagagatatttgcagccatggtaattcatcatatatgcctctcaatctccatctatctttaaccatgaagtttccgtttacaagcttgattttctagaattcaaatgtggtatttgtaactttcattaggttattagtttgaatgacaaacgtcttttctatagttttgaggttttcaatctggttttctcattgttgttgtaaggttttctcattcttatttggtaatagtttgtttatactaggacaagagaactgatttgaaatttttctttgttccaggggatataagggaaacatggaactcaacaaggaagatatcgtgccattgacaccagcagctcaaatcacagcacctccaatcctacaagatggctcatctcaacaaggtaatttattagcattttaagtaactgttacaatatttcagttttttcaggtacagtttgttgtcttttttctctcatattaaagttgcataggagggttttagtgctcaatgcatctagaacagaactcaatgatttggtctatagagtccatattctgtttcgttttctaaattattaaataagtgctttggcttttctttgattctgtaatccttaactctagtaattcacgagaatcattgacatatgagagtttttcacttgctccacatgttctttgttttctttttatggttaaaatactaaattttgcttagatatttttgcagattttataagtcttgtaacttcagaacctaataacgtttgtaacaaaaaggacaaaattaatggatgattgccattaacattttgatttcggtttatttgttttcttacagctgaggatgcgtttggattagcagtttggttaggaagaggtttatcaagtgtttaagctcagagaagagatagtgatgttaattctaagtttcatgtaagatctgctcaagtactcatttttacactattcgagtttgaagtttgattggagagaagaagaagactgtacaagattatgagaagaattggagaagcgagtcaaggttagaaagaagatgtgatatcattttacttgtggcatttgttattgtaatgttagttaagacttggattgagacttgtatggagattttatatatattgaatttgatcaaaaagaggtttcttgcaaatgtgtaacaaaatgtcccaaacttataggctgtttatagatttatagccaaaaaaataaagctacaacatatcagatcatagcctataaaatatagctacaaaataatagtttatagcccttaaaaagagttacaaaagtataacatcaaaattgtgcaataacaaaggaaatcaaagcatttcttttacgccataatatgtgaacatttaatagcatagcaagaaacgctattgtatgtgaccactctaagatagctccggcaaacacagcgtttatgaatccgctatgtaaacgttattatagcgttttcggtgtgttaagaatgtccatatttcttgtagtgttaacaagaacaatgatgatgataaagaacattgaaaaatgagggagaagagaagagacacaaatagatctttctgattctatctatctacctacttcttcttctactactcccaatgaaacgggaatgtctgcggaagacggacagcctcgttaccggatataaccgatccatcagagactgcactcgcattctcaaacaatcccgacccgtaaaaaactgtctcaactgcttcttgggacaaagaaagtggtggttgaagcaaatgagggactgacgacgaggaggatgacagaagagagagagcacaatcagagtcatggatgcaactcgtcattctctcacacaacgatgcggttctcgagctttcttcttcttgcaagaaagggaattgttttgctatgcttctggtactgtttggagaagaagagattggaaacattatccctgtctttgcaggagaagaaccaacaacatagctctggctctgcccataactcgaaccattggcggctacagcaacgcttacaagactatttccccagctcgggttcaacacagatgtagttggaaacacatgtgaaccaccagaaaactctagcaatttgctacctgaaaacataaaacaatgcttcttcatcaacaaggaacggtctattggattcaagaaactaactaacttttcttaaaacagaaaccttgaaaacccgtaaagaagttggcaggacgaccgatatgttcaggctgcggcttccgtcgtcttcgattatgtccatcaagacgtttcctacaacttctcttcccttcatcaaactcctccaaagcatgaaacctaattagacacaaatgttaacatcttcaccaacccaacaagaagcttaaaccattaacacacaatcttacctgctgcattgttgacaaaacctctgtttatgaccattaatagtaaccacaggagtttttgaatgaacatcacaaactttatgtctcttatgatactctctacaattactaaaatcagaatcacatccatcaacaagacaaatcggcatctggttggttccaacaccattccctcttgttctctttgaactcgagcttcttgaaccttctggtttagctaaagcactatctttccacttactaagactaatcacttgctctgtatcaccaaaaacagaggaagagtttccaatgtttcttccaagttttagatcaaatgaaaaatccgcttttgactgtgacgacccaccaaacgagatcgaaccatccattggtgataaatctggttcttgatcgaatccagataaataaccagagctaagtttgaaattccagtccattcaaagattgtgcttttttttcttctctcactataaaaacacatacatacacaacagcaatcaaagcaatatcaagatttgtcctttttgatattggtactctaaatttaagaacaaacagcaaaaacaactagtaaacataaaacccatgaatctttaactcaattaaacttcaacttcaatacatatgaaggaaaataaaaaagcataagcaaaaagcaaaaacacaattataaagagtactctgaaattgtagttgaagctctaacaaaatgatctattttgatattgaaaaaaaaacaaaaaaaaaatcccaaaaaaggcaaactaattgtactgaaaaaacgaaatgagaagtgcagaaacatagaaactagaacagatcccacaaaatgggaagaaaggaaaacaaaaaaaaaaacaaaaaactttttttctgtctactcaattccaagcaagaattaaaaaaatgcaataaaaatgaaagattaaagtaagattataaacatgttattacattaaaaaaaactatagaataagaaaagtttgttgtttgaaggttgagaaatcttaccaaatccatacacctaccagtagagtcagtagaagaagaaactccaaaagagaaagatgaaaatataaaaaaatgggacaagtgaaaaaaaagaaagagaagatgatggagtttagcaagagaaagtggagacaacaagtgtggctgctacttcaataatgcaaataagagaaagaggaaagagagagagaaattgatgataatagctattactaagttaagaaatgatttacttactttaattgtaactttactttcctgatttagggttttattgatatcattttttaaaaactttgagtaagaaaaagtgaagaaaagaatggaggaaagtgacagctgttgttgattgttcttttgcttactttttcaacttttctttgtttatatttttctctgccattcatcaattctgaactctgagcatccgatttttatgaatgaacagagtatacttttgaaaatttcaaattactcataaatcttgtatctttttactgacccttatccaaaatatattagttttcaaattgtgatataaaatagatgtggttttttcttttttataactatgatgatgatgaaaatgaaacaataaattggaaagtgatactaaagaaagaggtataggatgcttagttgtttacggcaaaaaacatagcatgtgaatgttgtgcttcgcattacacaacatcttcttctgttttttttcttctctctttccaccgatacgcgttattttctttgactttcatagttacgggtcacacaagttgtcaattatcagggagaatcgtataaaagtcttccatgtctttaaaagttttgcagatggatttaaaagatttggggtccaaagcccatgtttcatttgtttcggcccataaattgtcctaaaaaataacaaattggttatttattgaatgcacagttgttttgaatttaaaaatttgtagttgacgaaccggaccaaaccaaaacaaaccatgtaatttgaataaataaaaagaaagcaattttccggttaacaaaaaatctcaaactcagtgagtgagtcaccgaaaacctcttgtagtagattcgtgacgggtttgatcatctcttcgaggtcggttctagggtttcactacgagaatggacggagatgagctcaccgagcaggaaactgctctttatgaccgtcaaattagggtatggggagctggtgctcaaagaaggtacttcacattgaatctaacttctatggcttcaagcaacaacaagttattgattttccgtttgagtactaataaactcttcttgttgggctatactcggtgaaagtttatctctttctgggttttaagctaatttagctgttgaaattttgattagggcttctctgaattttgttttgtgtttttgcttgcagattgagtaaatctcatgttttggtatctggaattaagggcactgttgctgaggtacctcttactttattttgtgactctctattagctatgttgcagtagagtgagtgttggcatcttacttggtttcctccatttggtgttgcagttttgtaagaacattgtgttggcaggagtaggtagtgtgactctgttggatgatcgattggttacaacggaagtcttcaacgcaaacttcttgattcttcctgatgaaaatgcttatgtaggcaaaaccgtagctgagatttgttgtgattcacttaaggattttaaccctatggttcatgtttcaatagagaaaggttactcctcctttcttcatttctctctaattttagtagaaacaaatgattttagtaacatcgagtctatgtcttcaatttcaggtgatttgtcaacacttggtgttgattttttcgagaagtttgatgttgtggttatcggctacagttctcgtgctactaaggtactgttgatacctccttcttttagttgttccagttgtttttgtcttttgttgccatgtagattgatcacttgaaataatgtgctttgttatgcagaaagcagttaatgaaaagtgtaggaacctagcaaaagatgtagcgttctatacagttgattgtagaggctcatgtggcgaaatatttgtcgaccttcagaattataagtacacaaaggtactcatctcgtttttttcttttgacggttgtatatcacatgcctttcttttggcatataatgtgttaactttctttctctattgtcaattttggcttcatagaaaaagcttgatgaaacagtggaatgtgaactaacatttccaagttttgaggtacaacaaacttaacttcttactttcctggaacatactttcgcatgaaaagtaatagaaattcaatctattaactggtcttatttctccaggaggcagtttcagtaccgtggaaaccgatgccaaggagaacagcaaagctctactttgcaatgagaggtctggctaacaacaacagctaaccttttgaaagcttggtttcttcctacgtaactaatccggttttgtgatattcttgcagtgatagaactatttgaggaaactgaaggacgtaaacctggggaatgttcgctgtctgatctcccaagagttttgaaactcaaaaaggaactatgtgaaggaaatgtaagtttctttaacctttatttgtaagctctacaataataacgacaaataacaaactttgtcactcactttgaatccgaatgttgcaacagtcggtcagcgagaatcatattccagatatcctcttggagagactcgtatctaataacacagaattcccaccggcttgtgccatcattggagggattctaggacaggtacagttctctatctcgcttctctaggactttgttagttatctagattaagcacttagcagagtaatgtgactcaaaaaagttgtatttgtacgtacaggaggtgataaaagttatatcaggcaaaggagagccgttgaagaacttcttctactttgatgcagaggatgggaaaggtgtaatcgaggacctatcccacaagctttaacttccaaacatgaaaggtgctgtgaaacgctgctcttagtaattagttccttgttgaagattgtattggaaattagactttagagtacttagaacttggctccttgtcttttgtatctactaacttggttcgctcctaaagacaatctgtaacccactatttactttaatccatcaatttacacactcctatctatgtgaaggtgttctattttgtccggaaattttcgatttcggtttctggctctttgagtggcatctttataatataacaaacagcaaaatttgacagtctatagtgagttttgttatggttcattgcttagtgacattatttgttgttgagggaggtttcaaaccaatagagatgaaagtggaaacttctccacaagttgagaaaaatatttgataaaaacataagttggatgaggacaaacacaaaagataccaaataatgatttggagattctcttatccttaatcttaaatactaaagtctatgacagtgacatctgaacagaagaaagctcaagagtatataaattgtagcttagcctctggtgaagcagaatcacaaagtcaaggatatggatttaaacaacaagatctttaacatccttcttcctattgtcacggtttcgtttcttttagtgttcatgccattttcaatattcttcaagctcctccagttcataaggggatgcaaagagtccgagaaagtcaacggaaaagtcgtcatcatcaccggatcttcctcaggaattggcgaggttagtttgtttgtaatcctagaaaagcttggtctattttttataaattggttagttatttggtaaaaaacaaaagcaatttgaagttgatttaatggtgtagcacctagcgtatgagtatgctcgtagaggagcatacttgactctagtagctcggagagaggatcgtctccaggtggtggctgaccggtgcaggaagcttggttcaccagacgttgctgtggtacgcggtgatgtctcagtcatcaaagactgtaaacgttttgttcaagaaaccatctctcggtttggaagatgtgagttagtcactattattcgaataactaatattactacttgcttaaagaacataaaaaatataacaaaatttacatcagtggatcacttggtgaacaatgctggaattgcggaggccaaatttttcgaggactattctgaaatttcggatgttcttcccattgtggtatacatttttagatttaatacatagtgaagtcttttttacaatatatgaaccttggcaaaatttgcagaacactaacttttggggaccggtttacgcgacacatttcgctataccgcatctcaagaaaacaaaaggaaagatcatagcggttgcatcacctgctggatggtctggagtaccaaggatgagcatatatgctgtaaatgcttcttcttctttttctttctcttgttctctaaattaaccaagcgtaacatattaacataatgaatgtaacatttgtttcaggcaagcaaagcagctatgataaacttctacgagactcttaggatcgagcttcatccagaagttggtgtgacaatcgtgtttcctggtctaatcgaaaacggaaatactaatccggaccttttagctgaggtattttactatcatcatttttcattttagtctgtccaagttttatgactgaagtctcttttgcagaaacaagactggtcgcaagttgtgaccatcgagtcagcagcggaatgcgccaaagcggtagttaacggaatctgcagaggcaaaacctttgtggcagagccgtcgtgggttcgtgtcctgttctggcttagtgctatatgccctgagcttctgatctctaagcctaaaaggaattaaccagttgtgttgtttaataattgcataatagagataaaaatctgaaatacaacatgatggccatctagtttttctagttctgttcagttttttttttttttggttttaggaaatgttcaacctttttttttctttttgtcttttttcttgtcgtgttttaaatagaaaataaaataatcaataatcaatcattgatccaaattacacatcgaagtgtttttataacagttttaacatgttcagtttaactcaaactagtataaatttgttggaaaaaatccagatcaaaagagacaatatcatactaattggaaatttgactttgctcactcatgcaaaccgcaaaaattttgtttaccaatctcaactactagacaaatataacttttgttcgaattcagtttaaaatatttcagtatggttggattctcttctgtttcgatacacacatgtttagtattaggcaactcacttattcttaaagacacatagttaatatacatagtcaaaagtaccattaacaaaaacaaacctacattttcacccatttctttgataattattactcattgcacatactcatgatacatctcatccatttattatgtattgacccctctctaatccgacttgatttctggagttctgatagattccgggtacagagtactacgtacaccaggaatgtccatgatcctcttgttgagtgcagtatcctcggacataccagttccagtcatgtacagtaaccgacaaccccactcaatcaactccggacatagcactttccaaaggtacgtcaccttaaaccatgatggctctgtcacgtatctttgtttccggcacacaccgttcactatcgacttggcacatcctgatgctgacgctaccggaaatggtcctacttgaacctagttaattttgggcaaaagaacacacaattcaacaatgacctcaatattaattatattggttaaggagttaaagatttatttaacttacatctctcatgtcttggttgactattaactcgccttcaccagagaagtacttgccttgtgtgagctccgactcgatataaccaggtgtgacgattgtaatgtgtacatcgccaccaagctcaattctcatcgtctcaaagaagctcaacaaagctgctttgcttgcctaattaacatattatatgtataataatattcatcaatccctaagagcttactttactaagtaattaaaagaagtgaatatatacttacattgtaaaaactcatccttggagcggttagccacgctgcggaagacgacatagccacaatcttaccattactttgtctaaggtatggaagcgcagcacgagtggtataaaccgatccccagaagttagtatcctaattaatcacaaatcattcattaaagatcaggacaacgaataaaattaaagggttggtaattaattattttaattaccaaaactgcttttgtcctcgttatatcttcaatgttctcaaacattgaaatctgcgtcatcccagcattatttacaagatgatccactgcaagaccaaagaaattcaatgttttgtagaccaaacttgtgaatggtaacaaaaaaacggtcggttttgatagagtgatagtgattagcgtcccgtggcgtgacttacatctgccaaaatgggtgatggtgtcatcaacgattcgtctacagtcatcaggtttggagacatcagcatgaacggtaacaacattgggagatccgagttcacgagcaatctctgccacttcctctagacggttcttccttcgggcggtcagggctaaacatgcacctctacatgcgtactcatatgccaattgctgatatttcatatacgcaaatagactcaaatcaatcattttaccatataaaatatatatccgtttcacaaaaatatcgtttatatgttttttgtttttttttgttttatcatttatattttcttattcatatatatatttgttagaaaaaaacctaatgttttaccctgaaaatacactgataattgtagcactgaaagtcatgatgatataaattaatcatttaagattaaatgtgtgaaacttagtactattgtaccagtgaccaattaggttattaagtctacaattttaaaataaaggcattatgaccaaacctcgcctataccggaggaagcaccagtgatgagaacaactttcccgtaaagattttcagagaaaattgtcgagaaaatagactgcaagaacttgaagaagtaaaaaggaggcaagaagaagcagagaccaaagaaggtgaagaaaggagcagttaggttgagaaagtcgtttatcaactccatttttgtcgatcaaaacgtaaatgatttagctctcatcgatcattctcttttatcagcgatatataaatacaacgccaatactaagttggattttagacaaaaacggtgatgagacgaagagagacaagacacgaagatcaagtggtagtgtggcaacattgcatggaaccgagacgacacgttgtgtcaagatgtggaaaatgcacgtcgacgaccccttcttcttctttcctttatccacataacatctttggtagataagatcaaatcttcgttccacctataagttattgtcgtttccaaacgacactattctttaattgtcgtacttcgtgttattactcggtaattaatcacaaaaatgcttctcgctctaataaccatgcacatgggtgatgatttattttgggtattagtagtccaaaaattatattttaattgatcaaactatgaatttggtcctaatttatatcaacggactgatatctttaatacttagatcaggtgacgtgacaacatacggttggtcagtattttcgctttaataaaaaaaagataaacaaaatttctttaataattttatgttttaacatattaatttttgattttgtaattttttttttatacttaatcgatctcaccaatacaaacatatttaatagaagtatcataaaaaatctcaaatgataaacaaatattataactaatactaaaaaattacttataatactatataaatatcacctatatacatgctataactttaattatttatattaagatattaattaattacaaaattctttaaccaaaataaattattaattaatagatcatgcgagtacctattcacaaaactacaaaagtaataaaacaaaataatttgagaaaatattaagaaactcgtttttgaatatatatcttatcttactttaccaatttaactccaaatttaattaagaattaatccgtaaaatcatgtcaatgatatcttatacaatcgaatgtttggaaattttgaagaagttaaatgatgattctcgtattaatataattatttttattaatacaataggacgtattatccatgcatgatgttagatatcacatatatgtcacgccttattcatatatatgtttttcacgggatcgtttattttattatattaatttgttgcttaggattgtgtagaagctgcttgcaaattcgtgaaacttttatcactaaccgtaagtatatttttgcttggaaattatgtttggttactttttgactctcgaggcctatgagaataatagaaagttagtctcattctggcaacctctgttcatatttagagatgttatcgggtgcttacttcactaaaactcgccccaaactcaagaactattgattttatcatctctcatgttgactcttgaattcataacatgataaccacggatctaatctctcgtaacatgaatgaaatttcatagaaggtgcggtcatgtctttttatatttatatatactttaggctttcggttccattggtatttccgtatttatatatttctacgcatttgatagttgggagcaaaagacaagcacaccgcttttactttcgacgtgtgcacgaaataaagtaaatcattttaagatatggtcctcaacatgctttaactaaggattggtcctctacatccaatttaattaagcattcgaaaatggatttggtgaaagacaacaaaatactaaaaggagttaaaaagacagttaataattcaaaaggtgtttgcacgcccacatggttactaagaaagttaaattaagtataacataaaacgctcaagcatgtgattagtttaatcttaacgatgaagaacccttaaaccatgtgctgcatgcaagtagctagggactataaatattgttccaaaaaatagtctagccactccatgtccagtcacatttcgtatcctttagtaccctaagtttcctttgctactatacatcaagatatatcccattttattttcaccaaaccttatttacctatagtataaatggatcccgtaatcgccatgcaagaggcccaaagtaacaacggaccaagaacctacaagaagccatttcttaattttcttgaccgcctctccttgtcatttatcgtagttgttttctgcgttattgtagtttttagtccaatttggcttcaattttctaatagttttttcttattcaccatccctagagttattaattacatcttaaaccctaaggttttattcattctcacaaatgttatcgtgatcatcctcatcggagaatcaaggatttctagaccaagatcttctcttccagctagcgcattactgagaagccattcttatggtttgtggtctaatgaaaatgtgagggtggaaatgggatatcaacgatttttggaagagaatattgatcgaccgaggctcggagaaggcaagatatgtaagcttagtccgttggagatggattcattaaaccagagggctgatgatctgatcgctcgtgtgaacagacagaggaggcttgaaattgggctgttacatagacgcatagacgaaggccacatatcattatagttgtggccaaatgtgcagagagagccttgattgttaccaagaaaccaattaacataaaggaaaatgcaaattttcgtacaaaggttacaaatcaattaataaagttaagagtttttacgagatgttaataggattaaattcataatcggtggaaatatttttgttactttctctaaaaacttataagttaatattttacaaaaaaaaaaaaaaattaaagtaagccccacaagtaggggtgtcaaaatgggtcaaaattcatgggtcaactcaactcaactcaacccatgaaccctaatgggttgatttttaactcaaatgagttgatgggtcaaatgagttgatgaatcaattggtttgatgagtaaaatgagttgggttgtaatgggttaatagttttaatggtttacccaattaacccatcaaattttgtaaaattgaattaaaccaactaaaatctctaaaccaatatttaaccaacacatctaaaccaatttaataaaatcatcctcaaatttaagaaatcaatcgtttgaacagttttgtttcgttgagttaaaatttgaaggtcatagagattgtaacctaaagagacggggattttaatcttctcggccccttttgattgaatcaatttttgaaaaacttctacttattctcactgccccctcttcttctcaatatttctgaaaaccaactctaccctctctttatgatgggacccttatcttatcattctttatttcttttttaaattttatatctaaccaactctaaaatcaactaatcaaattcattctctctcctttcccaataaccatcaaaatctattaaaatgcctaataaactcattcttcttcttcttcttcctaccatttgctccctaaaaacgtttttcacttttttattttctttaattcttctccatacaccatttaagttcatcattaaatcaacacaaaaaaatcgtatctacatatcttttctcttctttgtgttcttcttcatagaccattaaaaatatttgtttactttttcttatagtaagatgtgatgttggtaactagtatacttggttgaattcgcagattaaatacaggtttttttagaaaaatttggggattataaatttaggacaattgaaacaaatgtgtacgactatgttgatagactaatacgaaaatataaaattatagactattttttttctcttttccattttaagtgataatcaaaaagacttcagtcataagctttgcttataatgaatatgattaattttcttgtcgtatctgaacaaattaagttgttctgtcctggtacaaccaagaacaacccttacaactaaggtctattgccttgtcttgtttttagaattttataaaatatgaaaatttaagaccaaatttataaaaaaagaaaaacttaaatgatgcatacacgatagtaatgaaactacattacaagtttttgaccaaaaaaaatcatcttttctagaataatgaaactcttatcacaaaattcaacattcatacactaacaaccttatactttcatggttactttgtatatttgaactatatttttttaattttttaaatacttgtattttgataaatataaatatactgatacattgtaatggtattttgatgagataatatcatcggttccaccaaaaaaatcttatttagagttgataacaactagatttaataaattctcgatattgtacaagtatgagcataaatgtgcaaccgagtacaactatacaactatgaacaaatttgtgcaattatttaattgatgttttcaaaatatcagcgccacatcatatatttgtcaagttttttaagatatgtagatattttagatactttatttttttttccttcgtttttagatcaaaacttcataataaatttttatttttttcaaaacacaatcattcataatttttcgtaatttttttttgtcaaaaaatcttagattcataaataaacctagaagcatagttgtacatacgtctaccagttgtacctaaatgtcctaaacatttagattcatacataaacttcaaaaaccacaagacaaaccaaacaattatacttcaaaccaaaacccaagagaattgtacctaaaagactacaactaccaagtcttctttgtcttatacttctctttctctttttccttctccttctcttcctcctcctcttcctcttgtaataaagacacaaatgttcgaggctaatatacacatacaaaaaaattcgtccatgtctgcaactccttattaacccacttgaaaccagatttcttccaaaattgaccaagagaaatcaatcattttaataagaatttacaaataaagttacagtttttactcattatctctcaataaaaacaagaaaaaaactgttacatgtcgttccaagtcaatactaagttaagaagttaagaaccttcaagaaactcactccatctatggagatatagagtcgtctccatcgtactcatctatgacttcaatcaatttcctaattcacaaaaaacaacacaaaatgaaacgagaattgagcaattgaactaaaatccaagagcaaagatgtgaaattggaaaaggaaaataagaggaagatgaagactatgaatctgaagtggaattagctaactgtagttgttagaataactagaatttataaaagggatcccttattccgcctagtggagagaacaatggaagctgagaatttggttatggatataagattttgtgggtttcaaatttgaggtgagaaagatgatgtaaagttgtctgagtatcgtggataaataaagaagagaaatgagaagatgtaggttttttaatttgggatttagaaataaaagatccaaacttacatggatttagatctaaagtgtggttgagttgtaaatatgtcaaatatcatcagatttttttgtcttttatcatttatctgaattaaaataaatagataaagacatttttcttatatcgggggctaagcagaaaatgtttcgagctttgggggccaagtagattaaaatccaagagacggcgtgaaaccagataagcgatcccggtggtcttacggcggagggatgaccgaaccgctcgggccaacggctgaaatgctctaatccccggagtctgcgccaccgtatgtgtaggtgaatcaaaggagagacaccgtaggttaacgtcctttgactattcttttaggatcattttagttagactgttcttttttttttgcaagttcagcacaagctcaaatccttcaatttccagcttctgtttgttaaatttcagctcttttgttgtttttaagctaatgaaagaccctagttgatcttaagaagcaatcagctgttagtataagcatctggaaacttgaattttgcgtttcttttttggtatctttttggtttaagttggtgttgaaatatttaactttctatttctggtttctatggagtttggtttagagatctatatgtaagatgatttgtgtgtgagtcctgtctcctcttggtttaggaaatcatgttcaggatctaacttaagtgatagtagaagcgtattcaatgctgctctagagttctgaagcttgtttatatggttaattttcactttatttgaatggctctacttttaatagactagtcttcttctagcttatgtctagggtcaaagatgatgtctatcacgtctcctcttggtttgggaaatcatgttcatgatctaacttaaccaaatttttaatgtatcatgcctaatcagagttacactcagtgtagaaatatttttagaataacaagagctaacaaaaatcgtatttagtcatatgcttgccgtattgtccaaaacagtcttcttttctctttgttttattgattctttgactgtgtctatgtgattaattcttgtatttggctaataacaggttttattaagcaatctctaacttggccttatttctatgtatagttatttgcagctgatcttttacaaaaaatggacaatgaagacgaatgtacttatggtggtgaaggtgggcaaacatcagcagatacatcacaatctaaaagtttagtaagtgcttctcgttttaaaagaagtagaacatcagatatgtgggattactttacactagaagatgagaatgatggaaaaatagcatcttgcagaatgtgtagaaggggaaggggaagtgcttctatcattagatgtgcaaactcgatggaattcaacatatttgatgcttcacaaagctttgaagtatcaacgtgcactaaataggtttaagatagttgataaaaactataagaactatccctcgagtgaagaatggaagagagcaaagactattcatgagatcttgatgccattttacaagatcactaatttgatatctgggagaagctattcaacttcaaatttatattttggtcatgtttggaagattcagtgtttgttggaagttcatcaatacaacgaagataaagtagtccgagagatgatttttaagatgagactgaaatttgataaatactggaaagagtagtgttattcttgcaatgggggctgttttggatccgagaatgaaattcaaacttctaaagcgatgttatgatgagcttgatccaaccacttcacaagaaaaaataacgtaagtccgtgattttcccgccaaaaaaacgtaaacccgtaattttcctcccaaaaacgtaaactcgtgagtttcccgcaaaaaaaccgtaaactcgtaattttaccgtctaaaaatgtaaactcgtaaaaatttctgaatcaataaatatctcaaatttgataataatgaattaatgatgatgataattataaattaaattattatttaaatggttaacccatttaacaattcaacccatcaaatgaaatgagttatgggttagacccaactcatttaacaaaatgagttgggtctaacccataactcatttaattataaactcatttgattatgagttgggttgggttgggttacccattttgacacccctacccacaggaatgaacttaagatcaaggtttctcctaaagaccggccattgtaagactacacaagaaaatagtttacctgtagggtaattagaaaatgcataagactaagtgctccatcaaaaaaattccatctaaataataagagcaaattggaaaagtggtttaaatttagtcttttttgctccaaacgtcctaagtttgaactaattttattccttgttaaaacgtttctggatgactggatccaccactacatgagagtatgtgtgaaatgttaagcttatgtgttgacaaagaacatcattttactgatcctcccgcatcgtctacttggatattttaacgcgtgcatatttgaacattactgtgcaaggtttaaggtagtgagatcaaactttaatttgacaagtttaaaaattatatctgttttgaattttaaataagtgatttctaatctacagagatttgtattgcttaagttgtataagaattctatttgatcttatattaagtattaaaatttaaggcaatgatatcttgaaagactaagaagtggcaacacaagatttacaattttttaatctttaatataatagtttaacgtcgaataaaaggtcttttcatacattcaagcagaggctcataataagaacaaccccatttttccgtatatcaaaagagaaataagacaaaatagaaaaagcataaagagattagaaactggagaccccaacagtgaagccctcttgtgtcccctgctctttttgactcactcagcctgatgctctacctgtattccaaacaccaaaataaaggtaaagtgaccgtaaatacattacttcatccaattcgttttaatacttattagaaaaagctatgttttctccaattcgtattaatccttatttgaaaaagttatgctttctttagtctatttgattcgtaaaatgtttagactcgaaacaaaccgggattgaaccggccgtcctacggggcaaccaattaaagacaaggttcggccctcacaaagacttttatcccaccacaacaacttttaatcaagtgtctttacgaaattaagatataaacttagttcataagaaattaaacgtaaagggaaaaatgagaaggatgaatttgttgaccttaggtttgaggatgccgtacttcttgaactgttccctcacgactttgttgtatataaaagcagctcctctaaattgtggtaaaaccaaccatgccacaaacactagcttcgccgtgtaccatatcggtatcctataaatattcgatatccattttaatatcattaccataacaaaaacataacaagaaatgagacaggtttgatatgattgttaccactagccacttaccactctaggagagattgaaggatgagttctgatagagtaaggaaagaatagagaatccaataagcaagccattgctcgtcatctacttttgatgggctctctattgctatcaccgacgcatatctttaccaaaatcataaaaacaaaattagatcaaaataaaactaaacaaaaatgtagagaaacaatagtagattacttacaacggatagagcagcatcaccacgggtctgcgtatgatcgtaccataaaacaaaacacaaaatcataatgttattttcaatgatgaaatgaaaatccaggatattaatcttatcatataacaatcaaaccataaattgaaaataaaaacttaaatggatagagaaaataatatttaaaatcaaatagaagaaaaagaaatatacccagcgagggaatgaagagcagagagagaagtccatagttttgtcattttgagaggaacacaacaaaatccaaaaccaatcaaaggacgctcttgttttctgaaacaacacgattagagagatcttcttatttatattaactctcttggacactttaaacggttttgcacgatttggttctagttcgaaccaggacgaatggttttataaatttacaaaccaaaccgatgaaattagttgttctcttcttgagtaatcaactaatcattatacttagtccggtttaacgatcggtttgtcgtttgtttagtgtccatgagtataccggacacgtcggctgtaagagacaaagagtatcagattctaacttgagcgtatccgacatgtcaccggccaatgaaagccagatgtcggtgagattctctttattgtgatttttcatgctttcttgatatttatcattaattcataaaacagtgtaaacttgtcaagtatctaaatactaacaagtatacaagtataaatgtatcaattattatttacatggacaactatgatctatgatactatttcaattcaatattgcaatatcaatctttttataaaaatatattaattaatatatcctcttaatcagtcttatcttgtcttgtctttaaatcagttttatccaaacaataaaatatcctcttatcaaaaacaatatacattttagcaaggataaataaataaaagtaaaaattatctatatattaattaaaaaaatatgatctctattttagaaagtttacatttaatacattcattattagtttaacatatacaataacattttaaatattatattcgttaaatatttcacaaatcttttacatatattccataaatagttaaaatattatagattaacctatattgaccttttgccattatagcaatacatataattatttttaatgaggatcaatcaatatgactgttacacatggattactgatgattttttatctgtcaaaaggaaataaagttgtcaaaaatttgctggaattatattgaaatactaagaccgtagaaaaatatcgttagttacgtttcaacggttaaaaaaaaattgataaaccaattccatcaaatgacaaattttgttgagcagttggatttgaactcttttccgctaatgggccattaaagccttagagggttcatgtttattcctttatacgaaaatgcgaattagaattaaaataagacagtttacaagttccaatttgtaagaaactggtgtgatctttttatcaatcatgttgtgagagtgttgaaagtaacctatgatttcgttttcttggggatcaattcaaagactcatacgtctacacgaggataatttattattttaaaatatcaaaaatacgatcattcaattcggttgaaactaaaaattaccaaaaatacatttaaattaaaattctgcatagaaataaagtaaaaaaataacaaatcctacaaccccttaaaccgacgattttattatataatggtacaagcattggggttttcatcactgaatatctgcggtggataagcaaacatctccacggggtacctcggtggctggtactgatattcgttcttcttcaagtctaccactttgttcccctcctccgcggcagcaccatcgcctttagcacctcctccaccaccgttttccttggcctcttttccttctttgggctgtccctcttcctttttcttctcgtctttgtctttcgtttctttttctttctccggaggttttggcggcggatcttgcttgacaaccgcggcatgcttcccgattctcttgtaaatgaactcaactagcttttccggcgtaaaaactcctttcacgctcacttgtgatgctttaaaatctggttccacagactccactcctatatgtataaacatgttttgactttattctctatatgaaaatgtaaactaactatatattataataaaataataagcattacaaaaaaattcaaattaactatcaaatgagatcattgtacaaagctaatatcaattctataggcagtagtagtcaccaatgtaatcttttggccaataaatttctacctaacataattaaccacactttcataatataaaatctggtccaacttattgatggcattataaatataaatttgatttcagataagtacaaaatcaggatatatgaaacataaaccctaattaaagaagtgtttagaactttgggattcttggggaataggtgaagtaaaagtaaagtagttgacttaagttagactcgattcaacacaattcgtattatttatgtaatcttgaaacactcaaaacaaacaaaaatatatgtgaagaagaacggtttgtaactatatgattataataacaataatcaggtgaatgagagtttcttttttaatgaaagattcactaaacacatgcttttttcaaattgctatgttttaaaaaggtcctacacagtacacagtactttcagtaaaataaaaagagttggaatcaatttatgacacatagaagagtccacacttgatgtcccaattaagtgtagtcccacaaattcagatttttttttttttttttttttttttgaaccaaattcagaatcaatagaaattgtacccaattcagaaaataaattttaaatgagaaaagtaaaaaaataaaataaaaaatacaaacctttcattctcatgatcctcttttgaatctccatggcacatgcttcacaatgcatgtgaactctcagcaccactgtcactacctgtttttctcagtgcccacaaaatcttactgttaattacacaaagccaataagttttctataaattacaaatcaagcccccaaaatcttacacatattatacaacatacctcttcttttttctcctcaggtttaggtttctccttctcctttttctccggttcatcagaaaccggtttaggctccggaatcggtgagataagctccacttgacgatggctcttcctctgcaatctttgcaacacttttaatggatctgccttctctcctttcaccacaactttactagtcttacaatcagtagttacatcctccactcctatcacattttcaataatcccaaaactagctttaaaatttctaaagtactaaacactagagtgtgataaaatacactagagtatgataaactggtagtaccttcaaagcctttaagacatctatggatttttttagcacaaccttcacaatgcataaaaatcttaagcacaatctcttgaggttctttctttttctcttcttctggtttcttatcttctgatttcgcttgtggctcttcagatttcttctcctccattttcttatcttcctgaaaatggcaaaaataaggagaaatatatttgagaggtcaatagacaagaatagtgtttggctgtgtaaatttgaataagtttgaaaaaacacactaaacctctcccattgaatttagtgtcagtgttgagacttgagaggctttttagtggcacagttattaaagctttttttctttctatggaccgtcagattttggtgctttagatctgtttatatacacatatacatcacatttctttattcttttaccctagagtgacagagcgcatttactaccaatttcttatttacattttttttattaataaaacttcaaaccaataattcatagattttgtttttgttgtcattgctttaaatgtttttttgtttgttaatgctagactttgaatgcttgctgcagcacataaactactaatggtgagttttagactatcttttggtaaactacgttatttataagctggaatttgaaacacagataagaaacagttcaaaatttctagacgttgtgtcattttcgaaagctcttataatagaccacgaatatctcgtgagagaggaacaaatacttgactaactgagatctagtcaaagtacactatttacctgagaacggtttattcttttacacttaagcctaatattgatttgcatatactttaaatcttttactctgccaaaaaaaagaaactcctctgataaactttagactatttggtataacctaacttttaattaacaaataaatgtattgcaaatggcagaacaaaaaataggtataaattcacatggaggtgcatttgcggaaaaacgagttggaataattttataaggaggcacgttgcactccatgacaaatgatattctttcgatgtcagaaaaaaaagcttcagtttcccgttgagatgattagaaaatcttaacgttgtatatcttatgagttctaatttaagctttaatcggggaaaaataactgtattaagatacacgaatttagatgagatataactttatcttcacatacatagacgacatttcgaatatttatgcggagctaacagagtgacggggctaagcgatccggcctacggacgccgaccaacaagaggcgatgcatagaataatttttctgaacatagaaaaaaaaataccaaagcgcattttcaggcccagtttattctactcgaagcccattaccaaacacacacaacgaaacctaaaattgaacccgtcaagtttataatctcatattcataactttcacacaaccccagtattaaaactggattcacaattctaagggttaccatgtattaaaactgccgttagatcagtttacactactcatcaaaaaataatgaataattctttctaatgcccttttcatgatgtcccttttcaactctacccttttgttttatctatttttattttttccctctttaaatttttaattacttttttacccttatttggaaattgttttaggtcaataaaataaaatattaatattttttcgcataaaatattccaaaaataaatttctcgccaatattttcccgccaaaaattttcgaaaaaaaattcccgccaaaatttttcgaaaaacaattcccgccaaattttgttttcaaaagtatttttcccgccaattttttttttttgcgagaaataaatttacaagagattttaaaagagttttaaaatatttacaacggattttaaagggattttataagatttataagggattttaaatgggtgatttacaagagattttaaaaagtttttaaaagatttacaagggattttaaaagggttttaaaaaatttacaagagattttaaagggatttaaaatatttacaaaggtcttttaaagatttttaaagagtttaaaattgttttaaaaggattttaaaatatttataagggattttaaaagagttttataatatttataagggattttaaagggttttaaaagatttataaagggtttgtaaagatttttaaagggtttaaaagtgttttgaaaaatttacaagggattttaaaacctttttaaattacttgtaaattttttaaaacccttttaaaatctcttgtaaatcttttaaaacttttttaaaatctcttgtaaatcttttaaaacttttttaaaatctcttgtaaatcttttaaaatcccttgtaaatctatttgtcgccaaaaaatatttacaaaatcccttgtaaatctatttgccatcaaaaaatatttacaaggatttttaaaatcattcttttggttgaggaaaaaattgttatgaaataaaaaattggcgggaaatttttttttggcgggaaaaaaaatttttggcaccggcgggaaaagttcagtttccaattacatgtttctattagatgagggtaatttggtcattttgttcaagaaaatgagtattttaaaaaatggacaacataaaagggtattgttgcaaaagggtactaaaaaaaggtagttttgcaaatctccctaaaaaaatctatcgacaaaaaaccgatgcaaaaaaaatatgtgagatgtcgatagatcagtttacaagaagatttcttctctttagcgtctcaagagtagttgcaaacatatgacacgatgaaacagtggttcaacaatcgttcaacgaatcaattgaatggtccatcaagctatagttgtcccactaactcaagaaattccatattagtatctaaatatctttatttttaattcttttattaactggtaatagaggcaaatattcttttgttggtttattgaaagaattttatttcgtataagctactgattagcgagttaggtagtgtacctctgttatttttggttaatggttaatttgtatactcaaaaagattatatgttctgtatagaaacatctatgcttttttagaaataggacaaaaaattgggattctttttatacgatagactatactttagagcatttgaaatgagtctttctcttctggataacgagagttaacctcctagtgatcgcaatattcaaaccactacgtacgatatgaagaaaatccagttgatcctttcttttttattaatcaaattaatgaaggagtatgagaaccattataaaaaccaagccattcccctaaaaaatatcatcttattcacacatctaattaactttaagtaccaaaaatggcgggctacaacctcgaagctatcgaagcggcacctttgaaagacgatctggatattgtgatcccaaccatcagaagcctcgactttctagagcaatggagaccatttttgcaccattaccacctgatcattgtccaagatggagacccttccatcaagatccgagttcccgagggttatgactacgagctctacaaccgtaatgatatcaacaggatccttggtccaagagctaattgtatctcctacaaagatggtggttgtcgctgctttggcttcatggtttctaaaaagaagtatatctacaccattgatgatgattgctttgtaagtctcttttgaattattctctttaacacgttttcatttatgattcatgcaactccatgcatttttttcttcttgaaaacgtaacaaaaggtggcaaaggatccaagtgggaaagacatcaatgtgatagctcagcacataaagaaccttgaaacaccttcaacaccacactacttcaacactctctatgacccttttagagatggaactgatttcgtcagagggtatcctttcagtctaagggaaggtgtccaaaccgccatatctcatggtctttggctcaacatccctgactatgatgccccaacccaacttgtgaagccccgcgaacgtaacacgaggttataatatagtttgcgtattaattatcagatgatttaggtttattcaacttgtttcaattcagttgcattagtttgtttgtgaatcctttcaaattcctttttgtggttgatattaaagcaaatgatttttttttatatacaagaatattttttccaagaaactatattgttttggtctacaatatgcatataaacgctataatagcctttgcaggtatgtggatgcagtaatgacaattccaaaaagagtattgtacccaatgtgtggtatgaatcttgctttcaatagagagcttgttggacctgctatgtactttggacttatgggtgaaggccagcccatttctcggtacgatgacatgtgggctggttgggcagcaaaggtggtgtgtgaccacttgggctttggggtcaagactggtctgccgtatctgtggcacagcaaagccagtaacccattcgtgaacctgaagaaagagcataagggactccactggcaagaagatatggttcctttcttccaaaaccttcgtctctcgaaagaatctgacactgcagctaaatgttatatggaaatttcaaatatgacaaaagaaaagctcactaaagtggatccttactttgagaagttggctgatgcaatggtggtttggattgaggcgtgggaggagcttaacccgccggttaagaagaagcagagcgatggcaaagatgtcaaggccaagtgatgaagataatgagtgatcctattgttgctaatgaataagtatgttgtgagtttatagattatatgatattgtatttattttctccattttggaagtgtgcgttattatgtaataatttggcatgtattaagcgtgattggaagaacaagagaatcttacatttctagtacatggatgacttcgttgatttagttttactctcgtaatgattcttcgttgatcacagcattttagaaatgccaataaataaataaaaactgccgtcgatgatatatacatcaaattgtgagtcctacttcgttgggtgaccgcaagagcacttataccaggtcaaattcgatacctatcattagccatttaaaaccactaaaaaaatcaaaacacccactaaagattcgaggaaattccctacaaatcatggttcactccaaatactactagatcgagaaatgatctctaataattcaaaagctccaatttctcacctcagaaaaagtcaaaatatatcggattgggttgcttgacgaacttttgtaaaagaaattggtcatatggtttggagtttggaccaactaggccacttaatcatacgcatgggagaggaatcgaatttcccaaataatgttgtttataacttgcaccaccacaccaactactccaagtctccgcatttaaattcgttggagctctaattagctatatctctatctactctaaaaataagcataatatgttgccgttatctatatattaaaaacctttgtcgtttaacgagaaataaaactttatctcaactatacttcttgttattgccgcctatgggagtgtctttctcgggtagctgtaacttgaggaaggctttctacatcaatgtgttttttttttcctcttgatattatctatctaaaaatgcaaaaatcgattatttgtcatatattgacattttctgtgtttagagatgcacttcatgacgacaaaaggagatgcacttcatgttcctaacgtacacgtgtgaggttttgtttcttctttagccttttaataatgtttttctttttaaaatttggtaaatggtttttaataatagttttttgttatctatattcttatgttataaaatatgttgtgagttatttgtattttttaattgttggttcttgcaggggcacaattccgtaaaatatcagtgtcggtcttctttactatcagactttcgaattttaacctcgttacggtaatgtatacaaaaaaaaaaaaaaaaaaatctttttacggtaaccttacttctctttttttttttttttagtttcatttaattatagttttatatttaatatcctaaatggattgtactaataggttagtttccttgtaccgattttattctaataaaaatgggttgacctaagccaagggagatgcatttcgtggaaaatgtggaaaacatgtctccttattgtctcatcgacttatttaactactgattttaaatttggactattcaagcaaggtcgaatattattaacggttacaaagaaactatgatctgccaatattaaaaaaaaaaaaagaagaagagtagggtaattctttggccatttttttagtttattaagaaaataaatgctataatatttaatctttccaagtattctttcaaattaacaaaattgtcttcggattcttttagaatcattcaaaaccatttaaaattctatttaaaagctagaatattaaaacaagaaatccagctgaagagaggacgtgtgttctgcagttaaaaacaaattgaaatacgtatgttctaagggaaattcaggtagtattcgtcttgaaaggcgacttaaacaatttaattccgttgacgaacttgaataaaacaaacataccaaattaccaataattgtttgaaagatatatttttttacgaagtgatgtcaaaagaaattattgtttactatggaatatattggagataactaagattatcagaatctattataaacaaactcaattattagagcgtgagtgcttatatggtgaagtatgggggtatatgcaaaagttaagcctgccctcatcaatttgtcaatgtccttaaagtaataaaccctatctcttctttcccaatcaagatcgtctatatataagaaagattgaagaagccgatatatttttaaaaccaaaaaaaaaaaaaccaaacggtcaaccaaaacttgtctgacccacaaacacttcttgattctgtcattgaaaagaaaactttttaatttttggatacatcatcctctcattggaagagagaaacaatgaagaatccgatattgaagacatggagaaaagtgaagtcttttgggcatacgagctcttcgaccacaccctcgttcacgaagagcaagtcttgccatggctcttttcgtctcgaggatgctaagagcaacgaatcaaaaggaaagccgaagaaagagtcgccgtcacatggatttttcacggtttacgttggtcccacgaaacaaagaattgttgtgaagacaaaacttctgaaccatcctttgttcaagaacttgttagaagatgctgagactgagtatggatatagacgcgatggacccattgttcttccttgtgaggttgacttcttcttcaaggctttggcggatatgaagtctaatcctggtcatcatgatcatgatgatgattatgatgatgatgatggtttcacgaattccccgatttgcggatttgtctgtagtccctatagatcatacggtggtggtgttacggatcctctggccatgaaacggaacggctcatacaagcttcttcgatctccatctttgttcaagttgactagattttgattttcttcttctttcttctatattatatatctaagttcttgttcataacattaccatatatttttctttttgttttggcatgagtggaaatgtgaaagaaaaaccctctcacttcctaaatttgaaacaattagcttgaattactttcaaatattttgatgttggcttatatcatatttgacacattgttattatggatatatggtttgtatcttaatttactttgatttgtggtttgtatcttgatatagatatacatgatagaggttttggatgagtgagacgatgagttatagagatagctaaaagaattacattaaaaaagaactggatttaaggctacaacatccaatacaaacattccaaagtatttttcaatataacataaataaattattcactttacctatgtaagtaaaatattattattaaaggaaaaggtaatggagacttatatatgagttatattttattaagaaaatgtatgttgtatcaattttgaaaaaagctgtatgttacatattataataatctttaaaaaaaataaaaaaataaaaaataataataatctttaaatatatgcgattcaattttgaaaagacgcatataatgaaacgaaaagagttgttaatttccttacatgattctaagaggcacgcaccatctctcgtttagtagtacttgaaatattcaaatgagtaaatggtaagcatcctctagctatattttttaggaaattaagagtcatattaatttattatttcagtgacgactttaattttggtttgtatccgattgaaatagtattttttttttcgtcaaagaggcggtagagaaacaattgtggctcatatgaaaagttgaaaatgatgtaagcaattgccaattggtgtggttcataccaaatgtgtattaaagtatgtaattgtattgtttgttatcttaattctttccaaattatggtgaatcatgcaacgtatgtgactcataatcgagtcattgaagaagaaaaaaaactcacatgtacttttcgtgcaaccatataccaaatataaaaatgttatataaatttatcgtttgttatatatttggatgttacatgtagagtaaacatttagatgcatcatccagatttagcatttaaatgcaatatctagaatttggtgttttagttagttttaagctatgtatgaaaggatcgaggagactacttgtactcggaggcttgacataagggatgcattgagaaaatttggaagaagaatttggtgttttgttttgttttagcaacaaaatattttggtgttttgttgctactgttcgaataagtgtaacccaaacaggatatatagtattaattatatcaagctggccaatacactatggtaacccgaagttgtatacagtagttttagttaaaaaaaacacataaacggggagactcaagtatcgatattcctaataatgaggaaaagagaagaaagaattaaaggcatgggctacatcaaggatcttgttgctaagagcctccatcattggaaattttggtctggctatcagcagccaccgggctacccactctgttgcctcagaacaaaaaaccttcaacaatatgacacaacctatccagtcgggttccaacaagtacctatctcctctacatacgctccgcattattgctttcgcacacctctcggctgattctactggcaatacgctcatttgcacctgattcatatatattcattctcttaattttacatagcaactagttgttcatggtaactacaaccgatgaaatttgaatcccagcgtaaatgtaaaaaaaaattgggtcctcaatcgaacaaaaatgagtgactatagctggatttcatcaaaaagttaccattgacgctggcaatatcttactagtaaatttatatttaagttaattaatctaacatgaacttatcattcattatatttatcttatattactccaaataaccattagttatagccatattttcttaaccattcaagaacaataaagattcccgggattcttacatctctgagctctttatcgacgacaagtttaccgtcctttgtcatgaacttgcctcggctcatttccgaatcgacgatccccggtgctacaatggtaaccccaatatctgatccaaactcagttcttagtgtttcataaaaggcgatcacagcagctttactcgcctgaattcatcggcatgaaatgaaggtacaaaaatgaatgcttgagatcagatggttagtaaattaggagagggaaatggatacaaaatataatgttacacagtaaaagcttagtctaggtgaagcaatgtatccacatccagaagcaatcaccacaatccttcctctaaacttctttaggtatggagaagcaaaaaatgtgcaatacacagatccccaaaagttgatgtcctatgcaaagaaaaacaaaacttatcacaaacggttagtacaaaactatttttttagagagatctttggtcggagtaacttgaccatagccggcgaagccttagagacatcttcgatgtctgcaaaaaaatagagtggagcaactcctgcatttgtcactagatgatccactgcccaaattagaaacataaacaaaataagaaaaattaaaatcagcaatactattttagtttactcatattatcctccataatttttgaattgtcctacctaattatgttgcgattgatttagacgccaatttctatatttgtgtttacaaatgaaaaaaaaaaaaaaaatacctactagagcctaggtcatagtttcaattgcaaaaaagcaaaaaaaaaatacattatctgataaattgtcatgcaaacaaactacatttagaacgtaatttagtaattatacttattgacttacatcgtccaaaatgaagaaccgtggctcggataaaacgctcgcagtcttggagtttggaaacatcggctactaagggcaagacttcaggggagccatagagctcagcgagagccgctacatggaagagaggttctcctcttatgtcaacaagtgctaaatacgctcccctcttcccgtactcatacgctaaagcctatacacacactatcacacccacttttacataaccctaatcatcatttttgtttgtttgtttgttgacttacctcgccgatgccagaagctgctccggtgatgacaacaacttttccggcgacattttccgagaacagattccggcagatggagacggcggatttgagcctctggtaagttgggtagaagacaagaagtgcatacaaggttaagagaggaaacaagaagttgatgatcttgttgattgaatccatgcatcaaggactatacttcacaatggtttttcagttttccttgttctctccgctttcggagttttttgttttgctttattctggtggaagcttctcatgataatgtatgtggcaatcctacaagctgatatgcccacacgtgtttgcacaatctacaaacctcaattatatagtgtttttgttatggacgatatatacttgggttcaccatagtattaaacccttttattcacccgtctctttttctatctaatcaaaataaaccaatatgctatgtcatatagtcatatactcatattatatgtttaaaaataaatcaaaactaaaaaaaaaaaaaagcaaaataaattatgaaaataaaatatgtatttttaattaaagaaaattaaatattactttatgtttataaataagaatttaagttagtatttacaatcatttaattatatttaattataaatctaatcacattaataaaataaaatgaaattccttcaaatagtacaattttaagtttttaagacaaaaatagcattcatatttttttttgacataaataacattcagataactattttattttattattaaaattaacaattaaaaaaatacacatattcattaccaaaaattcctgacaattttttccgccaaaataagttttcgtcaaaaaatttcccgtaaaaaatatatgcccctattttctcgcaaaagaaaatccaggaagaattttacaaaatttaggaaggaatgtaagcaattacgaaggatttcatgaaattcaaaaatttctttttgttgtgtataactcttcataaattttatgatatctttcctgaattttatagattctttccgaaatttcgtaaaatcattcaaataataattttctaaaatttagaaaggattttacgaaattcaggaaagatttcacgaattgttttttgtgaaatcctttctgagttttgcaattatcttcttaaaaaccacatttcttcaaatcaaactatttacatttctaagagtgctcatgaattttctcacaactttttttttgtttttttgatgactttgtttttcttaagttcctagtccctccctactatgacttcctattttttttaagagtcacaatcgttattttaaagccaaaatcttttataatcactacttcaaatttcttgagtcatttacagccaataatcattcagtacttcaaatttcttggtaataggttcacaaggcggtttgagtctgactatcaatttccgccggaaccaaaaaacagagacaaaggaaaggttggaaaaagggacaaaaacggcagcgtttccatatcggtaaataacttcgaattaccctttttaacctttttttgcagttctcgagatctttctatcactgtaattgctttttagttttttcccaacttttcgaaaaaattagaaacaaaacaaaaaatcgattcttcgtcttcttcttccttcttcatcaatcatcattctctctctcttcttctcaattcaaaactttcgctctgtttccttttggtctctgcttcttttagttttaatggagcctatcgtgaagcaagagaatccggtaactacttctactctctccacatggaaacccgccgctaggaacaaaaccattccgccgccagaatccgtcatcgaacttagtagtagcaacgaaggatccgagttaggcgaaaatctcgacgaaatcgctgagattcaaagcgtagaccgaaccggtggtgatgatgtttctggaacgaagagagcgcgaagtgattctatagcttcaccggcgaagagactagcggttatgattccggatgatgacgaagagtttttactatcgactacttctggacaagcgattttggctcttccggctacgccttgtaacgttgtggcggcgccttcgtcttggggaagttgtaagcagttttggaaagctggtgattatgaaggaacatctggtggtgattgggaagtttctgcaggttactttgctatgtgatgattctgatattacttgagattgttagtgttggaatttgagtaaaattgtggttttaggtggctttgatcatgtgagagtacatcctaagttcctgcattccaatgcaactagtcacaaatggtctcttggaggtacgtattgaatgaagtttgattcaatctattgaatgaacaatgttttctgcaatgactataacgatgttatctcttgcagcttttgctgagcttttggacaatgctttagatgaggtgggattatattttttttctacatttagaagtatctcaaaggttggtagtattggtttctcatcttttgattatcaggttcgtagtggagctacatttgttaatgtagacatgatccagaacaggaaagatggaagcaagatgatcttaattgagggtatacaattaattttagtatatcttttgttgtgttgagtgttgacgatgcagcgtttttcttgatcctcatattcttatgtttgatatgcagacaacggaggtgggatgaatcctgaaaagatgcggcattgtatgtctctaggatattctgccaagagtaaacttgcagataccattggacaatgtaaccatttcttctttttgcaagataaatatatatcaaatgttttagattaagattcttaaattcatatacttcttatagatggtaatggattcaagactagtacaatgaggcttggagctgatgtcattgttttctcacgttgccttggaaaagatggaaagaggttcgttatctgttaccacgctgttacccctttcagctatcatgtttttattggtcatacagtatcgaatgaaaaaatcaacagcagctaaagttatacactatctgatcatagttcatcatgttgctttagctcgacgcagagcattggccttctatcatatacatttctaaagagcacggggaaagaggacatagttgtacccatggtaatctacctttatttaactgttagggtaaaaaacccacttgataatttcgaatggttgttgattaagttatgcacaacgttcgttgcagaccatcttttgtttcaaataatgttctccttgaacgttgaaggaaatgttaagcataaatatgtctactcaactttcttttttagatgagcaaaatacattctgcagagaaagctaacattatcctattagaattatgatgttcgcctaaatttatttgttctttagaagtttcatacaattaggcatcaaacatctaactgttctcagcatattgcttcgctcacacaattgaaatcgcttcatatccctaatgaatgttttaagtgattggtaggcttttgtagccagtttatctcttctaatcttcttctgatgatgattttatgaaagcttgactatgaaagaagagattctgaatggtgtccaataacgaggtcttcggttagtgattgggagaaaaatgtggaaacagtagttcaatggtcgccttacgctactgaagaagaacttctttgtcaggtaaagctttttccttagttctaagagagcttttattacaaggagaacctatagaaaaacaatggactcggttctatagatttttcagaatactctgtagctatattggattgtgttctctatcattcatttgatgtgggttctcaaaagcttctacttctttactgatattgtgagactatttcaactaatctattgctctggctgtcgtagtttaatctaatgaagaaacatggcacaaggataatcatatataacctctgggaagatgacgaaggaatgctagaacttgattttgacactgatccacatgtatatgtttttatttctggatatacatagattatgttcttcaatgatgcagaagcttctgtctccatgtaattgacatattgtttgttgcaggatatccagcttcgaggggtcaatcgggatgataaaaatattgttatggcttctcaattccctaactctagacattacctgacgtacaagcactcactcagggtataaacgttctttccatctttccttagttgtggttattttcgacgttagtttgtttcagtctcctgctaaaatcacagcgatagttcttaaatatgaatcccattattttttggctgcattttcatttcttctaaaggttttatttgttaccttttgttatgttcacagagttacgcctctattctctacctaaagatttcacatgagttccgtatcattctccgaggaaaagatgttgagcatcacaacatagtaaatgacatgatgcagaccgaaaaaattacttaccggccaaaagaagcggctgatggatgcgctaagtactcaaatgtatgcttttcataatttaacatagttagatttcttcctgtaattttgtcaatgatattaagcagctttataacttaaaaatttggctgcttgtgctacatgtttcacagttgtctgctgttgtgaccattggatttgtgaaggatgcaaaacatcatgtggatgtgcaaggcttcaatgtttaccacaaaaatcgccttattaaggtttctgtttctttttacttactttttcccacactattcctttaaatgtggagaaaataagatcaactttacacttttgtttaagatcttctcactttttttcagccattttggaggatatggaatgcggcaggaagtgatggtcgtggggtcataggtaattgttttaacttgaagttctaatatttgattagctttattaacgagaagtctaatgctagttcattctgctaataaaggtgtcttggaagctaattttgttgagcctgctcatgataagcaagggttcgagcgcacaacagttttgtctagactcgaggcacgtctacttcatatgcagaaggattattggtctgattctcttctcgtgctttttcattcatgcttcattatcttgactgattcattggactatttgggttgatgtgttcgttctgattttactcaggagatctaaatgtcacaaaattggatatgcgaaaaggcaaggcagaaagtctgctaaggatactgaaaaggacactgaagacagaggtacaatatctctttactggttttaacatcagaattttaacttctactgaacattctcatggaaatgtttcacacattgtagaatcgtcaccagaatttgatcctaaaggatctgcctcatcgaggaaaaggaccgttccttcgagctttaaaactccaactgctgctccgaggtttaatactccaaccgcagcttcagaaaaattcaacccaagatcaaatgtgaatggcggaggaaaaggatctgtgaaagtttctaaagacatcgggtataaatcatcagagaaaggtggtaaacttggaaactccttttccaaatctaacaaacgagcaaagcctcaaggagcccgtgctgtggaggttacaaatagtgatgatgactatgattgtgattcttcacccgaaagaaatgttactgagctgcctgggaaggtcccatcctctctttatttttcctcctatctgcactttctccggtatatcggattatgaacataacctttttctacttcttctctcagagttctgaactacccaagcctcagtctggtccgcgtaccctgagtcaattggaacaagagaataatgagttaagagagaggtttgttaccaccttacatgctatgtcaatttgcctatataagattcatgtttgtgcttgtgtgaattttggaagctgtgttttttgtttcacaggctcgataaaaaagaagaagttttcctgttactgcaaaaggacctgcgacgtgagagagagcttcgcaagacacttgaagctgaggtaacttctactttctgacatttactgtgtctgcctgcaacctataacagtactcaccagatggattccacctgtcattgcaggttgaaacattaaagaacaagttaaaagaaatggacaaagagcaagcgagtttaatcgatgttttcgcagaggatagagacagacgcgacaaggaggaagaaaatctcagaattaagctagaggttcttatccgttcaaatcacatttctctaaatagtgtcttagattcaagaaataacatgacttaattttgtggttgcaggaggcgtcgaacacaatccaaaagttgatagatggaaaagctcgaggcagataaatcgttgaacgcagacgttagagttgtattgacgatagtattgaggggcgtcttacagaattgactgattaggttgtttgctttaacatccactttttgctgcggtgtgtggtctctgaccttactacaccagagttcgtagagaagtagggtataattgtagagtgaggttattggtttaatgtttgaaacatttgaaaacgggtcgcaatttccaacgtccccggacggaatctctcctataaatcctactaagtcggcttttgttgtcagtatgattagaatcaccaaattttacaaattatcgtacatgagcatatagatccgtctatttctttagggacatgacatctcttgattcatccaagaaagacttaagataaaagccatatttcttgaatgtgtcaagttcatattcatagctctttttgcacatcgaaattctgtatgtaatttttagatttattattttaatatattatcgaaaaggaaaaggtattttagaaaaaaaaaaaaaaacttcattttcttgtccaatataataagggtttctaacttatccataagatatttggtataatttacacggtctagaagactagaacctttatgtttgggtagttaaacagataatttgtcgaaatttgggtgttaaattattgttagggtctatttcactaaaaaaatgtttaaagttataaacaagagtttattaaattttaggctaataaaaaataatcaataaaaagggtgtttttatttctctgtctttagtctctattgtatgaaaagtgaaggaaaccaatgcttaaaaatgaaagaaccaatacataaaaatgaagaactttggtaaaagataataataatgatagtaaaatcatctactatgaaatatttgaacccaaatacttaggacgaaaatgcaacccaaatataagataatgtggatactggatagatgtagagtcaatgttaacgagggaaatgagtcatccatgaactcactttagatagcttgaagtatttcacaagtcctaacttctttacgcaaaaatggatgatctttgattctcctttccgcttaccaccaactcaataacacacaagggcggacctaaattgtccattttattttccttatttgatttcaattccattttcttaatatacggccataagttatggcccatgaccaatatgctttttgttttacattttgtagtttatatgtaaataagaattaatccaatcttcaattaatgaacatttttctttgttacaaattaaggaaaccaaatacatataatagacaaacgacataatcatttattaatttaacaacacatatcttacattcgagatgagagagggagagacaaagatcacagataagagggagagatccacgatgacgctgatcagacccaaataaaaacattaaaccctatcttaacatgcaagcaaactgagacacacacccacacacatcgacatttgatagttaaaagctaattaattcttagaaatgagaaatacttctttttcatccttattcttctcaatatctcctttgatcttctcatctatatcaatggttgcttccatatcggcactgtcttgtggcaccaaagttctcatctgtgagttgcaaaccatcgtacttagcctcacaacatcgactacatgctcagatatgtcctgaagcttaatccctggtggctccaagactttagtccctggtttcttgtagatcaagaaaagaatcatctgaagtactccaaagatgaaacccaaaacatttggcagctgcaaaaatttcaatatttacaaaaaaaaaacattaggttttagcggtagcttgaacatcataactaagagatacaaatatgaagaccagtagagagaattacggcaatgttcatgtctttaaggagaagtccgtagaaaaaccacatgacagccgataaggtgaggaagaaggagagaccgaatggcatgaactcggcgctcttcgttttgatcactttcctctgtgtgtcaattgatgtttatcatgtttaagatttagtcgataacaagaagattttatatagtaaataagaaaagagacttacaattatgccaaggggagcaacaaaaacagatagagcaaagaccatacaaatgtatccaagaacttgaacacgtttattggcatgaattataaagtatgtcaacacgaagattgcgccgaaacccaaaacatccacaaagaggacgaacttcaccgttagagtctgccatattgaaacaaaaatttccgttaaagatgtagtaactcttgtgtgtaaacacaagacaataagctatattcatatagaataaggaccttttccttcttaggagcgtagaagaagaataaggagatgtagacgatttgtacgacaaaggcaaaggagttgatagtgatcaacatcatagcatctttcttgatcattgcgtagtacatccatagcatcgcgctgaacagagaaatcacgtaagggatcgactgatacccttcagatgacttcctcttgtatatacgaacgaacgtcggtctaatatataaaaacacgtaaaaattcttgagttaaaaggttacttacataagacgaaattgcaaagagttatagagtacttacattggggcaaggcagacgaaaaaggagatgatattccctacaaaataattatcgttatgttagaattcacgatgtctcatgtaaatgcatgcattttgaattttatacgttaacgtgagaagatatattctaagtcactaacacaaaaagaataagtaaaaaatatatacctaggatgccaaagacagtagccaagacggcttgtgaaattgccatttttatatctctctcaaagtagtctaatacttgtttagaaaataaagaaagaaaaatcttctaattaattagaaactctctccctctctcttcctctatgaaagagaatacaagtgaatgaacgagtaaactctacaggatcatactgagaattatgttcaatgtatgatacaatttttgattgagaagtgtagtgatttatataggaggaagaaaagtgtatcaacttgcaaaatgcgtctgtgagtgagagacctagagagagagagagagagaaagaagagtttgaactcaatgggatgtatagtggggaaaaaagaatcaaagagcattatctcttactttacagttgtatacttcatgccccattgcctcggaaggttcccttttttttctttcacctaagcataatgatcttacccatctatcgattttatgactcatgtactcaatttatacatagttttttgtgtgtttatgtaaatggttaaaccgttaatttttatgagcttttagatctgcatatctgaacatgactaagttttctcgaatactagtttcctcaagaagaatgtatggtcagtggtcactctatatagcataatacgagtcatatattactgttttattagcatgaatcgtgtataaagttttagcaaaataatgtaattgtgtatgaattgggtaagatcaattttgggtgaccaatataaatcagtgactcttgataggaaatatatattctagatatatatattaaaaaaatatatatataatctagatatatcgtgaggaatagaattctctccatttcaagaaaattcacataatgttcactctataataatatctttgatgagaagggtaatttcaccatttttttttttgttcatcaaatgaaacgaatgaatgatgttgtgcgcacattgatgtcggcatgcgaaattaacctaaatcttatctcataaaatttgtggggaataatcaaaaccctaaaacctaaaatgtgggtgggtatctatccagctcagcaacttatgagcactaaaaccttaaaaatcttgcaagtaccattctggtacattctagtggaccaaaattttggcctttccgacgtgtcaccaaccaagtaggtgcttagacgtttactgttttcaactctcttgcttagggttttacaagtgcaatgagagcaagttggtcttttacctaaaccgaattgtcatgctcatagttcgttttctaaatgtaaagctatcatttagggaaatccccttttgaaatctttccgccaacatattaacaaaaagaaagaaaagaatatatgtttccccaatttttatttaggtctttatgtaatctctctggaaaaaatgaggttggctgcattaactcttacacttccagtaggtgaatccgcaatgtgaacaatataaattagtcctattcaatggagcgagcggggaaccaaagaaagaataatcacgattgtaaaagatatactaaacagattgaagatattatcatagtgttcagaaggttgtttaggtgaattttgatgctcgtttgaacatatttgattacagatatactacatcttgctcttttccacaattttgtgatgtaatgaatttactttgtttagacatgattagcttcctcaaaatgtgttttttttgagggaaacttttgtaatataacactaatttgtttttaatcatgtctagattggcttattttttgtagtataagatgaaccatgttttgttaaactagttaagagaaactcatgtaatcgagtctctcgttggtaattcacatgtatctcatcacgaatttctatagttcttaactttttataagtttttggttcattcttttataaatattattatttttatgtttgctataggtattgggtgacttttggattagtctgcatatctattgaaccatgtacaactttaacaaacttataaggcgaaattttatttatatatcttctcgttaaatagtatacttatagtaaaattctatatttcatatagagtttgtcatccactgttctattagatactttcagaacaaaaatccactcgtaacgctattgtcttgttttctcgcagagctgataattttgaaataccactccataaatgctctaaaattttcaaaacccttatatgattcttttatatttaagttgccaaatatatatgttcaaccagtgcataatcaaagaaattacagagacttatttgtctaaaaaaccacaaaaacataaaaatttatagaatccggtacttttaagatggcttacgaaatcaggtacttttacttatttgaaatgacgctattacccttgattcatcatttagagaaaacaaataaaaattgtatgatttttttgtgttgtcgtcgtcgtcgttatcaaccctcatcatcatcatcaccaacgtaaccaccgacgccatcatcatcgccattaacaactggatctgtctccgtttccatcaaatctctttctctctctgcagatcaattgattttttacaacgtgattgaagcggggctagctccggtgacgatagttgattggttgtgtcccttaagatgagctccttcaatggtaacgaacggcgtcggcggccgtgaatcatgagagagatggctcagtttctttttcttttctctgatcttcctctttatcatcagattctatctcagaaacttatcaatgtgcgtttgattttttttgcttgggttccctttacaataatcattagggtttagtttttgaatggaattctcttccaataaacaaaatatcattaatggtgaatagtgaggacgcaaatgattattgaaaagctttgatttcgaatactcgattgcagatctgccacaaatctgaaactctgtttttactattccccttcttcttcatttgcaagatgatttcatttcgttcgtttaattttttgctttggtttcatcaatactatcatctttagggtttaattattgtgaatcaatgaatgtttttagttagaatagattttaagaatatgagatttggaaaaaaaattggatttaaaagaagaggagcgtgcaagaagatgatgagaaaagatgatgagattattcaggggtaaaatgatcaaatcgccctatcaaaactactccttttcaaagatcatacacaaaaacctcaaaatcaaagtttttatcaaaaaacatcctcttttgacaataaccccaattacagagtctcatgtacttctgttggagggaccgtcgttatcaaaaaagaaaccaacattttagcgtggtagtcgtctaccttttggcttttaatcttatattttcttttgcttaatgacaagtgtccttttagggtatattcatttttcaccaaattacttgttttttatatgtattttcaatgaatatttggaatattctttacatataatatcaattatacaaaatattatttttgaaaatatatacttaatcgtagatagttgcattttctttccgtatagatagcaatttgaaagtatacactaatgcaaacaacatgtacattaatcaagattacaatgtaactcttaaagaaatatccaatttgaatttcaatttaagaagaaactgtttttttctttttctttttggacaacaaagtgttagaccactaataaagggttactagattttaatttggaacgacaattgatttcatatacagatttttttgttttggtttttcgatatcatataaagagaattcgcgaataatatttacaaaaggaatctaactgttcatactaatactatgaacaccttaatattaattgttggacgtaaaatggttttggcgattaccacttaattagagtgacctttatgatgtgtatgacattgatggcagtgaaagatactgagaatctttacaatcaaattgcaaatgagaacagatccagtgtctaagacccgatctgtgttttttttccccattgtaagagaatgttctgttttacgtctacacatagattcccttattcgttttttttgctcgtgagagtaatggtaccgccctcacataagatc

SEQ ID NO: 872 - DNA, 26721 bp, Arabidopsis thaliana
tttgtattcttaaaaagaggtatttaaaataaaaataaaacttcttgaatattcgatcatcattgacatctacgcacgatgtacatattaggaaatttaattgactctcttttttccatgaatactcatttcagtttaaaacttttaatgaagtttcttgtttcattaagggatcgatcggatttgcagaaattttacttttgaatattgattagataaaaatgtcgttttacaaagacctataatttgattattgtaaagttttcggaacatttggttgcgctacgtgattatttttgagcattaattaaatcgtatgtaggagcttcaatcaattgatacttgagctcttaaatttacgtaaaaaagctaacctaatgagtgttttcttaatagagtccaatgacaagatatatgagagaaagtaaatggtagtaggtaaacagaattttaagtaaatagaaataagaaaaaattaatagttctaaatttagattttatccttcaattaaatattatagaaacaaaatataaaatttgatttttttcaataacatctgatttattgatgtaacatgttagtttttatatgtggatttctatttctagtttatcacatgtcttcctaacaaaagctaaccatctaacctaaacattaacttccattttatattagatccccgtatacaaaactaatagtatatcagaaaaaatcaccaatcccgtaatatttaaataaaaagtaaaatcatctttatgttaaagaatttgacaaacaaatatttttttagctattttcctaattgttcgcccaacatttgtcattggctgcaaatactcatcttaatatctaagtctcttggtgtccgatgtaattttgcttgtgtaagaaaataaacgcagcacatagtggaacctaaaatatcttttgtgtggttccgaagcagtctctctcatttcgatgccacttatatttctgacaccacatagtgacataggtaataataggtcgcatgatttggttcaactgccggatattatttaattgtttgatgtcggttttctattcaaatgggctttgaaaactcaagggcttcattttggggtttgcatgtatttctccgtgtatctgcaatgtaatcatgtggcgattaagacaaccaatctgacgctatttgtcggttttgtccaatgtcttcactcatcttcaaccagtcaacatcaatcgtctcctttcgaacttcatcatctggtctctcgagtctatggccatggattgagacatatggcttgtcctctttttagtgaccgcgttgtattacaccattcaactagaattattatctacatggtgtatttgattaataaccattttggtcattctaattgttctaatttttttatttgaagttctctaatcattttcttgtacttattttgcggtgattgttccttaccaagtgtttgttgaatactaataactttttcgttggttttctttaaccacacgttctgcactcttcatttggatatcagttatcaccatttgggatttagatggttaatgcttttacactacttggtctgcaaattctttaagattaatagttaggctcaaacatgaccatttatgaagaaaggaaaaaggaggttatgtacttttcatcagctgattatatcaataggataagaactaacattgttgtaaatggtagattaattgatattgttgtaaatgatatattaatataaggttctcattagcaagaagcaaaaactcatatgtggtatccatttcctaagatgcagtataggatgtagatgtatacacactgacgtaacatgcttttctattatcatatttttttgcatgaaacgtacatggcattggtttatatttcagtgtatttttatgataaaccaataaattttaaaggttcaagatatttcaccgaatgtcgtaatctcttcaggtcggggaccaaaacaaataaagtgaaaactttagttcccactgtatttccagcactcgaattcaggaccataaatttacacccaaaagtttagctggttgattcatcgattgagtttacctttgtctaagtttttagacggttggtttataattatttcattgttgagtatcagccattaatatgatacatatagggaattcacattccatatttattcttttgcaaataaaaaaccgtacttgaattcgtatttggtatgaaaatatataaattttgttctaaccggcagtgcatagatacagaaaattatgatgttgattcatttcgtataagtgaaaaacatctgtaagttagaagaattaaaagtaaataatggacgtggaatctggacaagaagaccgttgtgaaagtataaatgggtacaaaagacttttgtgtgtggtagaccatttgctattcccatgcatatgaggttcccatgtgagcctcaaattttggagcctctcgtatgtgtcttttcttcaattcttctacatgctaactcaaatatattcctatttacacaatacaatatccaagttttgcaagaaaaaagaacaataaaaataatcattgtaaacttccattgactgttgaaaaagtggtgaacttacttgatgtttgcaaaaatttctttgattgaagaaaatctttaataatttgacggaagtatgttttctattgtatctttatcgtgaaacattttgtacgctatataactctggtttatattaccaaaaaaatctgttagtttcaaatgacttttgtaaatttgtgtagcaaaattgaggacaaaatcttaggtggaacgagtacgattcagaaaatttgattttgatttcagatcctttttatatattttgtttgttctttacagttgcgaacttttaacctcaaaaataattatacctctttaatgtttgcgtttcaagtaaaccagagtagtatcccattatagcaaagggaattttcagcagaacagtttctactctctagtacaattcattcccacttttgcgtgggatggcaaatcaaatcaagagaggattcaaataataatgattaattgtagagctgaggtaagttcttatttgattttttaaaggttatatgtttttcttaaaacaacttatttattgatcatatatagcacaatttccagataccctggaatgaaaatgatgagaaataaaaagtggtacaagaaaactaattaaagagacaaagaccacaaaatccaaaaagctacagtaaaaggaaagttagctagagtgcacaactcaaacaatgcattattaatgaggctctaaataagattcactacttaaacttgactttgtttctggacatccttgttgatctggtctttcggatcggtcatgttctggctcttgacctcggtcaattgaattttagtctcgggaacattgtgaagagcaggcggttgatgaaccgcggaatccaaaactgcaccgggtatgacggtcgttagctttgctatgtcgatggaatgatcggacacgtctttggatttatctgtcttctgagccacaggagttttgtagtatttgaaaattatgtagagaatcatttgaacagctcctaagaacgcgcctaatacatttggaagctgcaatagttcaaaaaacgtgtaaaggacattaatattccatttattgtcgacaaaagaagttggcaaagaaaaattataaaagggaaattaccgacatcacaacataacaaattagtttttttgtttctagtatttgctattgtactctcaattccttagcacatttagtgggggtccaattatttatataatgctaataataaagcgaaaaatgtgtacggttcaaaatcatatagtttgaatgaggaaaaaaaagacaaaggtaactactgtttttactttattaaagaaccacccataataattaatctaatcatataatgttgtgctgtcctttataatatattttgaaataatcgaaacagaataaaataagagaattatttgagaattgtataaataaactcacggcaacgtagaagtctttaatagcgagaccgtagaagagccacgtgacggcgctaattgtaagaaacaacgataaagagaaaggcataaactccacacttcttgttcgtaccaccactctctgcaccaaaattagtagtttttaactattttaatatttcccaacgtgcaaaaaactaaataggaaaggagagacaagacacaacatacattaattataggaatatttatttattatgttcttcgtaggtcatgtaacgtaaaatattgctcgttcgtatatataaatgttcctatatatatgcacgtctagaaatataaataaaacgtaccatgatactcaaaggagctgcgaaaacactgacggaaaatccaacgcaaatccctccgagaactttctcacgtgttgaacctttggttaagagctcgcagacaagaacaatggcggcaaatcccaaaaagttcaagagaccaagaactttcaaagtggatatctgtaacatcgtttcaaggatgtagttatcagcaaaccggatacaaaagcatttacatatgtttatgtgtgcatgtgtaattatgatcaacgtgaaagttacgataaaattatatatatgtataaaaaagggtgtttcaacatactctagttttcttgttagcataggagacaaagaggacgatgtagatggtttcgatgacgcatccaaaagcgtttatggtgatgagaagaaaggctgtgccatctttttgcatagcgtagtaaatccaaagcatcgcgctaaaaagtgctgaaacatagggtagagactgaaaaccttcggttgatttcttcttgcatatccttacaaaagtgggcctagataatatcaaagaaacgtttaattatctctaaacaattaatcgacaaataaaaaggagagactttgtaagggcgtgttgatgcttacactggggccaagaacacgacgaatgatatgatgttacctgcaaatttacagcgtagtaaacattatgagtcttaaaacgtaattcaaagtgttggtagagtttactagtatatatgatggtttcttttataaatgcttatgtatgtgcacgtacccaagattccaaacacaaatgcccataaattgttagttagagccatttcttgatgtttcttgattagttttctctccctttgtttggtcggactatcgaaaaaacttatgagcgggaaaaagtatcaaaggccaagagaaattaagagagagatagagctcttgaagcctcttctaactcttgaagctctagtttgtgagttttagctatgaatttacaatgccaaagatggaagatatatatagagggttcacatgtgaaagtatgcaatgttaatacgtttaagacgacatcgagaaggacgtgtcacattattggtctcagatatttctaattgatgtattcttttaaatggaaaatatatgaaacttttatgtggtatgcactcttggcgtctgttacgttagtatcaaactttttatgccaaacctagatttatatattaatatcgtattcatactaatgagctttaacaaagattttctgtaaaaccgaaaagaaaatttaaagaacggtcgatagaggtttctttagaaagccattgaacgagtggtcacttattatttagaggtaaccaagaagctcctgatcgctgttagctttctagtaccatttaagtaatatagatcattatacttttgacaaaaataaatatagatcattatacgcctttaattagtattagtcaccttttaaagtaatgattctcaaatagttaatcgggagagagtcgagccaaatgattccctaaataccttttaagccaatcaaaatatattgccgaaactgatattaagtaattttaaatttgagactaaaataaaaagtttatcccacataaacgaatttaagcactccagtgttgtaattgtttatatgacttgcaacaaaatgtatattatatgtgtatccaaagaatcattagccatatcaaatttcttaattaatagggaatatgatttatgttgagacacaacaaagaagttcatagtatcaaaacatatctaaagagaagaagtcacatcgaagttgcattaggcggtccaacagcaggtacaagcatcaaaaatcctaaccgtgatcgctccttttgttcattataccagtcaacatgaacatttttcattgagtctgcaccacgtgtaccatattttatgttgtttatgagcaccattatactctatgatttggcagccaaagttaggtccgtaactaatttattattactcttaaagtcacatttgtgtttatctctttatctgatttcttataagcttcctagtttttttctttgtcaaataaacaatctaattatgattaattgcattaatgagtgggtaatgtttttcaaatatttcattgagacagaaagaaattcatcacactataaagtgatcataaccactaaaaattaaaaaatttaagaagaaacgattataaagaaaaatataaatggtaaatggtatttttcactttttgtatatttggttttacgatataaaaatcacgaaagaaaataagaatagagttgtattgcgttttatcttaataacgtgactgtcgtgtgggtataggtaggattcaacgtcatacttctggatgttccacttggctacttttcgtgttatctaaatttatcacaaactagtcgataatgtatcaaagcaaattatctccctaaccttttatttatatatttattaatctcttattaatctatgcttccaccttccataactttatcgactagtttgtgacaaagaaaatgtaaagttaattgttctaaaaaaaagaagaagttatatatatatttttaaaacgtacagttatattttcatataaactaattttattgggaatatatatctatttgagctggctaaagtaattggtcactattttcttttcaatttagaagaaaaaaatcacttgcagaaatttcggatatctaataaaatacgtgtgattcgcatacagttttgttttatttagttttacaagtcattcttaaataaaattatcaggtttttatgttatttattaaaaggtaccataaacttgtgttttagaaagggtatcaaaaagataagcaaaatttttaaaatgaacactacttaaagcacaaattgttgtgctttttgttttcttaactttacaattttagtggtaattttctaaaccaaaaaggggtgtattaaaaaatggtttgtttaaatatattttaaatatttcaactttcatgtattgttgtttgtttttatcaaactcaaatcataatttgaattggatatatatattctacatggagtctctaaatattgtacatgcatgggagtaaaacattttagacttttcatgcaactagattagaattcgtgtgatacgtttgtaattgaaaatcaattaaaataatattaattctcaaaatttaaaccatgattatatttagcttttatttttactttgtaaatattttttgaagattaattgataaagcaaaaagaatggaataagaacatgtttagtctttggcctaaaaaaaagggacatgtttagtccatatcctagcaaaggatataaacataatgagatttgttgggaatttacaaaaaaaaatgaaagaatatttggtgaaatatggatatctggtaatcctaagcattcttaatccgctgtactcattagaatgtcaagaaaaaaaacttcatggagagacctcttggagataaggctccaataaatataattgatgttttatttttgaaatttgttgtaatatttctatttcagaaatatggtggtgcatacaaagagatttaaaaaagttgatttgacaaccatatcacaaaattgcgcttatttttccggtcaactgttttgagagaattctacggttaaatgtgtttgatctagagcaatttcaggattagtaaacttctaaaaaatgattatcagaactgtgtaagtgaggataaaacaagaggaaatatcacgtggtgatttgtagcgtcaataccgactgcctcacaaggatgaaagccacaagcccgaaaaagatataaatgttcactggtagaggtggttgggacattacatttgtgcctaccaattatgtttgttaactaatatatgatctattgaaacaaaaaaatgtatatagttagagtcaaaacataagcgcagacatacacacacaaaaaagacatataatcatgaccgggttttaacacatccataaaacaaattgttgaatcgtctatacatataagataaatgtgaaacgcgaaagcatgacatctaacgcaatgcaaacgctaaatgatggtagaagaagtaatgttaaacaaatgaaaatcatgaatatataacgattttaaaaaaatcacaaatgtagtatcccctatgttttactttagttgtcgttctaccactaaatttttgtttcgtaatagttgttgttttagattttcaatgtatatgtttgataaaaatttaaatatatatttattgttttaatgtcttaactaattataaaaataaaaaatttattaaataagggtaaaataaataaataaacaaaaattttaattcttgtgcaaaaaccttaaatgataactatttcaaaagcaaacaatatatgcagtgcaaacccatctatactttgatcaattggttaagatagaggagtatgtagagtgataaaattattgttgatacttgttaaataaataaataaaaagaagaaagacttgaatatttttggcatagttcttttttggataaatctatgatttcaaatttggttcaatatttccagtcttttactaatatctgcatatggactttgtcaataagcctaaaggttgttgtcgtatcgtctttttcttatgaatttgaaatcatgcagtgtagtaaagaggttatcacatcagttgaaagtacaacacgtttacaaagtttgaaacatttcatcccgatcatcatagcatacagtgaagtaaaataatcaaagtctttattttgttggttaagacattaaaacatcctttggaacgaccactctctctttcccatcaggcgatcccgcgaagccggtcaccggaggtgaagtcaaccatcatttctctactattaccactattatattgaacttctattgcaaaacaaaaaggtatgaataactattatgaatacgttttcttaaaccaaatttttaagatcttataattgttgttccaagtagttaggcaataaaattgacttaagttctgaatgacaacataagaagtaactgaaactgatcacaagagttccaatcttgtctcgtgatcaccgtcgctaaatgatttgaaaaacgtcaaccagtgtcagaagtttcgtgggtgtgtgaatgtgaaatagaatgagtgtaagtaaaattgatgttgatgactcatcgtttgcttttactgtcgtttaccattccaagacggtgtcttggtaagtgcagattaaaacatcacatgactctatctactcatatcgacgcaggccgattgtgttgtgccgtatgttcccatgccacttgtcaccatgtaccgtcgctcaattctacgcatattgttctactcttttctctcatttttgctgttttgtatcactctaatttacttattagtttttattttatttttaattaccaattagtcttttcattgctccttgagcatttgtgtccgttaatatcaaattttgccatcccatgaataaaaactgcacgcagttttgttggaatagatgttttaacgttagggtagatcgatcccaacaaaaaaaaaatataataagttaaagatggtgagagctaggaattttcgatgtaatgatatagcagcatatttattaaggaatcttatttttgaaaccatgagtaataaagagaatatgccgctaattaacaccgtagatatcaattactagcagaaatgtttctaaaaaaaaaagattttaatgtaaaagaaattgcaacagtccaatagtaaccataattatgtcacgttgaagtatccaactttttacaaaaaaatcagcttaaattcttttaagaataattaacggtcgttttgtaactcccaaaagtttggaatgctggcttgttgactggtgcatgtaatctttcttttttaattattaattcatgtaaatttcattcaagattaattattattttatatgttttaaccgatatgtctcacacgagaagtgaaatacacaggagatttttcaccagaaaattattcaatgttaatattgtttttaatgaaaagttttttcaaaatattgtttttggtgccttaccatatttcaagaatctatagtacggcttcttcttcttcttttttcctcccctcttcatgtattttacttaacttttgctttgttaatttatttagtttttactttcttagtttcccgtcacgtattgataaatttacacatatttgcgtatatttgatttttaattttttacttttacatcatgcattctagaagactacatgttctggtatttttttttgttctttgttctaaagcattcaaattaatctttcaattatatatagtcgagtactttttggggccgagatgtcctctagtctatagcatttagctttagtaagttcatcattgattaaatcatataatcaaattcttgaaggctaccgatcgcaataaatatatatatatatatatatatatatactaagtgctccaatctttatcattttttataaataatcaaataagttcattagattactaatttcaaagaaaataaacaataacatctaaccaatcaaaagagaaacagaatcgtccggttgaaatgtaaagtgggtgaaaattacttcactttttttttgttcaacgggtgaaaatgacttgaaattttaaaataaaaataaaacaaaagtgagatctccgaaacccatttgcattttttcttcttctttttttgttgtagggtaaaccatttgcatcttccttgagtactagtccatcttttggttggcccttaataaaataaattgaataatcggaattaattaacgggctaatatttaatcgcgatttgaaagctaattaattattgatctaattgactttttctatagtcttgtggtacttgtaaagtcaaaaaagaatgttttgcctccacccttattcgacggtcaaaattctttcccatacatccaaccaagcaaatgccttttagcagaatctgcgagaacaaaataaagttgaatgatttttcattacccagatgagtccatgactattcaattttccattagtcatgcctatgtacaaaaacagtatgtgtatgtcttaattatgccgctcgcttatacgtttaacactctatcactattcacacatatataagaagttattacaattagaccgtataaatctacaaactcatttatgtcttaatcatgccgctcgcttttctaagttttacgtcttatgagaaatgattaattatactaatttggtaaacttttgtgtacaaaagttgaaagcattggtaaaaagaaagaaaccacaaggacacaaatgatgaaagaaaggaactaatgaagaatataatgttggttttgtttagtgtatcataacaaattccctttaactcattatccattgaaagtgcttcacccttctggtgaatctctaagctttaagtcttttgtcttttcaatttctcagattgttttgatggttgagctcgagtttttgactcacttcacttcaaaggctcacacgtacatttcaagaatattccaaagtttcacatcaattattattattttttccatgtactaggaggagaaagtctggcctctatacgtttaaattttcaaatttcaactattagagagagctttttggcccactagtagtatatctctagttgacaacatcttgaacgtatcgtgagatcaacacttaatgttagctgttttggacttcgctttatataatgttttaacaagttatatgatgaacataaacatctaaaacatagaaactaattaaaacatgtcaaagaattttaacatgaaacatgtaataaaaagttattgctttataaataaactagattataacccgcagtacaccgaagagacaattattttttaaaaattagtatatataaaagtctgtaaattatatttatctataaaatatttatattttatagtttacaattgttattaagtaacatccttctaaacccgttctgccaaacccgtcccgttagaaaaatttgcggtacaccgctaatttaaaaaaatattttacgggattgcaattatattttagtttgtcaaacaaatttttgttttaaatagttatcaaaatctaattcaaatattggagaaataagatttagtgaactgataaaaaatgtatttaggtgcgttttgctcattttaagggattgcaattgtattttggtttgtcaaatctttttttgttttaaatagttttcgaaatctagttcaagttttggagaaatctgcgtgatatatgggattggaatatatttggaatattttttgtttgttaatcaatttattgccaaaagaaaatcaataactaaaagtcagtggtaaccattgtaaataagttttaactccaggatttatttcacaaaatggctgcaaaaatgtatatatagatcatatagacatagttatagctagttaatataataaactagtagtatacgactttttcacgttttgggaaaatgatttcactgagttcaaaccattcacgaaatgtttgtattgaataataaaacgtaaaattaacaagtgttttttttcctctatatattatttataactaaactagagaaacttccttcatctagtatctctttgccgtttacaaaagttatcattctattgattcccctatttcataattcagctaatcggttatttatttgacatatcagtcaaacccattgcatttctataagagtgctctttttggcattttcgtgaggcggaggaaagatttgcagatagtattactaataagtacgtatattacgtggatctgtacaagaaaggttctatggtgtagtggttagcactctggactttgaatccagcgacctgggttcgactcccggtaggacctttatttttgcatcctattttattttctcatagattcagcccatcttgccacaattagatctggcccatcttccatccaaattaatcattttgggcagtactctaatcaattcattatagcgagaagtagaggcaaattggaatgtattgaaatttactggattgaattaattgctaaaagtaaaacagtgataaatccaaacaattcctagccttaagaaggcctttactctttttttctcacgatctctcagtgtctcgaggttttttggtttgtgacttttcaaagtaaagtgccatttcaccacaatctctatgtgacttagcaagtttcattgtttcaacccaacccttgtacaaccctccttattaaaaccacattattcaacacttgtctcttaatatattactagccatcaataacaatctcaatcacataaccataaagaaacacctaaaacacttatccgagaatactcttgcaagatcactagagtaataaaagggatttcaacacttgccaagagaaacaaaaaaaggataaattaaaattccaacaagtatgatatcctccaatcaattttactgcgaattaaagcgtttcatgatgatcatactcatatccatgtagcgttgagcacaatgagtgaggcaagaactctcgcttgagctgaacttacttcccggtgcgcttgtgatgcatttgtcccagcacacacttgtcatcttcgacaccatttcgttcaccattgctctttctttctcttgctgccacacaaacacacacccacattctcttacaattcaccaaacataaacccaagacaaaaaaaaatcattactttgcataaaccctaataaacccaattcttgtaaacacatattagtacactaaatctcaattcaacttgattctaatcataccaactaaatcacacatgaaaaaaaaaatcagatctttcaagtttaaagcatcgaaatgttaatttgacccgtcaacgaagattcaaataaatggtttctgtgaatccagacaggacttaaaacactgcttctacttataatttcgctgtccaaatgctcaagtttccatgtgaatcgacttaaaaagctttaaaattgaaagaactaattagcattcatcaaaaacaaatcggagacttacggcgaggaattgaagcaattccgggttgtttgccatgctaggatccatgtctggtgagctgagagcgtctctgcttgaagaagaagaaggagaagaaaattgttctcagcgactgaaaaccctaaaaacttttctcaaaaaccccaaaaggctacaataaagttcaagagacgccgcttacttacttattgggccaaaacccccattaaaagcccaacagttaaataatcatattgagatcaaatatgtaaaagtttgatttaaatatggatcatgatctgggccgagtgtacggatatatagggtgggtagactcagtgattttaaacccggacccgaccggtttaatagggaaccagcaggcacatttgggtctaaactagtcataaaaccggactttttaaaactctgatggaaccgggaactggcggttcacccagctatttgttgactagttcatgtatttttttggtggtgtatatcaaatattcttctaagaattcatttgctccaagataatcaaaatgttacaatctccattgtgattaactttaaagtttagaggtcgtcggttcgagtgacgcttggaacaaatttcggacctaagggaattacgggcttcgtcccaaaacctcctggtattcaaaaaaaaaaaaaaaaaggaaagaaaagtaacttacttgactaacttagtatgctttggtaaacccattcaattagaactagattcaaagacattattttaaaactattttctttttgcattggagaaccaatcaaaaaattacgttcaagtgtatgtatggttaaaaagaataattgaacatgaagatggtgcttgtaccatatcaatatcaaccatcaattgacaacactaagttataaagaaatgaaacttttcatttatgtatgtcgttgcttaagaaatgtcgctaaatcatcaaaatctaaagtaaaaagaagattgaaaacaaacaaataaaggaaatggaaagccaacatcttcgaggtgaagaaaagtaccaaatccaaaatgctgcgtgggaggagtaagacatatgattctaaattgacaaatttaaagctttttctatatcctttatgaatataaaacaaatagagctttgcctactttcaacacatgaaaattatatagagaaattttggactagaattaaagctagatgttaacaatttaaaatatttatcaaatataagctagtcatgttgcattcgaattaagattcagcaaaagaaagctgatgaatactctcttccaagttccaaccaattaaactaatctcgattccttaacaatgaaacaatcatctttaatccatttcattttcttttcttagtctttcgaaagacaaattatgtaacctttatttctagtgtataaaacataacattatacaaagaggactaaacctaaaatgctatttgtaaaaatcaaaggctgatgctggaaagttgaagcaaaaaattggaacaactttggtttggtgggggctttgggagctttattgatccaaggaaaaaaaggaaggataaaaggcaagtcaccagtccaaagacacacatatatacaataatttatctaaaataattgaaattaaagaagtgcatgagagtagaaaattgagtcagaccaacatctaataacttactcgttaagtcagcttctcaaatctttaagttgggatcgacttggactctctttcaaattcacttttgttttctgaatatactttcttatatttttcttatttcttaatcattgcttatgcatatttacttaaatttattgttttaaaaatgtattgtatcccgacattattatttcacttgccaaatgataaagacaaagaaaattttgattcctcgatgatataagttttccttttccacgtataaatttataccaagaaatgattttactacaaaattataggttgaacgtacgtccaaaactttcgcttatttatgtacattcatatctataattcgtatatcattccgacattactataagaaaaaaaaagggtcgcatggatatttttacatggatgatatatacactagtccctaaacatgtgtaaggtccctaacataaaggtttgttttctttttcggtgtgaaaacatttcagatttggaataaacactgtggtaatttttcgggtttaaatccactctaaacacttacgtgtatttttacctgggctaaccgatcggcttatgaaaaataaaatttcaaatgcatgttaaaattagttctgggccaattgttagaaatgtgctcgttttagttattgatgttgaatgtacttatatggtaatgaatcagcgtggatctaggcttttggaacttaaatcttgtttatttcgttttggttgaaaaaataaataattacctttgcccaggaaaacgaaaaaggaactagattatctttaccaaaaaaataaagatatttttgaatactcgctatattcaaaaccttaacaacgttgactgcatgggtacatgcaccacaatttgttatgatgatcctcgcatttaaataaacaaaaatgaaaccaatctacgatctctgaatttgcagttatcaatttttttttatctatttatctcttgaaattaatagtagtacgtaaaaagtatctaaaggaaaagcagaatccgcttttgccaaactaaaggtgacacactcataagtatatataaacaacctaaaccaaacacaaaggatactcataagaaagcaatggacatttctgcgcagagatttgccatgaacggaagaagcatgagactccctcccgggtttcggttcgatcccgatgatgaagatcttgtgttcgagtatctcgccaagaaggtcctccaccgtccaatggacttcgatctccctgagctccgttcttgcaatgttgatccatgggacttgctaggtttgctacaaactcttctctctaataattactataccatatcacgtcaaatgtattgaaaaatgtggtttagtgaatgttgtacgtacacttttgttgtaggagagaagaacaaggaagtgtattacttcgtgaagaaggaagagcgagagaggaagggaagagagacgttatccggttattgggaagagtgtgaagaagaggaagtaatggaggctggtggtcgtgattgtattcatttagaaggaaggagaaagacatttgctttctttattggaaaaaaacctcgagggacaataactccatggatcatgtacgagttccgacttctttcctctagagctacaaggtggtcatcgtcccctctacctcgggtgagtcactcattggacttttatctttttctataacatatatttttgttgtaagtaatagtttagagctaactatatcaatgttttgggttttaaagggtgaggtaggaaaatggagggcggtgaaagtcgtagtgaaggaagagaatgatgaagagatggtggaggatgagcacgagtctgacgagtctgatggcgaggaagttattcaaagccggtgacgaccgaggttgatgccataaatatatgtacttggttttgtggtgaatcgtttgaatttagttactattgttaggatattagggaacatctaaatgaaatatatatgcatgatttgtcttattgtcttccaagccctttggaatggaatggaatgtaattgaggatgtggtgaaagatgccacaagttgctttcactctcccgttttattttgttcttgtccaattatatatatatatatattattagtggtccgttagaccaatccatccaacatcacatgaggaggtcttcccacaatataaatacaactagattttaatccgcgatataccgcgggacgatttattttttaaaagtaatatatattaaaatttgcaaattttatttttataaaatatttatattttacagtttataattattattaagtaacgctataccacgaatccatgagacaatttttaaaaaactgaagttgtaacccctattaaaacagcatattaataatattttaaaattttataaatattgattcaaatacatccaccatataatccaattccaaaataaaacctgttgtataatttctttacccgtcccgtgatttttttttaaaaaagtaatttttaaaatttaagaattatttttatatataaaagttttgcaaattatatcattctctaatacatttatattttatagtttaattttatatatagtaacattatacatactacataatattttcggttttatataatcttttctaaattaggatgatttgatatgtttaatattagtggtcttaaaaaataataaattaaatatttaaccagtattgaaacggtggattaattatattttacttttttattaatgttgattcaaaaacccgtcactccaaatctgtcttgccaaaaagccatttattttattaatattaattttattaatgatatgactctgaattataatctaaacattttagctaataaataggagtacaccatatttatttaataggggaatgtaccatatgacccgaatgcacttttacccaaatccaccaaaaaagtcttgcaaaaatactatagagataagaaacgatagtcggttttgataggtaaaagattagcaaatatattagttagcttaaattagttaaagaatacaaattgaaaaggtatattacactttattcgaatatagtatcaaaacttatataacacagagatttgataattttttaattgttgaatacttttttttgtgctaatttttatgtgattaagatttaattgattatatatataaaatattaaattgttttacgaacttatttgtttataatttggtaacagatagatatttgagtattcagtatattttgcttcagtttaggaaatctttgatgacccgtctttagatccaataaaccttataatctagatattaacctgcagtataccgcaggtaggcttatattttagttaaactaaaaacttttattgtaaagatgatttaaaaatatatgatattattttatttgattttaaatgtatagtaaactgtgagttgtatatgttttgttgatattatgtatattgtttagtgtttataattagacacttgtagtttaattgttaatttaagagtttcacatgtagtataccatcttgtattaatatcgatctaaacccgtcaattctaggattttccagcttgtattaaaaattgaatcacatcatacacataaaaaaatctaatatgttattaattattatagtatataagattataaattttcaatataatatgtatgaaattgaatataaatatttcaaattatgacccgttactcagtagaaagttttcttaaatctatttttcaccctttataatattttttcatgtattgaacagtttatatttgtttttaaaaatttaaattatggcatatgcgaaaaaactctaattttttttttataatgatgatattattttttcgcaaaaatagaatcatataaagatgagaagtgaactataataattaataaaaaattaatatgataatttagatataaaatctaatttgttgattttaataggttacttttttggaaattaataatgtatttttttaaatttaattaaattaattaaaatttaaatatcaaatcttatatgttgatcttgattggttattatttttgaaaattaataatgtatttcgttttttaattaaatttaattaattaaattagtatttgactttttaatccttaaagagataaattaatttactctttaaaattttatttctaatgatatacctatgtaattacttaaaaaattaatgttatatttaaaatgtactttccaaataatatagtaggatatgtaaaagaaagtataatattttaatgtttgggtatctttatatttaagacacaatgtctcaaatgtctttatagagacattttggagagagatgtctcaaatttaaagacccttttatatttaattattcatatcttataattataatttttttaatatagctaaagaccctctccttttatatgcaatggagatgctccttcatcattagtatattttgttttgaattcaagatttctaaatatagaatttcctaaaataaatacatggtaaactcgtgggggttattgacttgatttgatacaaaaaatgagaggatatagttgtgatcgcatttgattaatttaggctgatgagcaatatgtatgcaatatgcatggatggtgtagaagcgaagacaactatcaccatacttaagattaaaatcaccacaattttaatataatttaacaatatgattttatgcataattaattggacttaattattactaagacattatcagtttgcaaccatccaatttcatgtagaacaagaagtctttagattaaccctcacaaaagactttccgtttttcggggttttttcttgactaaacaaataatcttggagacattaatgatgttatgagtcatgtgaccaatacagttatttagacatcaaagttatctgcaaattcattagagacgaacggtaatagtcacacatgacaataagaatgaagatgtcacttagataaaaattaaaccaactcatgtatttgcctaaataaatcactatttaccaaatttagcaaacaaatcgtaactaaccaatcaacatcacacaatctcaaccctttaataatctcacattctctcgcttcttcttctcggattcctaaatattatcattcattcatcatcctcccaactcattggctctcttctctcctctcctttgcctattttctaaaatcttctccggccacccaccggccaccttatgatctttttggtggcggcgattacaccatcaatttgttagtttatttatatattaatatgggttgcggtggctcgaggcttggaggtgtggcgacgacaagggcggaagaaggcggggttgtgccacttccagcgggaatacgtccccttctccggcgaaggttagaggagatgaagaaacggagccatgcaggcgtcttgaaagggagccagacgttgtctaagaaagagcttcttaggcataactcttccgaggacggagaagatacggaggagaacgacggtagcttgaaggcgtccgctaaggttgctccggcgcctgatcataatgtagaagagaagaaagaggttatttatgaaaagattccatccaaagatgatgttaaagaggtgaaggaagaagtagttgtgaacaaacaagaagaggacaatcatcatcaagatgttgtggagaaacaagaggaggaaaataaagaggttgtgaagaagcaagaggaggaaaatcatgatgatgatgtggtcgtcatcaatgttaagaaggaaggagatgatggtaagaatcatgatgttgatgaagggagtatcaacaactttgatgagagaatgattggtcctggatctccaagctttagggtttattgcgtcgatgttccttctgatgatgatgatgaaggtaaatcatatgttcttatacaaacacacatatatacatgtataaatcatttactatttgtatttgtatatggatgcatgcattgttagagacatatatatgtttatatatgaaatgcttgttatattatgtagtttcgttattgaaacaatttatccattcactattgcagaaaaagatgtagaagacgcgagaaagtcgatggaaaccgaaagcgtcacgacagagataaaagaggtggtcaatcacattaattcacattattgattatttgatctatgaggatctctaacaatgatatatttgtatttctataggacggaagcattgtcaaaaaggagaaaaaagaaagaagaggaaagaggttcggaatcgcattgccgaggaagtatttagcaaatgtgactgcgccgtgctatgcaggtggaggatgcatgggaaacactcattctcgtttggtgcaagagaaatcgagccagtgatcgatcaaaatatgtttgccatctttgcattgactgatttgttgaagtaagaatggtgtggtgtacgtacgggatcacgatgaataatcaaaaccaccttacgattttagacctttgatttgttttaagagacgcttgtttcagaatttgtacaacctcttcttcttcacctttgctttctttgatcaggataattaagttagtgtttgacgaatttacttttttccacgtggaaagatgtaattaattgaacttgtgcaataaaaaaagtgttgtctaaatgtcaaatttattgttacattaaccaatgaaaataaaattagagtaacatataggaaactgcaattatagaagaaaaaacacactaaaaggtgtaagtaattgaactttgtgaattccgtttgttttcggaatgcacaagtgttagtcataataggaaagataaaaatcttaattacaaatcctaaaatacaatttttaatttattttttagagtttatattaatatgtcgtcaaaaacggtatattattcagaacaaaattatcgttgaccattagttaattaataaccaagttcaaatttgataatttgaaagtttatttagacaaaattaattagttgaaagttttatcaatgatggcctcttaaatttttaacttttttttgttgagttttataaaaaagaaaaaatggttttcaaactaaatttgtttatgatcatgtttatccgagttaagcccaatttgagatctttgtcagtaatgactaagagtacctcccgcatatagaattcatgtagtttctaaaacatatatatatttttttaacttttaaatatatatatttttttaattgtatgagtttctactaaaaaattactattgaagttggtctaagttgcgagaccaaatttttatatgctttcggttcgaattgacatttctctgtgtaaacgaagcatcaataagaatttatcaaacttgaatgtaacaccatttctttagttgatcatttccaaacatttattaatcaaataaaattgaatttcaaagtcacgtgataatgatgatactcaaatttaaaaaaccaataacactttatttcaacatttctatgaagaaatcaattattaacacttaaagttattaattgaataacaacgaacaacatttaatttagtcaaaattagattttttttttcttttttttggttttattgttaagattttataccaaataaaattttacaaacgaatctaaaagaaagaacaaatttaaacttacctatcagaattgttgtaagatatttgggttttcttcgtattaggtttcatcagatccagactcaaaaaatggagtcaccgcactcgaatttgctccctgaagtcgattctttacccgatggattcgtcgacggcgcaacagagccgcctctcaattctcccaagacccaggaagaaacaacaaaccatgaaactgttgcgatcgagaaaacagagaagccaagaacttttccggttccgttgtgtgaaactgatggtaatgaagatgacgaagtagctgacctaattcaagaatcaatcaagcttgagttagagttcgagcagaaagaaaaagaagcttctcctcctatttctcaaacatgtgagtgaaaatgtgaagcttaatttctttataggaatttgcttcttttgtaacctaaagtttgtttctttgctttttgtttgagttagtgtcagaagggtcaactcaaaattcaaccttgtctaaggaaatggattcactcaaacccaaaaaacaagtcagtattttgatgagttcttcaatcttgttgctttgagaagaatatatgttgaagatgatgtatctgatttgtgtgctgatgatattgaaagcaggaggtggttgagagcaagcgtaagggttcaaagaatatgttcaaatcagagaaagagtttttggaatttatgctcaagtatcagcaagtcctttctgaaagagattctggtaataggatatcaataaaaccaaactagttttgtgttaccttcatcgtttaatgctttatagtctgtactcatcattattgtttttaaccgtagctattactgttcgtgacaagcttgaatcactttgtagagagttacaacgtcagaacaaaatgttaatggtttgttctttctttcttcttgcttactctacttggtgtgtcttgttttgaggaactaaccttttggtgtgtaaactaaatgttcctttgtataacaggaagaatgcaagagggtttcaactgagggacagactttaagatcggatttatcgacaaagttccaggatgctataatggtaagttgaacacatttttctttcgatgtgaattcttcccagggttttgatctttgctgaatatagaaatttgagccattttgccgtcggtattggcagttttagagaggaacaagtattggataatagctttgttttgtgtttctaagtatgcaaatcttaaatgcacatcatttattgatccttgttatattttcttaggatattatctcctttaatcttccgtgctatatgctttggacagtcatggcaatatctttttcttctttctgaaactctctacactgacattggcaaatgttagtaccgatctacactaaaatttagtccttggaaataattggaactaaacaaagtagaaaattgtccatattggtttcaagttacagattgatagaactaagtttgatgaattgcttgcaggcttttgcaacatcaaaaacttacaaaaacaaaatcagaatttatttgattgatttttttcttatgctctctaccttcctaatcctcttttgtttataggatgtgagcattaagttggacgagcaaaagaatgaaagcctcacgcaactcaaagaaaatgagatgtaagcggaaagaactcaatcataacatgttcatttggagtaggaaaattatagtatgtttattatatatgtatagttttgttgcagtttaagttaatacagtatgaatatgctcgcccacattctggaaactatattcttacatgtgtattgcttttaaaacggctttgcttgtatcagctcagtaacatattataaaggtccattctaattacaatgggtttgtttcttaatctccaggttaaggacgaagttgaagcacctggctgatcaatttatgctttcagaacaacaacatgagcaaagggtaattaaattattcgttttttccaactatatatgaagcatgatttagccaaaataattggcttaactgcgatgtctacttgacaacatctcattttcgaatggacagttgaagcagaaaacacttgagctacagatctctgctttaaaaattaaacagcacgaggagaaactcatccatgaacaatctcagatgaaagtttacgcagatcaagtttctcagcttttgtctactgagaaaaatttgcggttgcagctgacttctgatggagataaattccagcagttccaggtctgctctcttccccttttacacttcctaaataagtcttaatcgttttctcgatgcactgtgatcacagataataagattgcttgctttgggtgtgatacaatactctcttaagatatgttttttactgatattatatgaaaagactgtaaagtgaaaggctgtttggttatgcaggacgcgttggttaagagcaatgaggtgtttgaaacattcaaacaagaaatcgataaggtaataacagttttataccttcgaggttctttgaaagatcataagtgctatttatgtgatcttattaacttgatcctgtctctattggttttttgagtagatgtcaaaagcaatcaaagaactcagaaaagaaaacgcattcttgaaaaacaaaactgagaagtcggatatcactctcatagaactcgtcgaagaggtaaaacaaaaccgtctgttctctcactatctttaagggtttgtagattttggttatgaaaccagtaaaatcacacttttggttgaccttgaacagcgtgaaagattgaagaaactgttggagaagacaaagaaacagaaagacaagctt

SEQ ID NO: 873 - DNA, 8850 bp, Arabidopsis thaliana
gaatcactttgcagatcccttcaagctgaaagaaaacagaaagaaactaacagtactgattctgctgttcaaccatgaaacagagagagactatgaattcagtgttttgctctctttttttctttgtcagagttttgaactaattagcacttcagattacaaaactacaattagactccaaattcactttaaaatgtagaaacatatcacatcatattgattctgctcttttgcgagctaagtccattttatctcacaaaatgcaaattgataatagttaattcagctgcagcttctgcaaatctccaggttcacaagagaatgattctgcattcactaagttcacaaccgatttggagaagaatagctacttcaacatctgccataatgaccagctgattctttgcaatcttaaaccaaaccgaaccgaaccatttgaaccgaagaaaagttaaaccgatatggattatgattcggtttgcatctttatggattcggttagttaaaaaaagcgaatctctctgaattaaaataagtataacgtcaaattaaatttggtcacatccactttcctttacaaacttcaacaacatcaaatggaataatataatattggaaaagaaaaagtatataacgaaatgtcaaccatcgatcatgaccagcagatattaatcggacggctcctgtacaattcgatgaagaagacctactctctcatttattcagctaattgaaatcatttcgttgtgttttagaacaacaacaaaaaaacagtgccctttcgctcacgctttgagtcgtatctgctctcttcttaatccgccgtctctcactttttcgccggcgtggttagatcgtacaaagctcaggtaatcaaatctatctccgatgttgatctactctgtttctccggatttatgatttctctattcaatttccgatgattgttagatctacggggcttttgatcctgcgattactgttgctttttgtttgttaatcagagagaatgttgggaatcttgaggcaaagagccatcgatggagcttcggtatgagacttttttactccttttatttgtttcagtgcgattacgattttgagatttttacttgggagatttttaggttcggattttgttttctgattttcgaaatttggtttttgatcagactcttaggaggacgcgattcgcattggtttctgctaggagctatgcagctggtgcaaaagaggtaaaatgtcttttattgaattttcggatggtttagaagcgttattatacaggtttggttttaatgagctattggaagataattgtggtcaatttaggatgattagagctgttaatgtctgccaaaccacttttctactctaaactttttctttggatgatagcttaatgttgtcttctgcaaactatgtcgattacttttttttttgtgttcaccgaaatgtcgagtttagctatattggatgttttttgattttgtaaactgtgagcatccaagaagcgcaagggtcgataatcattgcatagatgtttaagcctattagctttctctcattagttctgacattgaaaatggtggattgatagctgactcacataaatagtgtagtgacatttagaatcccaacaagtgtagcttaagttagattttaatttacgtttcgagaacccaatttttttttcatatagttgataaagctgatacggccgtcagtctttgttaatatttgtcaaacatatttctccttgtatgtggaatttcccaaaatattgtaatattgcttacaattttttgtgcaaatcattgtttagatgacagtcagagatgctctaaattctgcaattgatgaggaaatgtctgctgatcctaaagtatttgtcatgggtgaagaggttagttgcagctaacatgtttgataaattcatcttgcaatttctaatcagatatcaatatctcatcttttatcttgttattgtaggttggccaatatcaaggtgcctacaaggttagaattatttgacctgatggaaatagatattttccagttaaatttctcttgttttgaccctgatctgatgctggaggtctatcatgtactcatagatcactaaaggccttttggagaaatatggtcctgagagagtttacgatacccctattactgaggtttggaattcttatactattatcttgtactgcagtctcaatccttatttccatgtttcttgattgagaagatttctgacagttatcgtttaaccatgttttaggctggatttactggaattggagttggtgctgcctatgctggcttaaagcccgttgtagaatttatgacgtttaacttctctatgcaggttagcgttggtttttgttatattctttgaatactacattttgcctctttctttgacttgattatgcataattgttgcgttactcagatcatgcactctggtgcaatatgtttccagttatcgtacactttatcttctttcggacattaaagtgcactaaagttctaattatttcccaatgtgtatcctaatatctagtaatcttctttcaggcaattgatcatatcatcaattccgctgcaaagtcaaattacatgtctgctggacagataaatgtacccatcgtctttagaggacccaatggtgctgctgctggtgttggagctcaacattctcaggtaaacgctcacccaaaaaaaattgaataatttgttactttgcattctttcaaaagagaccttcagctactaaactgataaagatattcatataggatgatggagctggcttttactttaacattgatcaaatttcccctaaataattgaggcattgactgattgattaagataaaggttcctatcacagtagcatgcaactgtttctctaagtaagattacacacacatgaaactatgactctgtggggcgtagaatgtttaatatgatcagttcaaggatacacaagttatctgtgtttatgactgcttgtggccttgtaactgtatctcgatgttaaatggagcttttcttctatatcttgtagtgctatgcagcgtggtatgcctcagttcctggtttgaaagtccttgctccgtattcagctgaagatgctcgtggtcttcttaaagctgccattagagaccctgaccctgttgtcttccttgaaaacgagttactgtaagtagtattcctaatttgagttcttgcatgtgattagagcctacggtctcatatcagtacctccttaaattgatttcatcatgcagatatggtgaatcattccctatttcagaagaagcccttgattcaagtttctgtcttcccataggcaaagccaaggtactgtcactcagtatctattgtcttcttcttatgtgtctctttcatctttcttctatctagcagttggatgctttaatgttgtctttgcctataacagattgaacgagaaggaaaggacgtaacgatagtaactttctcgaagatggtcggtttcgccctcaaggtttgccatttcctccactttccttttagtaattaaaactgagaacgttcttgctagttttatggctatagctcaaatattccttttggatgttgttttgcctcacatgctttgtttttacaaactggtgtttctctttgttccgtctttgaattatttatttaatgtacctgattctaggcagctgagaagctcgcagaagagggaataagtgctgaggtatgaagatttttagatttctctcttgtaaacctgcttaaatctgatacgtgaactctgaacttttttctttgttaaaatgcttaggtaataaatcttcgatcaatccgtccgcttgaccgagccaccatcaatgcttcagtgaggaaaacgagtagattggtaacagttgaagaaggtttcccacaacatggagtctgtgcagaaatttggttaacttcaattccttaattcaatagagatcttattatcacctggattgtataatagttttaaaacacggattaaactttttccgtaatggatcagtgcgtcggttgtagaagagagcttttcgtacttggatgcaccggtcgagaggattgcaggagctgatgttccaatgccgtatgcagctaacctagagagattggctcttcctcaggtttgttttgtcccttctttgcatcgaaaacttggttcaattttgtctgttattaatgaatttgagatgaaatgattctgcagatagaggacatcgttcgtgcatcaaagagagcttgttacagatcgaaataaaatcgtcaacatcaacacatttcttctttgatctttaaagggaaaggaaaataagaaaaaaggagaaaaatgatctctctgtctctcacttttgctataagaaaccaccattcctcgtgatttatttcatcttttgctattattctttactgcagcggttttcgtttttctttttgtcccttcccaaattgataattctaatctttggggttaattgataaaaattgatcgagaatgctagtaaaggagttcacaacacctgtttttccatcaaataatgaatgaggtgtgcctaattcatgtctgatattcttttattctcgtattattatttttgaaaacggtattagtgagttaacctccaatgacgtttagcatatacttttggtgatataattgtaatttgatttaaacgctattgatcaacctatggataaaaaaggaaaaagctttggtgtggaaaaaaaatgttgatgaaaacgaatttaaacaagttccaatatttgaagcagcaatcaaaatgtttgaacatctattcacgacaatttttagcaacactcttatcacaagaccaatcttggaagcctcaaaatccatttcaaaaactatacaatttaaaagtaggattctaaagctacctgaattatgtttttacatcagagtcaaaatcacattttctatttgtgcactctattctgctacaaagaatttgaactccttcaaccattctctcttgaaacggaagcaatctcttattttgatgcactaatataactccaactcatttctcaatcatctttcctatctccggatcccaaaaacttctgatctgctcctgaaaagtaagtccatcgatagcccgagtgctggaggaggtttaagtccccatatgtactttctagaagaagccccacgagccccgtctttgtttgaaatctttctcattgatgtcccttccccagactttaatgatctcgataacccaaaagaagtctcagtctttgcaccaaatactgaggttttctttgatagatcttccaatgggtacccaactgcaccgtcctggtgaggaggcggaaacttctcactcttgctctttccatttgtttgtgatatcgatctccatctctgcaaacacacattagcaaggggcaatattacagaatcttctgcattggaacgaaaaaataccatgctagataattgacatgtatagctgatctataagcctatgcatatgcatgtattctcaataacttgatgcaagcagtgtgactaaaactagtgaatgcgttgaggaatatatatatatatatatgctcatatgaagattgtgtgtttatgtgcgtgtccatgagtataaatgggataagatgaggattttcttacatctaagtttgcttgactctcggcattagcttctggggctggaatagctcgcccagtgcgatcccctcgataccttattcttctagctccatcaataccactaccttttccagcaagacccttttgcctagaattacaatgaatgcagccacgagaagagaccgattacacatcagtctaattgatagcataagcatcaagaaaacacataaaagatgtaaaattaagtaccttcttaactcttcgtccctcagctttacattcagttctttggaaggtggatactttggtaaacttgaaggatcacaaggtaacggttcagtagtaaagaactgcacatgcaaaccaaataatatagcactttgatcaggaagtgcttttgcttgcataatatgtgatcacaaactaaccaaaaagaatgaaaaaactcaaaatttgaagtttcatacgtcaaacaattgaaagattggagggcaaggattactcacttcactattcaatgccgaggtagaagttcctcgatcagcagggtctatagtgagaagtgtctcaactagatgcacagaggatggagtgaaaccattgaaggcttcagccacacaacgtttgtacggatgttgcggcttaaaaagagttgcgtttggcagtctgtacttcttccagtacgaatctgaaggggagccacataatttgaatatcttatgaagttgttcgacctacaaagaacaaattaggtaggaaaaacagtaaacaacaatgttattaatttttggttgtacattcatttgtggtccaacatcatacagttggttttcaaagataaatcaccaagaagtattaattgctctctataatgcaagctcaaataacagggcctacacatttgtatcatctaatagaaactaaagattcctaagcagactaaataaaacaagataaagacgattttgtttacctcggttcttcccggcataacgggcttgccagcaagtaactcagccataatacaaccagcactccaaagatcaacaccagttccataactggtagctccaagaagaagctcgggaggacggtaccaaagtgtgacaacacgactagtcattgtttgcttttgctttgggtcataaaacgtagccaacccgaaatcagcaatcttcagtattccatcattatctataagaagattagaacctttgatatcccgatgtaatactcctcgactatggcaatgctccaatccagatagtagctgcttcataaagcatttaacctgaagaacaaaaacaataacacaccatttagaatgatctagatataattacgacaaaagatcaagcttattttttagacctcaacttttgtatattcatatacaagttgatatcattgttactgtactttccatactaaactaatatgtaattactcaacttaacagcaagtaaaaatatcaaatatgcagagataataaaagaaccaaatccaatgaacggcaattcataaaggatgttgaaaattcatcacaatcagaaaacataatgcaaattgggtccaccgacaaataattctagcaacaccaaaagcacaccagaaacaaaaccaatcagacgataacattaccatatgtgaccaaaacaaaagtaccctaaagaaaaaaatagaaaaacataacataataacagtgatttgttcttgaaaagaaacctgaaaaacattacaagaatttactaccaaacacattaacttcttccttatctgttccatgctaatttaataatcttctattgataaataatccactgtctatggtattaaaaacacaacacattagtcatacctgaggaagatcaaacttgagaccttgggtagcagcaagaccagaaagatcatgctccatatactcaaaaacaaggtagagactacaggaaacccgtgaagtaaccaaaccttgaagcttaataacattaggatgattaagccgtcgtaacacaagaatctctctagccataaatttaacactctcagcttccaaattatcaaacctaactttcttcaaagctacaatcttcccactcaataaatctttcgccttgtacacattgctatacgttccttgcccaatctataacaatcaaaaacattacttcattaaattaaaccaaacataaactaatcaaaacaaaacaaaacactttctaattataccaaacctagtaatgattattactttattaatgattagtgtttttgttacctaccttctcgagcttttcgtatgtggtagctctgcgaggtgttaagtctttgatcgaatcgccacaagcagcaataagccaaggtggccatccttccggcgtacggagactcatccccggacggcgagaagagccggcggagaagtcgccagtgtgccatgttcttctctccggctgaatctgaatcgaatctaaatctttcttcttcttctctccgatttcgacagaaatggcggcggtggtggttgaagaagaagaaggtaaatcctccgtattacggaggtctgccggaggaggttcatcgggattattgtgtttccgtttgtctccggtggattctttgcataaaacgcatcccatcggctaaatgattttgaatcggtgaagctttctctctttagcttaacattatcgccgaaagagctcaaaaattgatttttttctcttggagagagtgagaatcggattttgtgtaaaacgacggcgtttttgagtggagtcgagtcttttgcacgtaggagtgaaaaatggcggttttccgttactagtttattaagtaacgagtggtttcaccttacatttctctgtaacttaaaaaagctaaaggaattttggtatttattagaaaggcctgaagaaaagtggttaaaaaggttaaaaagccctttttgtcatctgtaaaaaatgaacccaaaagttgttatacttttttttctagttcaaattaattttgacttggtagtttctttatgcttttatattttcttttgtgttatgtaatagtatattttaatctcactaggcatttgtcaactaatttgaaaatcattattggtggaattaaaaataaaatctacagtatgttgtattttaccaataaaacatgta

SEQ ID NO: 874 - DNA, 68726 bp, Arabidopsis thaliana
aagctttggtacattctgatgtataagtcaatttaaaataatcgaattagaaccaaaccaaaaatacttgtagcatatagaaattttttatcaataagcacagattgatgttaaattatctccagtttaaaaaggtgaaattctacagtctaatgatattttttatagaaccttttttttttacatttatcccttttatctactacttatcccttccaataacactactcattccacttttaatttatcaatttgcaattaagaaaaataaaatcaaagagagtagaactcgctcaatgttttaccagtcaaacaggaattagtaaataaaatatttagtcaacctctttaattacattaaacaaatctcaccaaaaaaaaaagactttgaacacctgaaaattttacacctaggtgtacagtgtactaatttaaaacagggcatccaaatttctttggtacaaatattatattaaaaactcattaatttggtacacattatatcatcaatctatttcaaccaagacaatttaatgtaagacgacacgtggactaaaccaatccataattgaatgtagatatatatggtggtttctctataagtgtagattccttcctcattgcttcacactccacttcacttattaagttattaccaataatataatattacgggttttttctctctttttttgtccaataatattagacaattcgagaatttattgacaaatgatcccattaaaagcaacttcataatcaccaacgcggtccacactatatctttattatcatcatcaagtaatattccacaaaattttgattttatgcaaggaaagtcatacaacttttttgacggtggaacaacacgttgaaaatgtaagtctattctaaagactaattcaaattcaagttatcaaagagccaaaataaaaacaaaagtaaaaaactcaaagaccacgacgacgacaatgcttatgcacgttttgtcgaagagagaactttcttgagttcttcaaagacaatgatttacaatcacgtcagaaaactctcgagtaatgttaaatgcagaaagatgtaaatgaatgggtcaacattggaatttttgggtagttgagtttgaaaccaatttggacgttttggatttcttcttcactaaatgcaatgcctttaatggtccaacctctctctctcaagccttttaaaaaataatatttttcatgtgtgaaaaatgaagccaaaaaagttgttagaaaaaatgtcaaaagaaaatcattaactttcaaatttcagacgatcgaatcatgaattacgaggaacacaaataaatcgtaaagtattggttgactttaagtttagataacaagtttggttgaccaactaatttagacatgacgtttagtatactaacagaaaacctttaaagtgttaaattcccgttagttatctatgttatggctaaacggcataagtttactgtacactaaacaacatcgttttgtcaattgaaaagagacaaaatccccaaatcaaaactctattagcttttagtgagatttcaaaataagattacaacttaataacgattacttgcacttttgggaaaaagaattcggtacaaaatttcagaaaaagtatagtccaacctttctctctctcaatctctctgcacttgcacttgacagagtcacatatggtttagatttctcactaaccaaaaagactagagggtgttcaatctgaatttcagttcacttttacttcaactttagttcatttgtttttttgttaaagttttggatttgggattttttaaactatagttaccatagattaaaaaaaacctggtatagtatgaatggttttgtaagattttggttttgattcgagtttaatcttccgtcaaatatatcacgacatttatgtcaaagtgagtttatttatgtcaatgatctactagataagatctcatgtatggatatagcattgcatttaataatctttataaagtagtttcactcttatcagtaggcaagagcagaaacatagcacataagagttataaaccaaataaataacatatctagcgccaatgaggcttgagttgatagatcctaagcagaacagagcttttccagagccagattctcatcaccaccacttgattcaattgcactcctaacttgagcgtctccaaaacccatctccacaagtctcttgacctgcggacaaaacaatccatcactgatctttttattacacaaaccaaacactacattttactaaaaccattaaacccattttcaacaacttactttttcctctagagaagatttcttggcgaaagtttcagtccagtaacgagctgttgatacaaacacttgatagttcttcatgtactgtaaacatcagaggtaacggattgcttcaaaatgactaaggaaaagggggaaaaaacccgaagatgattaaggtgatgtagaagaagaacctgttcagctacaacagcatcttgagggtctttgggctcaggtgcagagagtaaagcctgaattgaaacaagagctgtcttcagagtaagagctggactccactggtctttcaagatatccaagcatattgcaccgctttggctactaatattcggatgcctttgattttgatcagatcaatcaacagaaataaactccttattagcgcacaatgcagtttcaaagatattgtcataaatggtaaaatgtctatcaagagaaagttaaagagaaccgtaaaacaacttcaacgaagattaaaacttttcaccatatatagagatcatcaaacaaatacacactaccaaaacattcatcccatgaaatagtagtacaaaacactgatttaagctccacgatagatatataaccagttcttatgttatgataaatactaggcttaagttgtttcacataaacaatctcgaaaactacagatacataataagtttgcagtgatgaacataagaatcagagtcatcatcttccttaccaaactttagttgaaaactgcatctttggaggctcaaatggatacccatctgcaatcgaaaaacacgcttaatcatgagcacaacacaacacgaatcgaaaacaccaataaaccctaaaaatcggaactttctacaccaattcacaatcagtcaagtggaactagaatacccacacatgtaatttcaaaacgccctaaccaatcaaagcaaaaacaagtaaagcccctaacttcaatcaacaccataatccccaaagtaaaaaagtagaagaatttggttagaacctggcatagtgatatcgatctgaaatgtaccgccttcgtaaggagtaccgattggaccaggaatggttccggtgagtcgggtgaggttatcggatttggggcagacccggatacccgaagaatcctggtttctctcgcagtcctgaagctctttctggattcgactgaaatctatcatcttttcgagatctccgattaaaaatctcccaaaccctaaaagaagaaacagattgaaactttattatgtgtatttggtgaatcaattcagcttcttttcttgcatcttaagacttaagggagttatccaacagtcacttcttcaatattcaattaaggcaaaaattaaagttgaaccgaaatcaaccaaagtctaggcccattataacgaagcccattttcaaccctatctatatattttgctttctcaatattattttccgttacgttggttttaaagtatggagaaggattcatgctcctagctttaatgctagtctcgtccgtccctgcacggctgcattcaacggttttttggagaaatatggctagttggctactatggtcatctcaccatcaacgttgttggcatacttacagatatccctcatggcatccttgaagcactcttctccactggaatcaatgtttatcactcccatgtgtattaatatcttatcatcctcatgccttgctattttatatagtaatggatgataaatatacacattctcaagtcttttagtttcccaggttccacagacatcatgtcgcttatgtctctggtggatttctaataatccacccccaactgatattttgggcatatgtgatccgatttggtacacgaagatcttatactaaggcttaacgacggctcaacgccggaataaacgaccaattaattgagatttaaagtctgtgatgttggcgacatgaccacatatacgtcgtatatgtggccatgcaatacataaacttgaggttgctgaatatcgtttatgatagtcgccatgtgtgactatgttttctgccacatttcgtgtagctggcgctcttttttccttttactaaacagccctagctcggccacataattggtctgatttggtaatttcatttgtcgaccttaattagtttgtggcgtttgattaaaaagataacatggtacgcttcaattctccttgtgagctagcttatactagttagttactttccatacaactaatcatatatattgctaatggtttgttctacactttctaatcgaatcgtctaacacgcgtaccacatgtaaatcgtatagagccacgtcttagttttttttgtttttggtctttctaatcaatttttatagatgtgtgaacttgaatcttgatatgaacaaagttgtgaacttgtgtgatacaatgaaaagttgaaaactgtaaagacaaacatcaaggagcgtaaggaatactgaaaggtgaaagcttaaacactctcatacgcgcttgcttactctacaccgttgactaatttttcacaatatacctgttttacccctgaagctaaacccacacacgcctaaaaggtaaaggataaatatggtatttaaatagaaaccgacaacaaaaagaagatgaccgtttgatagatccgcaaaactcaggcgtttcaaatcattcaatttccaaattaaatcgcaaatctaaaaaacaatattttctttccacttccaacgcttgaatccgattctctatcaaaatctccacttgcattattccaaagcaatttccaaaaaaaaccactaataagagagagttctctgattcttctctagttgcgtacaactgtagaaaaaccctaaaacagagaagggttttgatggcggcgaatcgtgtggcgatggaagaagatattactgaatctgtgactttaatggtggattccgtttcttcttctccgatgactccgaagactgtgacggttaaggaagatgaaactcatcatccttatgcgtttcatgtttccggtccgagaaatgttgcttctcctaattggagagatctcatcaactccagttggtaacggctctgtttttttttcttttcctaatgacatttagtttctaattttgggtttcttcgttggtctttgagacataaacttgattatcgagaatgggcattgcagcaaaaccctgtttatgttcttggatctgacaggatcgaaagattgattttttgtttaggttaatctgttgtttagttatattgtcttaattacagagatctattccttttagcttaatctgttatttagttatagtgtcttaatctttctagtatgaaatgttaattggtcttaacaagttttaacctttgggttgattttctgatatatatataggaaggatcctaactacaagagaacagtaatggcctgttttattcaagcagcttacttgcttgaactcgacagacaagagaatcgaaacgagcaaaacgctctcgcaccaaaatggtggattccattcaagtacaagttatcacaaacgctcattgacgagagagatggatcaatatttggtgctgttcttgaatgggacagagcagctgcaatggcagatttggttgtcatcagaccaagtggggcaccaaaagcagtacttgcgctgcgaggaacgatactaaagagtcttacaatgagacgtgacatagaagatgatctccgatttttagcttgggagagccttaaaggttctgtgaggtttaatgttgctctagaggcgttgcaatcagtagcaacgagatatgggagcagtaatgtctgtgtagtggggcattcgttaggagctggttttgctttacaagttggtaaatccttggctaaagaagggttatttgtagatgctcatttgttcaatccaccttctatatctgtcgctatgagcttgagaaacatcagtgagaaagctggtgttgcttggaaaagactcatgtcaatgcttcctcccaaacacgagcctctgatacagaatagtaacgaaggtcaggtttctcctagcaatgtttcatcagggttcaggaactgggtaccgagtttctacgggtcgaatcagaaacctactgtggatttaagaaaatgggtgcctcatctatatgtgaacgatagcgactatatttgttgccactacactgaccaggatggagtagcagagaagagggaaatgaacaacaaagagaacaatagccctgttgtaaacactaattttcaagcagcagcaaagcttttcgtgatgtcgaaagggaaacagaagtttcacgaggcgcacgggttagaacaatggtggtctgataacctagagcttcaatcagctattcacagcagcaggttgatcagtcagcaactcaagtcattatacagtatcaagtaaaacatcatgatggtaacaaatccatctccatcgttcaataaacacatttgttttctttctttatgtctaagaacactttttcatgaaatgtaacaacataaatgtaagaaagatcagtagtgactgatgtgcaacattttgtagagaaaaaaaatgaagataaatttttctaagaatctcgaatccatagagagggatgtgttgtgtccctaccattgaagcgttattaagagcaaatgttattacaaaaacagtcgttagagaggaaccaacgggaacagatccatgtgcagatttgagattggtgattcactaattgaattgtgccaaagaacttaacggctgtaacaatcatttggggccaccaataaacaaaaaaaatgccatgtgctttcgaccaacattatcatcagacagaacataccatcacaatccaactcatattaagcaacaaaaacagtttcatatcgcagacactgcactgttccttgattaagataaaatcaatcaagcacttgagagaggatcaggttcttgaagttacgaggacaagaaaaaaagttggaatgatcaaatcaaactctgatatgattagctcaccaagcaaattttttaaaaaaagatgattacaaactctacaaagacattattcttgtctacagactaatcagcaattactctccctaacttcaatcagccaagctttatgaacaatcaaatcatcaatcaacatgaaacgaaaaaacaagaatcgtcgttcggaaaatatatgattcttcttacatacaggttaaaaacgtatcctgcgcagtctcttatggccttgtaaagacgccccaaatcttactccgggaaagattctccgccagtttcttagctccttcggtatccatatccacaagcttttgcaaatgcaagcaagcaccagcagctacgacttgtttcctgcatttctttgaagttacaagcagttccaacgccgagactgtgtaccgcttatccaatttcttaatcttcgggtccaagagctgaactagactgactacacccttgtcactcttcttgaaaatctttctgttactcgtgcacaccaaaagcgtcgatagagctttagaagctgcttctttctcttcaatggctttaccatctaacatatcaatcaatggaacgatacatccactttcacccatttcttttcggcttttcgagctgaaacctagcgaggaaacagcttccgcagctgcaattctcacaccgagaaccccacaactcaaaaccggaaccaaacgagggataaacccttcggatataacaacttctctcacaataggacacaacgctaagttcttcagaagcacaactccaacctcaagactcttaacactagaaacagaatcccaaaaactcttcaaacactgaatccctccttctctaacaacagatatcatcaaatcctcatcaccactcgttaaattagccaaacaaccaacagcattctcttgagccaaagaagtacctgaagaaaccatactaataagcacgaaaatcgcgttttcctcaacgaaattctctttagtctctccaaacaaagctaagttcctcaacacaccagcagcaaaagcctgagaaccaggactcccaccttgacatatctccaacaaagacgagattccacctctacaaccaatagctctcgcgttctccttagacaaactcaaagcttgcaaagcaacacaagctttctctttagcaaaaccacttcctgactccaatacacgaaggagatgattcaatagagacaatccttcagctattaacacgtgtttactactctcaaccatagagattctagaaatcacagcaacagtcttctccttcatcactaaagaacacgaatcaagtaacctaactaaaacaggaacaactccttgagctacacaaatcatcacgttcttatcatcttcctgaagtaattcaatcaacgaatcaatcgctgaattcttcgattcaacaccaccgatctgtaatctaatcactagattcctcgcttctaatctaacagcttccttcttcgacgaaatcgaaaatccagaaacgacgattccgttatcaatcagaagaccactcttaatcaaaacctcagcatctttcacatgacgatcgagtctcgccatgactgaatcaacctcactctgcgttttaagcttaccttcagctaaatctggtccttcacacctcgccgcaacggcaacggcgtcgtttagcgtctcgcgaactgaaactagaagatctacggcgagtttgtttgaagaagagccggcgaaatcggagaaatcggagagctgagttttgagatcggcgagtttggcgcgaattgatgaccatttacacttgaagctaagaaggttgggtatagagtcgataagagaggtgataacctccgttaaactccggtcaccatcgtcggaattaggtaccgtcatcggaattagggtttgactgagagataggagagagaagggagagaggtgtgaattaatgtgggaagtgtgaatactgctttgcttttgtgtttgccagttgggaaaatgcgaaatacagggagggaaatgagagtagacgcgcttttaaagcgcgtgagtttcactgttgtttaggactaaacttcgtcaactccaatgatcagaatcttcatgcatgttacgtggacaaaccaatatcagtgtttattttttaatcattagaaagtgattagtactttttttaatttgtgactttttatttgggggctaatatttggactttttataggaatataataagggttgattttggtgtacgattatctttttcatttgcgcgttaagtgtttgtatattgtcattttgtagtgacaactaatttgcttagcaatgaagtgtcttttagacgatttttaggcaagtggtactagtttaatggaaagttgttagattatgcgtttatgagtgtttcactattttaagggtataataaaacatgctaaatctttttctttttttttttcttttgacattctgaggataattttctaatcatataacaagaagatgaatgttgtctgattgtatcaagattggcaagtttcgggccactccccaaagattttccttctttagtagatccgtcagtggtgtaaaagacttgatagtaaatgttataagaaaacgttttaataatgtaaagtcaaaaagctaaattaaaagctaagggttagtatgaattaaccaatgactgaacccagcttagattttaaaagtatgtgcatgcaacttggagtatattttataatctgaagtcgatcctaacattcaaattatacatgggtatcaatacattgctaaaatagaaaaaatgataaaaagtttttactaaaactacaaattctgcttgaacaattagggttcataaccaatgctgctgatgtactaaataatataataactctaaatctctaatttgatatctaattgttccccactatgatatcaatttaatacactccgtatgaaaacaaatatgaatatatatagtttatagcagcacgggtgtgactactagtattttcattcattatagtttcgaactataacatttcttcataacttctttagtaaattacattttggtttattttgggtgtgacggagtttttagtaaattacaagatcaatattgacgaaatgacttgccaatctaaaacgaagaaggctaatgcataattaagaatcgaaataacttggaataaaaaacaaatgtgcccatcatcgaaaatggattgatctaaaatgaaaaaaaaaaacgaaaaagaagaagatgattacaccgacgatgcttgatacaatcatacaacattcatcttgttatcgattcagtgtgtgtacggcaactagcctactgcaaacgcagcgaatgttctccatataaaaccagtgaaattttggtgttaaaattaggtttacgaaatcaagtttttaatgaatcgtttaccatttccatagaatatttgttaaaatcgatccgttgttataacaaagagtcaaagactatcggtaaaatatataagagtagctactagctagttaaggtttgtttggtactcaattcttatgggcctataagtaaactgaaatattagtctttgttgctcattgttgttaatgggctttctaaagtgtgtgcttggtctactttcttgataacccaactgataaagactgaacctgcttctaaaccagtaacaatagttggtcgactagtatactgatagaaaataataattttaagcttaaatatgacctagtatcagtgtttcttcaacttcaaaacttttgatgatgttattttggttaataaggttgtattttctagaactactacgtcattatatatctatacgtatttacattttcatcgtcctatagagtttacttgttcacttaccattcactactttgagagggatagaagaatggcaatttcaacagccatcttggctagctactatctttatagtttttgtaatggaagaatgattcatgtacacgtggaaatgaagttaggtacatgaaaacaaacaaagaaaaagagtgtaatagaagagatgggactagacatagacatgaaaatctctggacgactaacggccggactgctcatttaatcatgccttcgaattgttgctttttttttttttttggctgtattagttgtgtaataatgtacaacattttttctcacctaggcgtgttatcaaattgaatcgtggacccttcggttaacttaccaatcgttctcgcataaaacgtgtcatcagatatttagggtttgattttgataggtttgatgatgcgaagaatcgaaacgcacagttaaagttataagaggtatactttgaaataaacatatgaggtgaaatgatgtgcataagatttacgaaatgtgttgtccattgattcaggatgaaaccgttagcagatacaattatgtgccacgagaaacttagcatttcctttgttattgtattttatgattgatcaatttgccgtataataacttgggaccaaattcatatgcattttcgattaaaaaaaaaaaaaaaaatcgtattcatgacgaaacaattgcaagaaaatgatgacccaattcatctagcaacatatcatatttataataataaaaaagggaaaaagtgaaaattttgaaccatagtccaataacaaatcttagaagagatgatatcaattaaattttacttatttaactaaaatctcaaattgttgaattgtgaagagtaatctcacaaatcatatacatcctgacatatacatcaagaaatgaaaatcatacaaaaaaatctctattctaggttcgttaataaaagaggttattaatatgtatgtaactgaataacgataatatacataaggctcttgcatataatttatttaggtgtattcaaataaatcctgcaatttaggattgaataactcaaggaatcgttaattaccacctcatgaaaatgttagacaaccaacaaatcatatttacaaatacaacagtatcaaatatctctttcaagaattttggtatatatatattagacatactctaaactaaaataaaacttataacatatgtattgtgaaaggacagatacagaggaatgggagttatcaatgtgtgacaagtgagagcagaaaagcatgaccaaactattcaacaggtacattaaagtgttctcaggaagggaaatctaatcttttcttctgacataattttgtagccaactaaattgacaggaaacgaatcatttagatttatatacatgcataagtagttatccctcgaacatttttatatatataggaaatataacatgagtgtgtggataacagtttacatttaaaaagattggaggaaaaaggaaactttggtgcaagaaatcagaaagacagaagtggtgaaaatacaagaacttataaaattaatgagtggatacatcaaaattcaattatattaaaaaaaacaatgattaagctgataggtcttcttagtttatatgtctttctttcctccatcgaatttgcctctgcctcatataccattctcttttagtatgaatttatccattgattttatgtaatgattatgttgaaactctcgggacaaatagagaaaatgagctttttaagtctctaaaatactttatttcttcaaactatataaacggaacaaataagtacatccacttttacaaaacctggtttacgtagattttattccctccgtgcaaatgggaggagattaaatcaacctacatccaataaacgatagcaataattacgaacccacatcaagatttttaacaatttctatatgagaaatgttaaaaataattgtaatgataataattaggtagttgaagagacaagaccagaagaaactcacgaaagcaggcttttgtgtttgtgtcgacatgtaattttatcaagggaaagaacagaagttgttgttgttgaacccacttctgtctacaaagttctctctttcttctccctcttcctaaattaagcaacacatcactatctattaatcttccaataattgattcttatctatcttcattctccttattataattattatctgaaataatcacttatagaaaaaaatgaaaaacctgaacttgtgcatgtgtgggaactacagaattatccaatagtgaaggaaagataggagtagttgttggcattgcattggtaaaagacgttcctacttctggagaacccatctgtccatcaagaaaatatctacttaagatccataaccggcttttcgggatacatgacttggttttatcggtaaccggattaagagacattgtgtaaatgaaatacctcagattgaagtatgaggccatcaaggtcggagccaaagtcatagaccaccggacttatagaagttagcttcattgagagaaactaatgaaacagaaaaaaaagttatgaattagaaacattagttttaacataaaatgttacaagaaaaaacaaaataattaagaaaatgcacctcaacttgagtctgcaaggtctggacataatttataatctcatccaacatgagggccttccctgttacctattcgttttcaagtcacatttaatcaattaataacattttctagaaacattataaaattaaaccattatcaattctcctaaataaaattgtctctactctagctgaccttatcacagcccggaacaaggttttgcagagtcctcatccgctcacttatcttttcccttctcacctttacatatatatatatataagtttaatcaaatattaatcaaaatgtattttatgaaaacatgattaatgaagaaaaattaaaatgttaagagaaatgactaaaataccctctcagcaaggctgtggctatcagtagcttggcctcttctagctcgaacgtgaatgtaatctgttggaggctcttctttgcttcctctcttctgttttttgctttttcttccctctactccttcctaattcaccaaaccacaccaacatttatgtttttgactatcccaaccccatcacataaatgatagatgatacattacaagttggtttaacataccttggagttattactgtttctggccttcctcccacgggtttttccggtgttggtgatggctgatggtccgtggctgagctggtcgcaggaagaagaaccggtggttgctgttttggttgtgttggccagtttctctgaaccagagttttcagttttgtcaacattatattcaagaaaggaaatgtcttcaactgtggaaatgtttggtagtggatagagatggttttgatcgatgaaactagtgagattaatggaggagtgaggtgtagggaagagaagaggatcaagaagggaatgagggtagttttggaaataagagaaagttgccattttaagagtagaagcttctgagttctcttatctttgtcgatagagatagtgttttttctttgtgagagaagattaaggacttgaagtggtttatataaggaattgcttttgtattcactattcaaagaaacaaggagaaacagaagaaagagtattttagggaccacttgtatattgaagatacctttttatttgagaagaaattactaccatatttcggcgggtaatttatgttagatgatatgtttatatataatatcgagattgtatatttaagtaattgcattgagtaaccatggaagagtaaaaatgaaaatttaagtaaataatgttgaatttcaaaaattaggtgactaatgatctttcatcattcttagatacgtatgttctctttttttttttttttcaaatgcaaactcatggaatatttgtctatttattttgtttagttttattactctatgggtatcatgatattttagaaaatttgtttcaaattactttatgtaagaacttataattttaaattttgttgtaatttgtattctccatagttttatgttatttagagaataaattatgttttgaaatataagattataaatactacataatttgtaatacaaccatgttgtaaaactaaacaagacaaatactgatcaatatatcatttaattaagactttttttataagaatataatagcgcataacgtgaaaacaataaatgtactataaaaagaagtaatcaactaaacccattaaatgaacgaaagaacgaccaacgtgggcagtcgaactcgaggaaaatgttctctaaaaccaattgatgtatttgtattgaccatcaactacactcacgtaagcattcaatattgtcgccctaacaacgaactatatttagaaatgccctaaagctatggcttgttttactttataagagggtcggacctataatacacatatcaaaaaagttaatgtacaccaaaagagcaatatttatcatttatcaatcaattttactttatcagattgcagaacctttgccacagctaatatatagatcaatatataggcacagtttaacgagtcagatataattaaagactagatagtagagagatatattaccctatccaaaatactgtacatttagaactaaatatgtaatgccgcgtgatcttctcaataataatctctatgtggataccataatactacaaacttttgtccatttttgttagagaaaataaaaacttttgtccatttcccactttggatcgacataggaaatttccttttcagaaaaggacaaaagaaaaaaaattgtgaataaggtgtgaagtccaatcccatgataccgttgggtatgcatagaagacaaaaaatcataaatctccattttgttttgatataatcgggtactcttatagtaataatcgaaaaaacgagtacttgaccatcaaaatttatcacaatccatgtccttaattatttagactattataattcctttcttctatttataaattattattatgacacgtacttaacaaaaacattaagcgaatctacgattaattaattatcaattgtatacgtacgaatacgatctatggactttctattatgattttctttttgagatcaagtttagagcagaaagaaaacatgctaattaggaaccaagaaaacattatgattgttcttttggacataatttacatgtcaaaggtccgcatgagcttgtaattaattatcataacccgaagatgatagagattatgcacgtttcatccggatgaggaataaacatttattggcatcatattttcttcaccaatatctctcttttgcttcttttcaaatcagggtacttgcacaaaacctttattctttatctaacgcatttaattagcggctgatctattatttgtactgtgttttgaatattcaagatcacatttaaagaaaagaataagtgcacgagactaattacgaaaggatgatatgaaaatgaatcttgaattacgagatagattaggtacattacttcactctaagaaattgactcaaagttttcttctaccatcctatatcccaaaacattacttacaaatgcaaagaaacaacttccattttacggcgttttctggccgataagtctagtgaattatgtgacgattgtaagatatatgaagtaagttaggttgatctcataactgttatagatctctattaatcacttcgtttatttagcttaatctcattatatttgttattcaaatatgttgcatctctatatgttttcttctctattatcaaaacagttttatgtccttctaccatattatttccattttgtttagtgaagtattgattttctctactaagaagaatacaaataaatcaacctggcaatagactaattaacgtacggttacgtctacgaaatagatattcatagaagtctctatccgcatgatacgagagataaccttttactcacatatcatcgcctacaatgcaataaaatagtaacaaagagaaaaaaattctaattaaaaattgatgagttttgtgatggtacgactctccttttgttttttatctattcaatttacgaatctatgcaaaatctccgaagatttaatagtacctgtgcaaactggcactagctatgttccaatatgtgacatcgctttcttctacactaataccaaattcaacatgaaacgttttatcttaatcctatgttatatcaatttcagtgttccttattatatttaaaggaactcaaagatattacgtcaaaatgtaattagattattataagtttttatatggttttacaaggtttgtaaagtcttatatacagactataaagtgatttttttgaaaagcttttctcttaatagtagttttgaaaagcagtatcatatttttcaaaattcctattgtttattcacggataacctaatgatgtgtagattaggttaaaaatgtggacaatatgaagaacattcaaagaattagttcatgtgagcttttgttggtttaggatttggtagtagctagtcggttccatatgcttttattggttttcttcaattctcttacttcttcacgtcatatatttgaccttgttatgtttgattgattccatgtgtattatcctacactttagtttattttttgggttatgaaatcctaaactcttttgacgtcgaaccccaacataaaaactcctctttgcatgggcaccaaagacaagtccttaaaaagcatggaagaaaaagaagctacacaatgtcatctatacattacatttttcatatatttagaaaatgtatattaagaaagcccccatgtatctcaattcataaccttctcttgccataattcatttaagggccaaagcaaaagaagagagaaacgcacgcactttgctttttttatttaagcaacagggagagaatcttcctgctcctccaaggaagtagttggagtgccacttccaccatttagcaccgtgacgttaccttcagcgtcaacgtccacaatcaccgagtctccttctttgatctctctcgcaagcatcttctctgccatactatcctctaaaagcctcatgatggctcttctcaacggtcttgctccatagctcgggttataaccttcgtctactactctctctttgaatctttcggtcacctgaagctcaatctctttcttcttcaacctctcgaacacttccttcaacagtatgtcagcaatttctttcacttccagctttgttagctgtctgaacacaatcatctcgtctagcctgtttaggaactcgggtctgaagtattgtttcagctcctctgttacaaggctcttgattctgttgtaactgctgtctttctcgtcgtagtctaagtcgaatccgatacgtcttcctcctttctcaatcacgctgcttccgacgtttgatgtcatgatgagaagtgtgtttttgaagtcaactgttcttcctttgctgtctgttaatctaccatcttcaaggatttgaagcatcatgttgaaaacatctggatgggctttttcaatctcatcgaatagaacgacggtgtaagggcgacgtctaaccgcttctgttaactgacctccttcggtgtatccgacatatccaggaggtgaaccgatgagtttggagacagtgtgcctctccatgaactcactcatatctagacgaatcatggcttcttcggaaccgaagtagtaagctgctaaagctttggcaagctcagatttcccaacaccggttggacccgagaatatgaaactagcgattggacggttaggattcttgagtccaacacgtgcacggcgaatggctcggcttatggctttcacagcttcgtcttggcctatgatacgtttgtggagggtttcttccatcttgaggagacggtcagactcatcggttgatactttctcaacaggaataccagtccatgaagacacaatgtgttggatgtctgactccgtgaccatagggccttcctcaccggtctcactctctgctttgctcatctccttgcctttcgcttggattgcagatacctcagctctgagttcaatttctctatcccgaagtgtcccagcctgaaatgaaagttacgtctcataagacatcttattgtcccccaaattgacaaaaaaaaatgaaaggaatatatacaatccgtatgtaccttctcaaagtcctggccacggacagcttcattcttctcctttgttatctgcctaagctccttctcaagctccctagcttcctcagggacctgcataaacgagcaagttcaacaatgatcaaaaaatgaaaatggtaactgacataaacctggtatatgactccaccacacctgtgcatgacgaagtcgaacccgagaaccagcttcatcaatcaagtcaattgccttgtcaggaaggaaacgatcactggaatcaaaggacaatcaggtgtaagtaacatttatgacacccttacttaaactattaacaagtaatctgagagatcagccaccttatatactggtatgacaactgtgcagctgctactaaagattcgtctgtgtaacgaagcttgtggtgaatttcatatcgctctcgcagacccttaaggatctgaatagtttcatccacggtaggttcaggtactttcactggctggaatcttctttccaaggcagggtctttctcaatgtgctttcggtattcatctaatgttgtcgctccaatgcactgtcaggattattaacaaaatagttaaattatcgagaataaattacacaaaggtgcagagcattgtcatgtaaaacggatcaaaaagaacaattacctgcaattcacctctagcgagagctggttttaaaatgttagctgcgtcaattgcaccttctgctgctccagccccaatcaaagtatgcacttcgtcgataaataagattatctcatcgctctgtctaatttcctccataagctttttcaatctctcttcaaactctccacgatattttgttccagcaactagaagacccatgtcgagtgttataacctgaaagtatataagaggtaaaggcaagaaccatcagatcattgtagcactacccagaataatcatgagaaattagttgtgacctgagtctgaactgttaagtacgttgttcatactattatagttacaaaaacaaatcagtatggataatgtctcacaaaacaagtgtcagaaggttaatatacacaaaccagaatgcacatagagcagcatattattcagtggatacattctctacataaattcttcgttcattctcaacacatgcagtcttatcatgttgatttgactcttttggcatggaaataattacaactaatccagtaaattggaatccgtgactcatgaaatgtgtgcctacatgtaatgaacaagtatgaagtgcatagaaaatttgaagtcaacgagataagactgaaactcatacccatatctataaccattgattgattcaattgcaaattgttaaaacgactgaaaaacagagaggcattgtgcttaccttcttcccttcaatagtttcagggacatcgccactggcaatacgctgtgcaagtccttcagcaatagctgtcttaccaacaccaggttctccaataagacaagggttgttcttggttctcctgccaagaatttgcaccacacgttctatctgcggctgccttccaacaactgggtccaatttaccctaaggtcaaaagaaaagatcatgattaagtctcaattgatcttatctcttcaagggaatctcatatggtcaggtcaacaaataactacctcctcagccagtttcgtcaagtttgttccgtactcttcaagagttggcatcttattgctgctgcttcctcccccaacattagcagttacttcattgttctcacccaccatgcgtatcacctagccatccaattcaattaagtttagacatttttaacaaaatattcaaaaatatacaaaaaattgaaaatatcagtttaccacatgagatgactactttacctgagtgcgaatattactaggatctgcacctaaattctcaaggactcgagctgcaactccttcaccttcacgtagcaacccaagcaaaaggtgctcggatccaatgtaattgtgacctgatattcacacaagtgattagaataggtacatatgctaagctcatgccaaaaagaagcagggaagctggacaaaaaacaagttgaggaaggtattaaagtgtaaataaaatattttacgccccacactgcactaagtcaggataacaatacttaattatacacaatcaacacagtggataatacacttcacaatcaatcaacaacgagatttcagatacagaagcaaaagacttgctacagagaagggagttaccaagttggcgagcttcctcaagagagagttcaagaacacgcttggcacgaggagtgaatgggatctcaacagcaacaaagccacttccccttccaataatcttctcaacctccacacgtgcatcttttaagttaatccccatggatttcaaaactttagcagcgattccagtaccctcaccaataagaccaagaagaatttgttcggttcccacaaaattgtggcctagtcttctagcttcctcctgagcaagcataataactttgatagctttctccgtaaatctttcaaacattgctttcaccgtaaaccggctagctttccccttgggcacattcattgcctgtcgcaccttcgaatgaaaatcttgacgactttttccaagagtgtctaaagcattgttaccacgtaatcccataaacccttgcattcttaaaccagacacttgtaactgactacacatcattttcaccgatcttctcgatcttccagatccacgtgaaggaacattcctctggtaacaagctaaagacggtggagtcgattgagccaacacccttgtggccatagccatgacttcctaaataaattcaacaagaaaacaacgagttagtaaacaaaccatatcactgaacttcaagaaacagttgtacacataaaaacagattcgatttacacaagtaagctcggaaagttgaatttcacttagctcagatcaatggaagctataaaatcagctcataatgaagataagagaaatcgaaccaaaacactaacataaatcagcaaatggaattgacttttttacaaaaaactccatctccatcaaaattcacgatctggagcttactaaatcgtacaaattcgaactataccacacaaactagtaaacataaaaccctagctttgaacaaatacgaagccataagctacaagaacaaacaacagaaaccaacgaagaatccgaatacagagattaagtgaagaaactctcaccgagttcgattgaagcgtaacagagaatgaaatggagaaaacacgaatcgaagaagaaaagagagagagagagatgaaaaaaaaaaacagatggataatggtgtgtgcttattttttcaccctcccttatctctctctctatctatctccggtctgattctttattttttttctttatacggtaagggtctataacacttgttcggtgcaccatcgtgcacgctagcaatacttccaaactctagctaagaaaatatcacgtggtaaaccgacctacttaccaactcaattttacgtaatctaacggccggtttagaccaaccgacccacaaacgaacagtaaattcaatagtttatcagaaaaaatcattaaacttctccatttgattgttttttaatttaagtagcaaatacaatatgtatcattcaaatcacttaaaattttaaacttgggttctctctttgtcggtttagagaattaaaccaattttgtaatagccacaaaagaagaagaactacggtaaggatcttgacaacctcaccaccgtccgttttagaggctctaagatcgtgacacgtgacatttcatgattggttaggcagttaatgactattctaccctgaggattttcttctctcgctagtcgctatgtatctggaccgggggctcaatagtcaattacgttgatgttagaggttccgtgtacgagaccattttctcgaatttttatttttgattactttttacttctggcggacgaatctttttagttaagtctagacgttgccacttatgttacttgcacctcttatttgagagtgtgacatggtttatgttcaacctcttattttatgggaattatcttctgtttatagaccaaaatacaaacacttaaacgttataaaagtaagaaatttccaacttagctacggactttgaagactgtaagggggcttttaatcctagagagcaatgatgtgtcaatatcatgtgtgaatgattgtattgctaaaacaaaattcctaacttttttcttcttatcctttgttgattagttgcatgaatacaaatcttggcttaaaatcgcatgtccagtttgataaaccgcctttgtaaaatccttttaaactgcaaaagtatagtgcaaaggtgggaaaaaaccgaaaacaatgtctgcatattccggttaacgaaatccggaatctcaaagaaacaaagacaacaagtcagaaaattttgtgagacaacagtcctaaacttgagaaacagaggatgacaaacctaaacaaaagctaacaaaatcttttttgatgaatataatctataaacaaaactatatagaaaatgaggctagaaatatcttgtcgcattaagacatgtacttttcataataaagaaagaaagaaactatattgaagttgtgtagtgatgtctatccatattgcatctatcccatatttcccaccctatacatacatattatttgaagtaatagtgatgtcttagtataaaagttttgatataaactatatgattttttcgttttttgttaatagaaataaattaaattgataggtaatgaaattgtcgacgaacctacacggctacacctacgtagtccaagatcaaccttttatcatggcttaccaacaagatactttagatttatagtggttattggaccagaagacagcattagaaaaacttttagtttttcctaaacacctctttgagaattgaaaatcatatagcaaaaagcttgtactgttatggataactgataaggaacatatttaatcaagaatcaaaacgactttccatgttgatatatagaacttcataaacatgtttaacatttcttacgccaaacgaaacgctaaatatttatttaaattgctagcctggtaggcgcgtaatagagagtgctatgtttccttaaatcaaaggtataactatgcaattagctttcttttatgcatcctccttgtctatctcaaacatagctagaatcttgaaaagttttgataaggatcttgccattgactttgttaacacaaaaaaatcatcagcaaaacatagatgttgttgccggcaacgaggatggtaatcgataaagccacaggtgtatgatgatcgaggaagctggacctaacatcggtaacaagcaaaaagtaggtatggctatagtgaagtccgtgccgctgacctctaaatgttatatttatctcttccactgaatttttgtttcattgttacattactcaaccatagcttaagaatacttgtgggtggagatgcatatttattttagttctccaacttagcaaaatgctaataatgtatatcattctccatataaacgctgcgttttggacatggaggggatacttaaaacgctgcgttttacactttgttttcccgcgtatatttctccctttattatcggatagcccaacaatcacacaggcgaagaaacctagctattgcttcgccatggacgtcggaggagaagacataagcgatctccaggtagaccaaatcgttgaagaatattctatggacgatctcattagagaccgattcagactctccgcgatctctatcgccgaagccgagggttagactctctccctccctctcttcccatttcaatcgattctcaaaatttctggtataatcaacgggtttatgaatacattcgatgaagcttcgtctgtatttcgatttgattttggaatttgtgttgatttgattaaggatattgaatcgttgattcaattgtccttcgtatttggcttccgattagtttcttctggtgaacgatgaaattagcttaaatgttttcattgagattcttggagctcgaattagatttggggattttcaatttctagaactgatgaatcaacatagtaacgaagctgcttgaagtgttagttctacagtgttgaaatttagattcttcctggaattaagtaatagatggagaagagttggattttgattgatttgagttttttattgagcagcgaagaaaaatggaatggaaataggtggacctgttgtggcatgtgtggcagatttagccttcaaatatgcaggtgagatcagttttctatgcattgaaatactaattctgcaactccttcatcttatggtttgaagaaccttattatagttaaaagaaccttatttattgctactatttacttggatgtttaacctaggctttaggggaatacagatttgtcaatatgctttggaagtaatcttttggttagaagaatcctggtctagttaattttacattaatgaaatgtgcagtgttagttttataagttctaaatcaattcagtaaaacttttcagtccctttgaatcttaatctagcttcagggtaatacagattagtcaatgcattggaagaatgttttttggtttttgataaaaaaattatcagtagtgaagaagagtatctattcttaggcctttatgtggtacttagcttaaagaaacacagatatagcaatttaaagacgcaggatcgaaacgaatgttctttacgtatctggtgtagaggatgaaattttcttgagcatggtgtgtgctcatgttgagtaggattattttggttgatgtttgtatggtaaactgtttgtagaagcttcaattcatagtggagttgactcaaccaaaatctaaaccttatttttagtgttttcgtctccagaatacctttgtctgaaattatgcttatttgttatgagtaacagaaaacgttgcaaaggatcttgaactattcgctcatcatgctggacgcaaagttgtgaacatggacgatgttgttctctccggtattaaactgtttctctcttacacgttcatgttagtgttttcttagttctgaatttcatatctgttattttgcaattttcagcgcatagaaacgataacttagcagcatctttgaggtcactatgcaatgagctaaaggcaaaggagccacaatctgagaggaaacgcaagaaaggatcagccaagaaagaagacaaagccagtagtagcaatgccgttcgcatcacgaccgatctgtaactcttcaagcagagtgtaaatacacgcactcctctatatatatatataaacattaactttgatggagaagctgttattaaatttttgtggaaaattttatatagaagacttttgcattaacctacttactttaacgtttaaatgactatatccaatcagaaaattaaaaaatatgcgtatatatctcattatcttgaagttgcgtatataaaatatcgagaatctatctctatattctctgtaggttaacatatatctcttagggatttgtgatttgttttctgtgttatataccacgtataagcaaagatattgtaagctaggtctgatagccgggttagataacaatgtcacaatctgactcttctccgacgaagaaacagaagctggaggatggtttaggtatatatctggatccttttgtttattacacattgaagattatgtaagagggatctcgatttgttctaagggtaatgtatcaaagaaattctgagtgttttatgttgtaggtaaaggaaaatctcagaacgagattggtgctgtagggattcgagaagagaaagataatattgaagttgagaatgctaaggtaaatctgttttattgaaggtctaaaaccatcgatcctttacaggatacagagatgtgatcggaattaaagtctttgtcttgtttttggttggtgtctttctatgtccttttgtgtgaatgtctctcaatgtaatttttcattgttaatgtagaataaaagtccacactacgatccttgtgaaagtgaaagcggtgcgccgagtttcttagtttctcgattgcttcacttccttgactctcctgattatgaagttaagaatgataaggtaatgatccttttacaggatacagagttgtgatcccttgcattgcatttgaagtctatcttgtttttggtacatttctatgtcctttgtgtaaattgtctagaatttcatttttgtagcatgcacattacgacccttatggttatggtggttctcgttttggaactggatccgatctctcagattacatccttaaatctccaacttacagccctacctctcctagttacagccctacctctcctagttacaggcctaactcttctagtgacagccctgactctcatagttacaggtctaactctcctagttacagccctacctctcctagtcacagccatacctctcctccttacagccctaactctccttacaggcctacctctcctagttacatccctactttttctggttaccgccataactctcctgcttaaagtcctacctctcctagttacagccctacttctcctagtttcagccctgtctctcctgatcacagccttgtctctcctcaatactcccctacctctactcaccacagccctatcttgagctctcctcctgaagattatggttatggtcctgacgacattgaagctggaaaaatgaaaactgatcaactcaaggaaattggggatggaagtagccatgtggatggtagaaattaccacaaggctgagaccactcgcacaattcatgtctcatgtccaaaggtctggttttacatttttgactcttgtttcagtatcagctactgaaatttactatgcaggtggatctactggttggtgctgcggcgactttacggtttcttcagcacaacctttgtgctcaaatccgtattttgaaggattcagaggttgatttgaagtctgcacaaagaccagtggaattaactggaactgttttacagatagagtttactcagcagcttatcgagtctgttttagcagaggttggttattaattagctcaatttcttcttcatttttactactctcaactattctgttatttttttttttaatttttggtctgaaagaaatttggttacaataatttcaggagaatcatgatgaaacccatggaagaggaaagtaagaaatcatcttctcagaaagattgtggagctcttactaagtaagtccccatgcccagtctgaacatcccacgtgtgatagctgcaacctctccaaggatatgaagtttttcatgtgttgaaatgtattgaatttttttattttctggttaaaaaaatgtattgaattttttatttgcaagtttgatcaaatttatattaaacctctcatacttttaataggcattccggagattactttcggtaattaaacaagccatatgtaggattttatcaatgttagacaatcagtttgctaatttgacatatgtagacaatcagttcacaggtcaattagataacgccatatgagtcttttcccactccaaaatctcttaacaatattagcatttttagtttattatggatcttttcacaaggacgtcacacatatggagctctttaaaaaatcaccgttggaagtggtcttatctaaggataaagattccaaaaagatgtctagtacactgagaaaggagaaagaaaatatacatcataacatggctctatagaagtatagttacatgtgtctatctgtcatctatatttgtttttctatttgaattattgtgtagtgaaataactatggttttgctaattgtggtcgacgttgtatttgtgcatgctaagacgaaaacataattattcgctcttttgaaacagcattactgtgtttcgggttacgcacatgcatgtgttgttgccctttgatttgtactatcatcgcttagccgcttacgatgatagcttatgctttatattttagtaaatatttcataaaaaataggttttcttttcctatgaattgtaatgttatcctgttaacgtttgtgaatatttctcaaattaaaattgtcacgtcttcgtatcggctttttactttatgttcatgttggtgtagacgttggccttctgacggttcatgaaattgttaagcatgtaatgtgactttttaaattgctttcagaaagaaaaataaaaattaaagacttgaagcatgctatatttcacgctataataattgaggtcccgatagtcatgtgaggtctatcctaatacccttatagtagaaagagccttttttaaaaagttttcaaaaaatattataatctgatttgggcaatactttgcattacatatggatgaactaataagagagaaggtttttaattagtagacttttgtcacttcaattctaatcatgaaaaaacttacaacatattttcattctttaatatagtttacaatctaggattggttagaaagaaacaactgagagaagtcaccaccggatgcttttggctagtggtttatcatgttgttctcgtagttgaaaccttggtgagagctagggatgcacattacgtcatatcataaagtattagcaaaggctataataccgagccatgggaggaacactgcctcggccgggccctctcctagttaacaagaaaagaaaaaaacctaaggaaatctgagttgggtcttaatttcctaggttgtcaagtagaatctgacaaatgtacaaaacagagggtacgtgatcgtttaggataagggaagacaaagtaaatggactgaatacacctgaaaatgttagacaattaaatattgaatagacttgaaaattacaagtcgttacaaaggcttcacaaatttgcgatgtatcaatctttttatttattttaataattggaataaaggaaaactattgaatggaagataaatagttcatacagctatatgattatgatcattatgatggcaggacacggaaggcaaaagagatacaatcagtttcacaacaataaatcacgtgtaaaattttatagattctgaaagggacaaagggttacgtaacccatcttctttaaggtggcaagtagcatcaaattcattggttggcaagcattttgtttatgcacgtgtggataaggttttaaatgataacattgacgtggcctattatggttggttaatatctaatgttatgtggaagaagaatttactcaaaatgaatcttgtcctagttattgcagaggtatagaaacaactaccgaatgtgtttaatgatggtctccaggtaatgaatcttccgccttggaacgatttcctgtcaatatgaattttgaaaggacttcaaattacgaatctttggagcagttgcaatagcatgatagagacagtcctgtgagcttggataaccaaagttgagctggacagtctcttaactgctcccaagagagattagtgtttgaagattcaaagaaactctccttaggtcaagaaagattagtgttagaagatttacgtggtggcaatagttactgtttaaggtgttgaaattacgtttttatatatataaaaagcaaattaccccgcgtattgggatattgagggcatatatttaattaatctgtttcataagaaaactaaagacacattttaaaaaaaaattaaagaaccatcataagaaaatataattaaggaaacaccataagtggaaatgacttgtgaggttttgtagagagactgagtagactttagaactgtagttgttacaagaagttgtttccaaccaacaaaggtgtttttgggtttgtgtatacttgtgttaaagtttttcgttcttttttgatcaaaaaaagacttgtgttgagggtttttttttttttttttgataagtttaacgttgtaatgttgcttaaaaaattatactagtaaactttggagttggggtgcactaaagttctgttatatctgaaagtatctctgcatgggttttacatacatctatatagaattgccatgattgtttttgtagtgatatttatattagctaggcctatattttctttcttgttcctatagatgcaatacgtaaatattatagaaatgtttttagaacaagtagtaagacatttcaatcagttcacacaaaatgattgaatgaaaaaataataatataaacagctatctgattgtgattgcaagatattgggggcagacaattaagagagtacaatcagttccacaacaataaatcacatgcaaacaagcttttatagatttttatagacccacacttcttctcaggtggctctacacattcatacgtgtagataagagtttgaataataagttgaagtggttaattctgattggttgatatttaaatctcgaagaataattttattacttaaaaaaaaaaaaatgaaacttgtctcttcagtttcatcactagcctcgtgctccaccattagacaaagacattttagaactccgaaaatgtcaataaaatggatgatgattatgagaaaaacttacacgtttaataggcccgaagttgctatctagcagttgtagccatggccgctttgacaatgcagtttgaaggagagaagaaaaacgtatccgaagttgcagacgtaaccctcaagcaagaagatgaacaacaagaacgtagatcttattcgacgccgtttagggaagagagagacacctttggcccgatccaagttccttccgataagttcggaatcagatctttacgatatatatcgttctgatctcgagggaaaatattctcacatttttatttgttgttctgtgtcagattatggggagcacagacgcagagatcgcttcagaacttcgagattggtggtgaccgcgagcgaatgcccgaaccaatcgtccgagcttttggtgtcttgaagaaatgtgctgccaaggtttttgcagtaaagtctcttatgtaaattatcctttttttttttttttaggttcgtgattttacgatgatgttttaggttaacatggagtatggtcttgatccaatgattggggaagccataatggaagctgcacaagaagtagcagaaggaaagctcaatgatcatttccctcttgttgtatggcaaactggtagtgggacgcagagtaatatgaatgctaatgaggtaccttatatgcatggagatacattttgtacaatcctacacaagtgctaccagtggtggatcccaaaatatttcaatcggaggaacaatatttcatcgtcctaatacatatcttggttatctgaaaaacgatgcatctattattagaaacatagaaaaaaaggtttcataacttcatttttttaaccgtgctactgttttaattttattgctttgaatgttaaaagagatctatacaaaagagactgaataaaaaaaaaatgaccattaaaaattaattaagtatttaattttccttttctaaaactattttatttgattttaagacccataactttgatctagttttcggtaaaaaagactatgggtttggcctggaacttctagttaattaaaaacgagcaaaaatatacagtaatgaaataatgttttttttgtgtgtgttaatataacgaaataatattgcatattggtggggcatcatatgatggtagtagggatcaaacaacacaatcaaggcattttggcttaagagttaagactaattacaatgtcaaaaatgattttttagatacttaaccaccagacgtccgaggtaattaaacagatcattttgtgctttttacaggtcattgccaatagagcagctgagattcttggtcacaaacgtggtgaaaaaattgtgcacccaaatgaccatgtgaacagatcacaatcttctaatgacacttttccaactgtaagctttagtttgcattctcattagtcattaccaataattttgcatgcttaacgttcattcaattgcttacggtgttcgtgtaaccgattgcttttatttcctatatgtatgctcactgctctgtcaagtactacttgacggtcgtataattttggttttgtataggtcatgcacattgcagctgcaaccgagattacttcgaggctaatccctagtttgaaaaatttgcatagctctttggaatctaaggtgactcatttgatgtagtcactaaattgcaatattttaagatgatacttgctctgacctaaatggtgtcagggaacactcttgacctcagttcaatgtggtactatttatatttgggagttgctttgtaaatgttgcaattttacatttaaggaacatcttctgacctttgacgtcattttgttatttaatccaaaattcatatactctattttctctgcagtcttaacattttaaatttatctcatcttattcggttttggacagtccttcgagtttaaagatatagtgaaaatcggaagaactcatactcaagatgctacacctttgacattaggacaagaatttggtggctatgctactcaagtaaattatttgttctgttttctatccttatataacaaaagtgaaaattacatgtcattaagaaataacttataaatttttggatttcatgattgtaggttgagtatggacttaatagagtcgcatgtactctaccccgcatctatcaggtttggaaatgatatctcttgaggatctgatttcatattattctcaaagtttcattgagctctgacttgttagaaatgtttgtctagcttgcacaaggtggaactgctgttgggaccggattaaacactaagaaagggtatatctcgtttctagttttatatccattccgatttcatcctactggtaacactagtactatatgcataggtttgatgtaaagatcgctgctgcagtagctgaagaaacaaacttgccattcgtcaccgcagaaaacaagtttgaagctctggttagcctctaaataactttcatcatcatcaatgtccaaatttagtcttagcgtcttccactgggttctaaatcaaacaagatgcttctgaatggttgatgtatatgaaataagttgttgagttattacgcctttgtaggctgcacacgatgcttgtgttgaaacaagtggatctcttaacacaatcgccacatcattgatgaagattgccaatgatatacgttttcttggaaggtacgttatctaatattttttaatctttcttcaagatgtacatgttcttatgataatttaacatgtctttatatatactttatatagtggtccaagatgtattcttatgatattttaacatgtctttatatatactttatatagtggtccaagatgtggtcttggtgaactttctctgcctgagaatgaaccaggaagcagtattatgcctgtatgaatgcaattttttcctatggttcttatgtcctttccctctgcggctctgcctataccttttatttttcatagattttgattcaattgaattttaatctatctctcagggaaaggtaaatcctacacagtgtgaggccttgactatggtttgtgctcaagtaagttccattcaccaatacatattttactaacatatgaatttaaattgctaaggtagtcttgttcatgactcttttggttgcatcaaacaaaattgtaggttatgggaaaccatgtagccgtgacaattggtgggtcgaatggtcattttgaattgaatgtattcaagccggttatcgcaagcgctctcttacatgtacattaatctctttacttgtgatttttttgtcatttatactctattaaaatttaatcttaactatttgatctcatgtctttactagtccattagactaatagcagatgcttcagcttcatttgagaaaaactgtgttagaggcattgaggccaacagagaaaggatctcaaagctattgcacgaggtaggcttcttctcgttgattggccttaaaattattcatgtgtggaaatgatttatatataggaactaagtctttgttttatgtatttctctctagtctcttatgcttgtgacatcattgaatcctgtaagtctctaaatattaaacttctttgtcaagtcatccatattctcattatgattacaaatgaatttacctcaatgctaattcctcctttaccagaaaattggctatgacaatgctgcagcagtagccaaaagagctcacaaagaaggatgcacattaaaggtaaacaataaactattaacgttttcatcactaaataaatcggaatttaaacccatttttagcaagagaaaacatgttcatgtttgttacaatatatttgttgttctattttggatttaaaccttctccagtgaaaattatataatacaatacctttgagatccctaaatctttgctttaatttattctatagcacgcagctatgaagttaggtgttcttacttcggaagagtttgatactcttgttgttcccgagaagatgattggtccatctgattaagtactttataatggagccaaaagcttcaaatacaaagtggatgtttgggggcttttgcatcaagttgtgtttattcttttgtaataaattgctgcatgcatgtatgcttgtgttcaaaattttggatttgttttagagtcatgtgattatagtattctaagtaatttatcataaagtttgtcatatatacttaagtttaataaaaaataaatgtgtgtgaaaatgtcacatattggtgtttttgttataaaatgtcaaatattctaagtacatgtcaaatacttaagtcatgtataacatgttttctattatttatatttatgtccaccaataaagcacttatatatcaaaaacagattgggattaaatgatagactttgatttatatgagacttttgcgacattttatcaaaatatgagaatagacaaacaatatcatcacgacatgaattggtcgataaggcccatgaaggtccagtaatcttaatgggctttatacagataaattataccgaccaaatcgattatatacgcgccgtcgtcttctcaaccatcgcatattcgccgccataagcagagagtttcacatataaacgaaaaattcccttcgagaagtctcaagtcgacgatatggagaacggagacattccagaggacgctaacgagcgtaagcaaaatcaatccttttttcagttttcttgtagcttcaatcgctcttctttcttggtttaacctaattgggttttgttctttggttgcttgttaatagattgcccaggtcctcaatcagaatctgctggaaaatcagattcttgtgctggctgccctaatcaggaagcttgtgctactgctcctaaaggacctgacccaggttcgatttcactttaattactttgtggctaggtttttgaatgtctctgctttcgattcatacttaggattacaatttaaaacttggttttgttgttgttgcaatttctagttttgaagatgggttttgtatcaatgggttagatgagctttgtatcttctatttacatcatacatgttcgattgcttctgtgccattttgttatttgaaactctagaaatagctctatctggagtcttccttttacttgctccatattgttctgttgagagtaacaccatgtgataattaaaagattggttttttttaatgctaatgtctgatttaagcgccagatgtgtttgagtcgcagactcacttggttactagttgaagttatgctgacgttctctgttttatgtagatttggttgccatagcagagaggatgagcactgttaagcacaagattctggttttgtctggcaaaggtggagttggtaagagtactttctcagctcagctctcgtttgcccttgcgggcatggatcatcaagtaggtctgatggacattgatatatgcggtccaagcatcccaaaaatgttaggacttgaagggcaagagattcaccagagtaaccttggatggtctccggtttatgtggaagacaaccttggtgtcatgtccataggtttcatgctccctaactctgatgaagctgtgatctggagagggccacgcaagaatggtctcatcaagcagttcttaaaagacgtctactggggagagattgattaccttgttgttgatgccccaccaggaacctcagatgaacacatctccatcgtccagtaccttctacccacggggatcgacggtgccatcattgtcacgacaccgcaggaagtctccttgattgatgtcagaaaagaagtgagcttttgcaagaaagttggagtcccggtgctaggagtagtagagaacatgagtggtttatctcaaccgttgaaggatgtcaagttcatgaagctggcgacagagaccggctcctccattaacgtgactgaagacgtaatcgcttgcttaagaaaaaacgcaccagagcttctcgacatcgtggcttgtagcgaagtgtttgacagcagcggaggcggtgcagaaagaatgtgtcgggaaatgggagtaccgtttcttgggaaagttcctatggatccacaactttgcaaagcagctgaacaaggtaagtcatgctttgaggataacaagtgtttaataagcgcacctgcgcttaaaagcatcatacagaaagtcgttccttcaacagtgatgaccgagtgaagaataagaagaagaagaagaaacttatgtaacactttggtcagatcagtgaacagacgatgaattttcacataaaggagagctttctctttcgtttctcgggtttgtggttaagttataggctgtttgtgtaagttataggcattgtttcacatgtcgaataagatttttataatgagattgaaccataatgtcttttcaatttagatgaatcaaactgatgttaaaccggaataaccgatacaagactaaaccaggtttatatatattcttaatatccgagaacataaagatgtatcaagtattaattaagagaattagtccactctaaacataggctacttcatttactttattttcatctctttttcttgttttcattctttttcaagtcaattgctaccaatgggagcttgtatctcccacgtgagagagtctctgtaacaaaaacaaaaaaaaatagcacaatttttgtcgaaataaaagagacgatcagatcccattttgtcgttggcaaaagaaccaatccacccacaagtgttggaattagaaatgagcgagctttgtacgaatcctaagaaacccaaactcaaagaagaagatgaagaagaagaagctaatgtctcttgcagagaagagcaagaagaagttcttgttgctttagtagagcaccgttctaatgaaattgagcgtctcaacaatcacatatctaattaccaaaccaaggtctctctctctctcttcaaagttttgatttttctctgtttctattttgcttttcttgatttattcaaagtgcaatgatttgaatgattggtgggtttttttcagcttattgaagcagagagaagtttgcagaattcaaaagctaagctagctcaacttcgtggagttgcagttccatctatcagtggtgcaaagaaagatcataaaccattgaagactttgagaaatgtgaatgtgagtgaagactatgcatctccatcacctagcaagactctaaggccctctgatagctctgatcatcctagaagtagttgtggtagtagtgtctccaaggctaagactgttgttgtgaagcaaaaatctgaaacatctcgtgatagtcctaatgttaaagatagagggatcaagaggaaatttggtaaccaattttgagcattagttttcttgtatgtattcgagaatcttattagttttgagttgttttgttgtgtattgttactgcagagcaaaaagagcataaagagttgattcggttgatagcgagaaactcttcaccaactacaatcaagtgtcatactagtaaccaaatctctagtcagcataagaggaaattaagaagcttgatattgtgtcctgtaaatgagcagttgtttgcaacaaggtactggactacaagactctttagtctgttgttgggtttaaaatgggtaatggaatctaatatctgtctttgtgtttttcatgtatcattagttctttggatggcatggttagtttatggcaactgcagcctggaaggtgagttttttcccattatagttattctcttgtctctgtggattgtttatagatgtacctgcttgtttgttttcatagcaagtttgttataaacagacttcttctgttgatgttagtttggactagtctcttattggagatgatattaagtactaggaagctgacggtgtttgataaaaatgatgactttaggttacttgttttagattctttggtttagggcctcaaatttggaaagaatcatttacattgacgtatgtaactcaaacccagtcctttggtttaacagaattgaaagaggaaacactaatgacttagtatctttgctcagtttgtttttgtttatggtatagtattattctttttgttgtctataatattactacaccaaacaaggattaaacaaacggaagaagcttgttaaaagtacgagtatatttaataaccagaacacatggaacactttttagatatctagctaaatcaagacagggattcaaattcaatggtcctatcacaataaggaagaaacattataaacctcttagagccaaattagctcatagatatttattgtgtctttccatttgttgtgatttcttatatttttgtgtggtctatttaatttcagattggttgcatcattgcttagtactaccgactgtttatctcgaaaacaaagaagatgggcagaagatatggcgtggcacccatctgggaacactcttttctctgtgtacactgcagacgatggggattctcagatatcgatcctaaatctgaacaagacacgcgaggtaaatgttactgcaccacatttagtacatgaagtttctgagaacaaagacaaagacaacacaacacactagttttttgcttttggaaagtatctcaaactaggtactttttgtttgtgttggtgaaggttactttcctggaaaataaacctcacgtaaaagggattatcaacaacataaagttcatgccttgggaaaatacatgctttgtcacagggggaagtgatcacgctgttgtactatggaacgagagtgatgatgaagaaaacaaatggaagtcgaaacctttacacagaaatctacattcagctgctgtaatgggagtggatgggatgaaaaacaagaatgttattttatcagtaggagcagacaagagaatatacggatttgatgttcaagttggtagagcagactacaagcatcaaatagactataaatgcatgagcgtcctcgctaatccttgtgacttcaatcttttcatggttcaatccgggtaagaagaacttatcaaatatggtttccattctttgcttgcggatttactaaagaagaatcccgacattgtaatgtcagggaacccgagaaacagcttcgactgtttgatatcaggttaagaaaaaccgaactccattcgtttgggtggaagcaagacagcagtgaatcacaatcagctctaataaaccagtcttggtctcctgatggtttatacatcacctctggctcagttgatccggtgatccatgtttttgacatcaggtaactctttcacagcatcaatggctctctgtttacacactatgtaagaagtgaaaattggattgtgattgtattgttgtttcacttgtgggtaggtacaatgctcgtaagccgacacaatcaataaaagcgcatcagaaacgagtgtttaaagcggaatggcattactctcaaccacttctcatctccatatcttctgatctcaacattggtctgcacaagatctcatgaaacttttgaagctctcacatgtctttgttcctcatttcttattatctgaggatacaggttcaggtggcgaatatttatcagccatcataccaattcttagttttaggtataaacatcattcccatgtattaaactctcaatttttataaaggattcgttaattaacattactgcagaaagaaagaacaaacacctaagattattataaaaaaaaactcaaccttttggccggaaaaaaaaacagaggaaaatctcaaagttctgtcttttactctcgtcattcgtcaatttgcggattttgttctcaccctcaatttgagatgcagagaatctccattaatgtctccggaatcagaagattctgcatcacctctctttcgtcatcttccgcttcaaacctcaccggtaaaaatttcatctttgtatctaaatcagacatttctctggattcatgttacttagggtttttacttttttggtctggggtttatctaattatcatcaatctccagttttattgtttacatagctttttgggtttgattcgtctttgaagttgttctctttttgaaaattggggctcttgggttgttttgtcactctataatgattcatgctttcttatgtagatcatgggatgttgaaacaagttcttgaatcatgcaaagctccttcaaattctaaatgtgttcttcaagcacatgctcagatctttaaacttgggtacggaacatatccatctcttcttgtctccacagttgcagcttacagacgctgcaaccgttcatatcttgctcgacggcttcttctttggttcctctctttgtctcctggtgtctgtaacataaacctaatcattgagagtcttatgaaaattggagagtctggtttggccaagaaggtacttcgtaatgcgagtgatcagaatgtgatcacctggaacttgatgattggtggttatgttagaaatgtccagtatgaagaagctctgaaagctcttaagaatatgcttagttttactgatattaaaccgaataagttcagttttgcttcctctttagctgcttgtgcccgtcttggagatctgcaccatgcgaagtgggtgcactctctgatgattgatagtgggattgagcttaatgcaatattgtcttctgcacttgttgatgtgtatgcaaagtgtggagatataggaacttcgagggaggttttctatagtgttaaacggaacgatgtgtcgatttggaacgcgatgatcacgggttttgctactcatgggctagccacagaagcaatcagagtgttttcagagatggaagcggaacatgtttcaccagattctataacattcctcgggcttttaacaacgtgtagccattgcggtttgcttgaagaagggaaagagtactttggtctaatgagtcgccgcttttctatacagccaaagttagagcactatggtgctatggttgatctgctaggccgagcaggaagagtaaaagaagcgtacgagttgatcgaatcaatgccgatagagccagatgtagtgatatggaggtctcttcttagttcctctagaacttataagaatcctgagctaggagaaatcgcgatacagaatctttcaaaagcaaagagcggagactatgtgttgctttcgaacatatatagctccacgaagaaatgggagagcgctcaaaaggtcagagagttgatgagtaaggaaggaatccgtaaagcgaaaggaaagagttggttggaatttggagggatgatacatcggtttaaggcaggagatacatctcatatagaaacaaaagctatatacaaagtattagaaggtttgatacagaaaactaagtctcaaggatttgtgtctgacacggatttggtgttgatggatgtttctgaagaagagaaagaagagaacttaaattatcacagcgaaaagctcgcgttggcgtatgtgatattgaagagtagtccaggaacagaaattagaattcagaagaatatacggatgtgtagtgattgccacaactggataaaagcagtgtcgaagttgttgaatagagtgattataatgcgggatcggatacggtttcataggtttgaagatgggttgtgttcttgcagagattattggtaaatgagttatgctacaaaagctctctatctacattctttgttctcaaactcgccaaaggaacgatgaagaaactgaatattacaggaactttttagctgagttttggtccagtgaactttcagttttgatggtgcactgcattgtgttcaagcacgatgctgactgaactatcttaaagtgttgggaaattgtttgggaatcttaaagttttagggactaaattggaataaaagtgtagtaaacttggtgatttactattttgtcctactcaagtgacagccatgggtgtcagataggagggtataagggtaaaaatgaaaactgttagaattaggataaaaatatccgacctgccggaatcgaaccagcgacctaaagattttctgttgcaaacaactacagtcttccgctctaccaactgagctaaggtcggatttacaatctaatcaactttttaacattataaacctttcttagtattttgcaagaattctttaatcagctcatcaacctcttcttaagaaaaaattctactattaattttttttttttttgtaattctataaaattcagcttcataataatatgcaaaagctgatattttattcacaagccatatgaagaaaacacattgatgaaagtctcaattttattcttgattttaacaacatcacaggttgtacccatccccttctctgttttcaagctatgatttataatattttggctctcttattatatcattgacaaattaatttgttctagcatacttcattaccctcccggctccaagctaggtgacttgatcatgtagcgttggtgctccacacgagcttgatatcttctctcttacttctcggttttggcctttggaggagaagcacaaaaccttctctaccatttgtctttctcttctaaattggttccactataaaacccattctttataatttatttcttttgttgattaactaatgtaacattttttttaaaaaaggaccatgaccatcaagatggatgtataattctcaagatcacaaatacaaagcttatgttgaagaaccacgaaaacctagaaagttcatagatccatatatatatatattaaagtttcatttcccatcagcaaaaccctgattgaccagtcttgttcaaaaagacatgagaaaacttgagagaagaacaaaaaaaaaacataaatgaatgaaaaggtattatcgtaaactatgtaataatagaccaaaaatctcctcattttctttcgcatcttgcaagtactggaaccttactggatttgcaccaaacttggaacataagaacacataagtagacacaacctttggattttctaagatccacttctctgtagtatccattctctccgagaatgtaagttttgtagttcttacacgtttctatgtctaattcactaaccattgctactttcttcttctcgtcgacgaggaagaaactcaaatcttcaaaccaatagctgttaggcaatgtcatatcaacttttaagaacttgctccacaacactatattgagctcaatcttagttgtaatccatattcccatctcatacgcatcagacttctgaaataacactgcaagctgctcttctctaacagtagatagaagtacagtatcctcatgacaacagtgaaatggaagaggaagactcggtccaaatctttcacatgtaaaatcaaaagaaagtaaaaatgcttcctctttcaatatgtcatgagcaataaagtaaacattacccttcaaggacacacgctgattatctattatatggtcttggtcggtattgacatcaataaccgtccacgcatcagacttaaaatcgtagatttcatactcacggtacatagacgaaaaccataagattttgtggttgttgttgctgtcgtatcccatataaaatctgccagctggtctatgattaaacctgccagctggtctatgcttatgcgagttgtttctaggttggatccacctggtttgacccaagtaagggttccaaaccatgagcttcgagttatccttagggttgcataacaacaataataataagccatcacaatgaaacacactatctatttcgacttgattaagtttacctatttgctttatagatggatctgccaagtctttgtgattatggagattgacgctcattaaacaagcctttaaatcacatatcatgatcacctgaatctccttggcttctttaccataatggttttttgtaaagctcgaatctttggataaatcattccattgtttacaagttaatttcactgctttcaaagatgttattggaaccctagagagtatctcttctaccaaatccgggaaaagatcagacatcgtcgacattttttcaaatagagattagggttttctactttcacgcttgcccacactacttttttttttgtttatatatacagtaaaaaaaaattgtgaagaaaaataaatacttacgtataggtgtatagccttttaaccaaaataaaaggacgtgatttacattttttttttttttgaaatatttcagtaaaattgttgctactaaattagtttttctgtaagacatttcaagtaggtaaagtagggcgcttaggctggctgaaaacagataaaggattgcgttagcctaacttggtctgttcatcgcgacgaggaagagcagcggcaaaattttctagaattgattcagcttgcttccaattccgtatctactagattctttcaacattgagtttctttcattaggtcagctcaaagcataaaggtgttcttcatataaaagacattaaaccagatagtaaaccataaacttaggtaacattaaatcagaatataagacttctaatactcgtatttcccattctatcatgtgcttgtgacctctataacattctcaatgagagaagcatccatgtgaacttgagaagcatgaaactgaaatcacaatgaacttctggtggtcatggtaatatgacccataacgttcattaccacttaagcaaacgatcttaaaaaatctctaaattcgtttgattatataataagactaattaatcttgtttgatatgatcataaagcgtcttaacatcatcgcatcaatgtttgtttgtctatgatttttcagacaatttagaaaataataaaaaaaaaataaaaatggaaatctgacgtggcgagtgagagggcttgtgaggagcacactcttccacatctttttcccactcttccttcttatcactttcctcttctctcttctcctctgatcccaccacacttttgaactttcactcaatggcgatgcagcttcctccgacgacactttacgccggaagatcctccgtggtcttacctccgacgactccaaccctccagagatcatctttcttgccttattactcgatgaggctactcggaaacaagaagtctctttccaaatcctctgctcctagattctccatgcgtgtctcctctaagcaagcctatatttgccgtgattgcgggtctctttcaatcttgatctctctttctctcttcttggttacctctaacatacaaagtttgtttatttatcttcttctctttgattttgcaggtatatttacaatgatagaactccatttgacaagttacctgataactatttctgtccaggtatcgtgattcatgtttaaagaatcaacaagttgtagctatcactagttgggactgtgtttggtttcaaatgggtttaaggttttgttttcagtgtgtgctgctcctaaacggcggtttagagcttacatgcctgatgtgagcaagaatgtcaacgacaaagatgtgagaaaggctagaaaagctgagctccaaagagacgaagccgtcgggtaaaatgatcctcctttctcatcaatctcacatatttgtcactttgtttcttatagttatcttatggtaatcatgcaggaaggctctacctataggaattgcagttggggttttagctctcgcagctctttacttctatgtcaatagcacctcatgaatgcagtatcaagagagactacactctgcttttggaatcatttttttgttctgtataaacattcatcttcgacttgttgaccactactgtaatgaagtaaagtattgagctttctatgtaccaaaactatattgaaagtggctgagatgagatgaataaagaggctaagtgtgatacagagaagatcagacaatagaaaagggggtgcaaattggctagtcttgcaagatgagggacccttggattggtttatcgatagaagattgataaaggatgttcaaagcagacaagttttcgttgatgctcgatgatgtcgctggcttgaactcgtacggaccttcctttggtccccaaacctgccatgtcccaataccaaaacccatttcagatgagcttttttgagaatttgttggtagtaacatctttaaacaatccaataagtgtaaggaagttgggatgtacctggtttcgattctcatcaaagccgcgatcccagaggtgtatctcattgtttttcagaactgcaagatctgaagtacaatagctagccccgttctgcaatccaagaaagaaacgtcaagtgttttcgtgtggaagcagaagagtgtaaaacaaataaactgtgatttttcttataagaacattacccatgaatttggaaatccaccaggtgaagttgagccttcgtacaagcaacgtttcccacggtcacaacaattcaggtgtatagtcgtcaaatgctctccaatgtcctattagtttgatcattgttagcttgatttccagtaaccagacatctctctatcgatacaaaaccttaagacttacaccaataacttcttcaggaagtgggcgttggtccttaggccggtcacagaaatttttgtattcctcagcatctctgatcgcatatgaacttacctgaaataacactgcgtcaaactctcgtgcattagaatacataagaagatctcaacaactcaaactcacctcaacatcacattttagctcttttggacacggtttcaccatatataatctctgcgaccaaaatcagcccaagatgcataagacttcagcaacacaataatacagtttcctaactaaatcaaccatgagggaatgattacatacttgtcgaaacggtttctgaggagtcctccaaaatgcctgaagaaaaaagagaatatcttgtcttaaacatgaagaaagaacacatttatacatcaatcaccataacacaacaaagaagtaaaatatgggtcacctgttcgagatacaaaacctctgaaccatccaccatttcagcagctggacaactcagcattctgcacaaccatttcaaactcagaatgctagaaacaaactagagatagagatataacagtttcaatcttgaaacaacttcaaaatggagcatcatggtctaaattccactaaagagcatcataagtttgagataaaagaacatcacaaaaccttatgttgaagtaattatcaggatctcttgacgcttgctccctcgtaaacttcaaaacccaatgtaaacaaacttctcaattcataaaaaaaaatcagaatttcatagttctgagtagaggaaaccaaaagtgtaagcattgagattgtgggtttaaaaaccttctctccggtgagagaacgagagacgacacgggcgtgatctctacgagtggtggatttagtgagacgcttgatgagaagagcaccgccaattaaaaccagagtcttgacaactagaccacgagcacggctccacccgtttgagctcgattctggatccgaacccgactcggtacccattaaaaggtttcgaatttagttcaaagattccatctttagtatctctacttgtttctcaggagcagaaaattttgccgattagagaaagaggaagaggaggaggagtaaggttgtgacgatcgacgttttcgcctcgccgaaccagtggtgagattgtttgccacgtgtaatcgttttttaattcttttagtggattgaaaatgaaaattgttattcttctaatttttatttaaatttcttaaaacaattggtaataaaaacgaaatattaataaaaattatttagaaataattataaattgagatgatttgagtaaatttgaatttatttttgttatgagattgtgagtacaaaaataacaatttttttgtattttgtttggaattaaattgcgcaatttaactgtataattttttttccaaccaaagaattttggatattaaatgtctagataaaatataaatgagaaattttttgagatatattttctcagttaaaagaaaaaaaagttaatgacaattatatcactacgaacatattgataaaccaaaaaaaatgatcaagaagaaaaataaattatattcatagagaaatggtttcttcatatcgattcttgtaaatatagcaatcaactaaaaaactaacttcaatataaactcttgtagaacaccaaacaagtcttatccaatcttttccttagaaactgatctcacgtctctcggcgaagaactttccggtgatagcttgatcaggaagcaatgcaagccagactccagtgtcagctccatcttctgctgaaacgttccctgcatagcctgtcattgcggttttcacccaaccgggacaaaaacagtttgcatatatcttctctccctctggtctctcggatagttctttagctagtactcttgtgtatgcgttcaccgccattttggagacagagtagtctgtgaaggaatgtggccaacctccagattcccatgttccttcttccacttgtttcaaaaactctgatactgttttgtcaacgatttcttcagttagagagtccacatccataagcttggctctcacgtcttcattctcaagtttctgttgaagagaactaggtcaaaattcgttgctgccataatttttaaggaagatgaatcgagttagagagatatatagatatatgtacactgtgtcggccttttaatctaccgagccttgaagtgacattgacaatacgagctccttgacaagcatgtctcattagtggaatcatggcgttgattatgttcttggtgccatagtagttggtagatataaccatatgcgagaattcaacagagttatctgatccaacattgtagtttactcctgcattattaatctgcatgacaaaaatatttcacatcataactcatcaagagaaaagcctttagtatcaaagtctttcaaatgaaaagctcatttggttatgtgaattaatgaacaaaaggaaccaaacttactaaaacatcaataaatccatatttttctttaatccattcgcaaaactcttggattgaggaagagtccaagatatcgaggcggtggaaatcaacattgaatccaccttcttgaaggatcttggcggcttcgacgcctacattctcgtctcttgatgttagaataactgttagtccatgtccagccaattgtctcaccatctcaaatcctattcctctattcgcacctgttaccaccgccacggtttcagaggtccaccacctaaacaatcccccattcaagaaataaaaaccaatatgacacttagttatcagcaagacaacaaaaaaaaaagatcgaatgaatctcatatataagaaaccaaaaacttatttaaacgtccaacaaaattgttttcagtttgagatatcgatggaacacagaatttcataattgcatctcgtggacgataagcttgtaccaagtaaactagtttatatgttttgactagacctaaatgtaattcttcctactgagtaagggatatatacaaacatttattataatcaaaatttcatagatatgaagacataaaaatttagaatgggaatattgatacctctggtgatcagaatagggaatagtacgaaggagggagatctcttggagtctcttatctcgtttctctttcgatttttctttgcttcctaccatctttcttcttattttctctcttctacgatcctaagtatgtttattttcacgataagaggaggcaagaaagaacacagagcttcgtcgtcgttctcatctccctctcacataattttctcatcctttttgtgggtcaaaaggtgcaatcccccactttctgcgtaatttttttgtggcctctcatttcaaattcatctgattcctatttttagttatagcatctgttatgggaacataaattagctggggcctagctagggtgtgggctctcaatacgaaccaaagttttgttcattctgttttagttcctattaataattcgaccatttcttaacaaaaaaaaataataattcgaccatttggttttgtggcggtttaaaattgagaaaacaatcttatttaagagtctctcgtgttacacactctcactacgaatctatgatccacatgaccacatgcatgtcacgttgcatcctctcacattttgataaaatttatttgggacattttcggtatatagctcaaggctcacaatctctcatataacagctaagataacgttcttattctggtttagatatatataatgaagaaattaattagtttcaatgtgtcatatccacaattattctaatttttcttatttattatatatttaattctaatatctttttttgccaaacactattaattccatatactaattatttttatcaactaaactttttttaattgtggtatatttatttttggtatattattttttataggtaaaattatgttatatttattatttttatcaaaagtaaataaatatattttgaatagataagataagatattttttctttcacatatttttgggattaatattagattaaaatatagttaaaatcgagtaagtttggttaaattctggataaatagaaaatattgtctatttactgatcgattcaattagaaacatagttttaagaataaatccaaaaatacatataattttattagttgcaattagtcaaccctaaaaacaattgacaaaaaacaattaaactaaatatcctactacagtttttaactctggcataatattgaatcaacaatcaaatcatctaaaagaatatgtagttctctattcctcaagattttatgtctactttcggctcgtcatatcaatttgtactgttgtacatatctaagccaaaaagaataaaaattagttataatcatatgtgatcaagagaaggccacgacaagtataggcccattaatgggtccataagtacccactttcattacagaacaacactttcctgccgaaaagagagagagaaaacaaaacaaaaaatggctacccgaaaagctctgatcaacgttcaccggatcattcgctccaccgccgtggttggccggagctctatcattcctgccgccgctaaccggtcatatcctattatattccggtactttaactttctctccaccgtaataatagtgatctgtgtattcgtgaacacgcctgaaaaaaaaattgtgggattgatattttttctaggaatggagttgatttgggggcgagattcttctgtgagaacactgcgtctgcccagaatttcgatattgatctctctaacgaagagaataagagaagaacgatcaacaggtatggttataattttggattcgatttgtttcaaatgttggtgattgattgttagggttttggtgatagattgttgtataggagcaagcaaagagggtttttggaacttgatcttgttttggggaattgggttgaggagaatgttaattccatggacgaaaatggtgttaaatccctaattcatgtcctcaatttggtatgtttcattgtctcttcttatcagtaaaaattatctttatgtatatgaatatttgcatgtttaggtagaatctgaagctaccaaattacttgtatggaggagttgtttaaccagattgaggttgtttctgtgatgtgatctaatctcgaaatgatccatacaagtaatttggttggtgaaaactttattatgttcatagtgacgtcaaaaggtgtaatcaggaatttgttagattattgcattcaatctttttttgttctatgcaggaaaaccctgatctctggaaatggctaactgaacaggaacagcctccggaagcagtgagttcaaatccggtaatcacaatctcttaatcgagtctacgtttaaacagtatatcgtcttttgtttacttcagtgattaaaacaatccttgttgtgatgttaaaggtgttctcggcgttacacgagaaagtcatgaagaatctgaacaagcatgcagcgccagagactcgtgcagcggctggacagccctgggtcagaggatgggacgatttcaagagaggccgtgatgctcccatttcagggaatcagtaaacataaactcctcttttcaaaaagtatcaaagtgaaaataagttatgatatgaaaatagataccaagtagtagcaaccattactttactattgtattaataaagaaccaggccgtgaagaaggtccatggcgttgagataattacagtgttgtgtcttgtttgttgaagtttccaagctaatatttggtgttactagattttgcctagttttggataaaatgttgtccaaatttaaagagataagatggtaagatatctgtcaaaagatattatggtttacatttgtcacagtcaccaaaccaagattgaatttggtcatttttaaaagcttgttaaagttcatatgaaaattaaatacacagaaatgagggtgttaaatatgtaactaatacacatccataagctagtatagaaataatatatcaggatgcaaaaaaatgtaacttcgaacaacacaacatacctgacgaagatgtgggttttcatattgcccatgacaagatgctctaggaccatcttcttttacttatttacatcattctttcttcaacgataactttgtgtataaatctataaatcattcttctgtaagtaatgatttacatcctcatacatcgagcaattgaaataactagaatatgatgtttatagagctatctcgttgtagaaatatgcaaactcatatcttagttatgtatggttttgttgttagaagttacattctttcactttatttccttccaatatattatttctccaagggatctcttacccttttacagctataaccaacatttttatcaaataattatcattttgtgcctcaatagctatcaaaagctctcttttggtctttctaagtatggaggaggcgatatcaacaacaacacttacccattgtgaagttttagagtttgttaaaaatgaaaagtaatatcgtatcaaagtcttttgactacacattgagaaaacctttattttaaacatgagatattgcacatttacgcatatgctccgggaggtgtgtcaagaaaaatctagtctctttggacctgtcaagtgtcaacaatcaccaaaaaagacctttcagaaaataataaaatatgttatacgaataaaggttttttgattttttaagtaaaaataaaaagtattataataaaaagttatgaaatcatataataataaatttaaatggaagaatatcccatgagaatctcaactccgcaccattggagagattggccccttcttcttcttcttcttcttcttcttcttcttcttcttcttcttcttcttcttcttcttcttcacctgcatcagcacaatttcccaatctcttcttcaaatttagatcctttctttcttcaatctctgtattcgattagattcatctttcttcactcgaataacgggtttgagattctctctacgttacgcgtttttaaatggtgaccgtttctggagattcattgcagatctgaataagaggatgacatgatcacaaacccagaatctcaaattctgatttttattcctatttgttgttgatcatcatgtcgacgactcatgttggtttaccaacgaaaatggaagctacgaagtcgtcgaaacaaaattgttgcaacccggttaagaaacccggacccgtttcaattgatcatgttctcttagctctccgtgagacaagagaagagcgagatttacgaatcaggagcttattcagtttctttgattctgagaatgttggttacttagattgtgctcaaattgagaaggggttatgtgcgcttcaaatcccaagtgggtataaatacgctaaggagttgtttagggtttgtgatgcgaatagagatgggcgtgtggattatcatgagtttcgtagatatatggatgataaggagcttgagctgtatagaatctttcaagctattgatgttgagcataatggttgtatttctcctgagggactttgggattcactcgttaaagctggtatagtttcatttacatgctctgagcttattttggtcaagaatcaaacttgcagatcatattgttgttagatcattataagtctatagcaggaatgtcttagattgtgacttggtgagaagtttgaagtttgtacaatctttggggatgcaatcttggaaagtggagaatgagagtgatagttaggcgtttacttgcagtgtaggttgataagattgtgctaatctttttgctatatatgtatgatcattagtgaagatgagactcttgtgaatctgagtggttaaataaataatagacgaatttgtttgttgttttttggttctttgagactgtatataattatctaaaacatctatgaagtttaagtatgaagacttcctatggatgtgtattggtttcatttggtgtaccatagttaatacctttcagttctttgattttaagaataaggcttgttaattttcattcatatgttcaaattttatatgagttctatgtgtagaaatagtgtcaattgcaacttttgtttatgctctgttttcgtcctataagccacaacagtttctattttgcagggattgagataaaagatgaggagcttgctcgttttgtggaacatgttgacaaggacaatgatggaatcattatgtttgaagaatggagagattttcttttgctgtaccctcacgaagctaccattgaaaatatataccatcactgggaaagagtatgtcttgtagatattggagaacaagctgtaattccagaaggcatcagcaaacatataaagaggagtaactatttcatcgcaggtggacttccttaattatttggagcttattttctccgaacaacgtaaaaagatttggttataagttttctgacaacataatagtgctgttacaggtggcatagctggtgcagcttctaggactgctactgcacctctagatcgcttaaaagttcttttgcaaattcagaaaaccgatgctagaatccgagaagccataaagttgatatggaagcagggtggagttagaggtttttttcgaggtaacgggttgaatattgtgaaggtagcaccagagagtgccatcaagttctatgcatatgagcttttcaaaaacgctatcggtgaaaacatgggtgaagacaaagcggatataggcacaacagttagactttttgctggaggaatggctggtgcagtagctcaagcctctatataccctttagatcttgtgaaaactcggttgcagacttacacgagccaagcaggtgttgctgttcccaggcttggaacgctcaccaaagatatattggttcatgagggtccacgtgccttctacaaaggtcttttcccttctcttcttgggattattccttacgcgggtattgaccttgctgcatatgagacattaaaggacttgtccaggacatatattcttcaagacgctggtaaatctcttaactgctatagtttcccattctgtctgatactgcttgaatgtaggactcataaaacttggcttgggtttggtcttcagaaccaggtccgctcgtgcaactaggatgtggaacaatctcaggagctcttggagcaacctgtgtctatcctttgcaggttgtgagaacaaggtaattccatagcccatatgcttcacctgctccctctgtcttcctcaacacacaaactccatacacaatcataaaatgcataaatgaaatatatctcactgtcacacagaatgcaagcggaacgagcaagaacctcgatgtcaggagtattcaggagaacaataagtgaagaaggttacagagcactctacaaagggctactaccgaaccttctaaaggtagttcctgctgcaagcattacatatatggtttacgaagcaatgaaaaagagtctagaacttgattgatttagtggcttcacttcattttgatattgacgaaaagaacgagaataataaaaagagaacctataaaagtaggttatttttaacatacataattcttctaaacatcatttgtatgagataaatactataataagattctcgcttctccaaactttaaatatttaaggccactgctgtgtattatccaactgttatgtacgcttgttcaatgttgtgtgcatatggacccggcccttataatgagagctggtgttatgaagttgaacgttgagtatgtctgacagtctgagaggtagacaagagacagaaaatgaagctatatgatgttttgcttcaaatcttcttttatgtttttaatctttatttggctttatcttttaatgtgtttggatttttctagaatctgagttcatttgtattccgatccaattgaaacatgtgtgaggtttattcccccgatctcaacatcatttatttgacaatacgaaggtcaaacaccataataaacagagcgagaaccacaatagtaaaaacagagcatatgagtgaaggaaaataaataatttcaactaaggtgtagtattaataaatgtatgtatgctgtcatatcagcaagtggacgtgccggagtggttatcgggcatgactagaaatcatgtgggctttgcccgcgcaggttcgaatcctgccgttcacgctttttctttttcaattttagacaatttctttcacttttagatgaaataatttagacgtctccgcattgccgagagtctgaaaggaacgttgaataatttgctaatggtaaatttggaaagaaaaatcgtaacgtttttaaaagaaaacaattgtattcataacattatgcaaataaactactgtaaccatctacgactacgaacatcatattatctaatataaaaaaatgcttaaggtctaaatcgttcttctttgttatttttttgttttcaagctctacatatttctattctcaaattaatttaaagtacaaattgaatacgtaaaagagatctataagatcatttccactgagagtatctcaacaaagtttctcattattaaaataattaaaataataaaaagaaaagagagagtgtagaaagtttctcaagtgagaaactatgagatactctctacaagccatcattatatttctctcctctcaattggttcaattttttcatgaaaataaaaatttaatcatataataaaaatttaataaaatactaatattttttttgtttgataaactttttgggtttttccttgatggagatgcccttaagtttctcatttaagaaactatgagatactatttacatgcaattatgacatttctcttctttcaattggtttaattttttcattaaaataaaaatttaatgttttttgtttgagaaaatatttaggttttttatggatggagatactctaaaatttcgagactgtgagagatgacaaataacaaaacaaaaatttttattaggtctttgagcttaagccaacactcctacaacctttgctactttttgcaccgtttttctcaaaagaaaaaacaaattaatcatacaataaaaaaaagcatacaaagaaatctacagtcaagagagtatatatatatatatatatatgtatacaaatattaatgttttaaaaaatagtaagggaagtaaaattacgaaaaacataataactcatgcttctttcttttattttttttgtttaggccttttaactctgtgtgtcctttagaaattctctttgtggaaggagaatctggtgcttgttttgtgggtgaaatctaaagctagatgccttagctcctttgtcaatgctggtgctccacagtaaaacactcctgcacatacaaaatcaagattctttaatccaatcacttttcatttctatataaccgcgaacatagtagagaagagagatgtgagcttaccaactttggtgttaggatgatccatagctatacgcttgtaaacatttctccaattaggtttagcgaaatgggacataactcttgttccagagacaatgtcgacgccgttctttgcatggtttagtgattgaagcatatgtataagtgcggaacgagcgtcaccttcttcatagacacttgtacaatagttatgcatttcgatgacgcggttggcatctcgttccgcgacttcgttcattatgttcttgaaccaatcgaaagagccttgctcacgcgtaacccaatagaagtaagctctacgggtcctgaaactctctttcttacttcgttgtggttcgcttgttccattctccattcggtttagttgggcttgttccttggccttgatgttattaacaatgtctttgacgatactgatcattggtgtggctccaatcccgagaccaactagtagaaccacctcgtacttcttgtagtcttgtgctggtgcaccatatggaccatcaatcaagactttcgggaagctgtggaatcagtgtcattgccattagccaaagcaaaagaaagagactaaacgtagatggaattgttcagataacaaaatatcttggttgtagccaaatattaagtaaaaatttaaacatctattttggtataagtaaaagttctaaacataactcgtcatattaactattaactaacatcttttaaaatctgatacatcttgcagcgttagttggatcaaataatgtaagactatttcttaattacgtatatacacataccatctttctagttattgccatgttaattaagtatctcttgcgactccaaataagatattaggtacgtacaaactataagtaatgattacattttgtattgctagctagatagttaacactattaatggcacccaaagataaaacctataaaaccaaaaacagtttcaaattggataaatgaatagaataatcatatgcttatccaaaacaaattattttggcatgtgaacaatcaaaaccaagattaagtagaagtaaatgaattgaaaaatcatatgcctaacgaaacatattaatttggcatgtgaacacttgcaagtatattcgtacacctagatgagctggatctatattatatctacatgtgatgtgcccatataacccaagctataagataggaaactacgaagaccatttaaaaagtcagcatctctttattttatttttatttagaaaaaggaactttataaagtaaatcgacaataaaatatgaattgacgtgatgcaaaatattttttaaaaacgtagaatgttgacctagcctaattaattatccgatcaccttgcaaaggtttttcaaggaaaaggttgagaaataagatattgcaacccaaagatttacgcggtcacatggagaagctaaaaaacatcgtgcttgcatgatataaccaaataatgcgtctcaatcacctaaatagaatagtgatattttggttaggtacatagtttgttttagttgtggtctcccacaccgctttattataatgaattaggtacattgtttgaatttgttacccttatatactcaacaatgcttttcctaagtggatatcacgattcacgagtcatgatgcatcctctcaaaaaccttctagaaccacttagcatgatttagtcatttacgtgtagatgaaagataacgacgcatggattacatttttcaagatagagtggttaggatttttacttactcgggattatttgcaccatgcaacatgtcggctctaagcagaccactaactcctgccggtggtggcttacacacctgaaacaacacattaagcaaaaacattcatatcaaactctttaaattcaacacagatcggttaaatagagacattatagtaataacctcagagaagactcctttgagagctcgtgtccaatccccaagaactctaatgtgaacacttaggtaatcatcttgtggtgcagatgtgattgaaaatggatgcctgcattgcatcatgatgaacacttattagatgtatgttcggatgatgcactatgtgaagttagcggtttggttcataccattcaaatggagaaacagcagcacagttaacaaacatgtattgaccactcttgtatttgaagttttgaggccttgacaagtgaattgccagcacgtttcctggataaactgctactttcctaatagtcaccgccttgatgctcgacctgaatgctcttatcaacctttcacacgcgtatagaaccactggtaccaccaaatacatccaagtctgcaacaatttttatgaccaaatgattatgatcgaactagcttatatatgtaccttgtgatccaaaggagctaaatttaatgtaccgttttattgtgccagtctctggtgagatacaagtagtatccatgagcaacaagaagaatgtagactatgacaaacaaatgatgagtgtaccagaaggcattgaagctagctagtttctttaatggtcctggaagatagtttagcttccctcttctgaaccaaggcgtggctagtgtgaatgcaatcgccattaacaaaaccatcacaagtccggttataccttctaccgagtttacaaaatgccagtagctctttggttgctcatccccaaaaaactgtcttaaaggcctatatgcctctggagttgcatgtagtaaccgcgggaaatcacacgctaaatgtgccccggcgtgcatcgttactccaactataatccccaccgctataacctaattttgtaagcatcagtatattataagaaattcctaaaacagagaaggttttagaatatgtctgtttgtttaccttgtggaagttgagattgtcatcaaatgggacaacacgacccaacctggtcttatttctaagccatgtgatggtgtttctacaaacaggtaagagaatcaaagccatgttcagcttcactgtttctgcagcacctttagccatgcacacacaatcacccatcactggatacacagggctacgcctgtattggatatatttgtaggtgaagagtatagccataactatgaaccatagcactataacccaacatctttgccagttgtctaacaagaagaatctaagaccacggtaccatcgcttcaacgggttgcggttaaacgtaggcttaagcctctgactcatcatatgactcagattctttctctccccagtacttgttatcacagactgtgttgccgcttgcaaaagcagagtctcaagactctccaactgtttcaagattcaccacaaatgcttcaagtctcaaacataatatggcaaatcgtcaagacagctgataattacttaccatgatgtatcctatattgtctggatccaactcttccatgatcaatgctgcatattcatcagctctcttctgtattgtagatagattattcgcagaagcactaagactgataatctgtaaacacacaacaacaagaccaaaacagagttaacactgaaacagagcagatataacttataacactctgtatttcttacctctctaacttcgtcttctgtaagtctaccatcagcatctttatccaccctgcattatcatcactttcagattcacattctagagaaagaaaaagtaaaagaaacaaaaatcagtaaccgaaaaccatacatgtcaaagaatgtcttaagccgagaatcaaaactttgatcattaatttgttcccaaaactcctttagttgatctccatcaatcacttcccctgttatattccttcttctagccaatgcatcaaacagttccaaagcaaaatcctttgaagtcattcctacaataccaaattttcattcaatcagtacaaaaaaaaaacattctaatcacttttcaagattataacattagtctttacctatgcattcaccgaactttgtccgaagaagtagtccaccggtagtcgcggtaatctgattaaaccgcttctccacggcagaccaaccggcgccaccgtcggttttactaatgaacttaagtcccttcaacgcttgactcgcggcggatttagtccggtctaacttagccggtcgaggcggctttcttccaccaataccaccagaaacagatgtcaaacgcttaagctcgtgagaaacagacgccaaacgtttcaccaccgttgttttcttctcaagacggtttcgtttcagcaaagtaagctccggactctcttcaacgctagatccaccttccattttcaagctatgtacagagactgtatcgtcttgtacatctaccgtgaggtccacgtatggtgccgtacgtgttctctgactgttctcagcagtgaatctggagttccccggttttttatagatcggtggtaattgaccaccgctcattggtccgctgtttccggcttctgcatcagagtgatagcctcctgacacttcaaaactcactctagacattttttaacacactctacctgaaaattttctcgtcgccgctaaatttcaccgggatctcaaacaagagacacaaaatgatgaagaatttgttgtctactggttatggtcttatggaatctctcactacttttttagaggaaaattttgtaaacgcagagacaacatttttcccgagaaaatgagagaatttttccgggaaaatatttgatgttattcttctctctgaaagtaaacgatctctcaagtaatttttgataggagaatgagaaaatggattcgtataaatagtgaagagaagagacgagtaaaagaatttgaataaagaagagagacgtggtcggacttggcccaccaactttgtcatctatgatgcaaaatatttaacaaataacaactaattgaggttgtaacgtgcatttgtaatgcaatacattgagaaaaaaacaaatattatacataacaaagttgagtttttttcactagttgtttatttaagaattagaacaatagtccactgttttttaacaagtccatagcgaatgttggaaacttattttaaaaaattattaattggaagtctaaagaattacgaaaacaaattgtatttgattaaaacaaagtacaaattgcatttaaaaagaaatagtctatagaacatggatgatccttccatataaagtttgatcatgcacatagtatgacaataatcaaagagcggggatagctgtgaatctttagcagcgaaaacttcaaacatatatttcatgaatacaacaatgttataaaatgaatttcgtacgacataataaatgttatagtaattcttatgtttgtccaaaaaaaagaaagtaattcttaggttaaatatataaaaacatgacaaaagtgtaactattaaagatatttgatgtactacatatatataacaaattttatcaaagatgtacatagacaactatgttcttaaaactccacaaacattacggcagttagaatttaaatttatcttggaatattgtttgtatattattaacaaatgtaaattggtgtaggttttcagattttcataatgaaaacagttttaaattatggttacgagataattttgacgaatatgaatacatatatagaaaatgtttgggcctatatctatgaaaatgtttgggcctatctatatctatgaaaattgtatgagataccaacaaaataaaatatttaaagtagcaaaacattgtgttacttttctattatcttgtcttaaataaataaaaatcaattttttttttaagaagtaacacaatgtgaagaatacgtgtgtacttttttttttttggcgtaaataaaattagtaaattaagacaagattaatagaaaagtacacacgtattcttcccattgtacgttaaaaagctcgtgaattcacatgcatgaggacgatttgggtaaccaataagttgactatatttttgtatgtctttctatttttcttcacatggaaagaattttccaacgaaaagttgaaggggagacaattaggaacactaaattgtcaccattaggctcttaagttttaatttggcaaccaatttcattttctctattctgtatttttggattgggaccgttttatttgtttgtgtgtgtgcaacttgagctcttcttctgtaacacgcatgtgttgcgtttggtttttaatttatttgcctacttttgcgttttcaacgtttgttaccacatttgaactataaagtccaattccataccgatcctctacaaccatataaatgtgctacaacaaaagttaatctttgatcttgatcaactcaaagatgactatacatgattagttctcctaaaagctaatgttgtagagtgcaattgccgacaaacctccaagttttgtgtcaacttgaatttgtacttaattgcaatctttggaacgtgttcattcgaaaacgagaataaaaagaaaaaaacatgactacgtctataacaagtaaacaaaagacaacagtgaaaagaatcttatcaaaagttcaaaacgcaaacgtggctaaacctgtacccaaacagtcccataagaagccagaatcaaagtacactgtgtatataaatgagcccaacaataaccgaataaacaaaaacaaaaaaataacgttgccttgacgtgtcatcttactccatcccttccttttgcttcttctcctttacttccttttttttttctttccatcattttgtcacaaaccggaaaaaaaatctcaccggagaaaaaataaatctcaccgacgacgaattcgatcatggaggtgttatctacttcctcacctctaacgcttcactcccaccgactcctctctgcttcttcttcttcttcacatgtcacctccatcgccgcttcttcactttcttcattcgcttcttcatatctcggaatctccctttctaaccgcacgatccaccgcttctccacaactccgacgaacttaagacgatttcctcaaagaaaacggaagaaattcactccgatttcagcggttttcgaacggttcaccgaacgagcgatcagagctataatcttctctcagaaggaagctaaatcgttgggaaaagatatggtttacacgcagcatcttctcttaggtttgatcgctgaggatcgtgatcctcaaggcttccttggatccggtatcaccatcgacaaggctcgtgaagctgtttggagtatttgggacgaagctaattccgattcgaaacaggaggaagcttcttctacttcgtattcaaaatcgacggacatgcctttctctatcagcacgaaacgagtctttgaagctgcggttgagtactctaggactatggattgtcaatatatcgcaccggagcatatagccgttggactcttcaccgttgatgatggtagcgccggcagagttctcaagaggtatagctcacctcgaattgttgcagttccatagataattgactcatctaatatttgtaatttgatgaatattttctttgtatgattttgtcttttgatcttgaaatttgtttgtgtgaatgatatatagattgggagcaaatatgaatttgctcacagctgcagcacttacaagacttaaaggagagattgctaaagatggaagagagccatcttcttcatctaaagggagcttcgagtctcctcctagtggtcgaattgctggttctggacctggtggaaaaaaaggtaatgttttttatagatactatgttctcttattcgtactgttgagtttgagaagagagatactgataaaactttaaccaaatttgtgtttatcagcgaaaaatgtactggaacagttctgtgtggatctgacagcacgtgctagtgagggtcttattgatcctgttattggtcgggaaaaagaggttcaaagagttatccagatactttgccgcagaactaaaaacaacccaattcttcttggtgaagctggtgttgggaagactgccattgctgaaggactagcgattagtattgcagaagccagtgctcctggatttctcttggtgtgcacctgcatctgatcatatgaaactttttatctgaagtttgtccgccatgtacagtgaccagttttatttgtttatgtatgtagacgaaacgcatcatgtccctggatataggattgctaatggccggtgcaaaagaaaggggagagctggaggctcgagtcactgctttgataagcgaggttaaaaaatcaggttagtgatctgaaatcttaatacgtcaaagacttctaaaattagtatggcacattcctaacagtgttttttctttttgttctctcataggtaaggtcattctcttcatagatgaagtgcatacacttattgggtctggcacagttggaagagggaacaaagggtctgggcttgacattgctaacctcttgaaaccatcacttggaaggggtgaacttcaggtatgaatgctgaatgaatcgatgttttgctgcttttacttgtgcatgagaaagagtacaactttggtttatggtgctaaagctt

SEQ ID NO: 875 - DNA, 87180 bp, Arabidopsis thaliana
gctctactaatcaaccatttgcagtgcattgcatccacaacccttgacgaatttaggagtcagtttgagaaggacaaagcccttgcaaggagatttcagccagtgttgattaacgagccaagcgaggtttcttttcaaaccagtgttttctatcttattaaccaaccgacacctgttttcttatctagtatattcatctcaacgacattttaggaagatgcggtgaagattttgttgggccttcgtgaaaaatatgaagcccatcacaattgcaaatatactatggaagccatagatgctgcagtgtacctttcatcacgatatatcgctgatagatttcttccagataaagctattgatctcattgacgaggcaggaagcagagctcgtattgaagcttttaggaagaaaaaggaggatgcaatctgtatcctatcgaagccacctaatgattactggcaagagatcaaaacagttcaggccatgcacgaagtggtaaagaaactagacattagtcctgcagtgttcttgcatgttgatcatttttacctattaacagtttcaataattgttctgtacataggttctctcaagcaggcaaaagcaggatgacggtgatgccatttcagatgagtctggtgaactagttgaagagtcttctttgccacctgcagcaggcgacgatgagtatgacttccttcttttacatatttaggtctttaaggggaaactttcaaaaaagttctaagaacaacatgaaggaacctccataactttaatttgattgtgctttcaggcctatactggtgggacctgatgatattgcagccgttgcatcggtttggtctggaattccagttcagcagatcactgcagatgaaagaatgcttcttatgagtctagaagatcagcttagaggcagagttgttggtcaagatgaggcggtagctgccatatctagagctgtgaagaggtcccgggttggcttaaaagatcccgaccgtccaattgctgctatgcttttctgtggaccaacaggggttggaaaaacggagcttacaaaagctctggcagcaaattattttggctcggtacagcttcattaacaatatagtgctgataaatgattgtggtcattgaaccgattccttcatcccccgtttttcattggttattgcaggaagaatccatgctgagattggacatgagtgaatacatggagcgtcatactgtgagcaagctgataggctctcctcctggttatgttggctttgaagaaggtggaatgcttacagaagctatcaggagacgtccttttacagtggttttgttcgatgaaatagagaaagcacatccggatatcttcaatattcttctccagctgttcgaagatggccatctaactgattcacaggttcgatgtcctgtattcacttaaaaacatttactgcttcttcaagagacctatagagttgaaactcgtctgtgcatataattgatatgtttgcttgcttcttcaatctttgtttacagggaaggagagtatcttttaagaacgcattgatcataatgacctctaatgtcggatcattggccattgcaaagggaagacatggttcaatagggtttatcctcgatgatgatgaagaggcagcatcttataccggaatgaaagctttggtagtcgaagaactcaagaactatttccgtccagagttgttgaaccgaatagacgaaatcgtcattttccgacagctagagaaggctcaggttagtcattttctccacttttaacctttgaaaagtaggggttggcataaaaactgaaccaaacaataacaatagctttatgccgaaccaaaacagagacattaaaggtggttgatgatttgttggcttaatgcaaaactttcaaccctgattttacagatgatggagatcttgaacctgatgctacaagacttgaagtcgaggctcgtggcactcggagttggtttagaggtgtctgaacccgtcaaggagctcatatgcaaacaaggctatgatccagcttacggtgcacgaccactccggagaactgtcacagagattgttgaagatccactcagtgaagcctttcttgccgggagcttcaagcctggtgatacggcttttgtagttcttgatgataccggaaacccatcggttcggaccaaaccagattcttccactatacgagttacagacaaaacatcgatcgcatagtttcaccattggaggattgtatataaagattctttgattatactcactcgtcttatacttaaatctcaattgcttgttgcaaacttgtatatataaagatacatagtgattagtccgtgaggtaattgtattaagtatttgttattcctcgaattaaaactatcctttcattctctgaatcgagtcatgaagaagagttgaatgatctgaatcagtactactcgatcgtacatgactgtaacatgaaattgaagatcttgatttatctgagattttttgcttgaagaatctcctttacaatttctctatactctttgtttagtttcgtcttaaatcctttataaagaaaaaagttgggaccattccatttctacataggtgtaagcaactattacaacagaaaaaccaccaagagtcatatttacatagtggttgttctctttagagacaccactcacactgttagataaagctattcagatttggatgtagcctggacaacaacaaaaaagaccaaatctagttcaccgataatatcctttaagccacttcaacttctccttctgtaaataatgcatcatagatttggttagctttctgtaaaatttgatactcacaatgtcaaatacagagaaaacagagactaggatgtctaaccagaaagacgagcagccatgtttgcctgttcatccgcatcagagtttaaactctataaagaaaaatgcccacaatggcagaaactcgcattagaacgaaaaaagccttgtcggaactcttgctctcaagcacaaaaggagaactatacagtatcattcatttccagagagaaagagatgcacgtagaaacataccctaagtacatgactgatctcaaaagagagacatttgtcgctaagttgttttgcttccttgtggagcttcgagagtacctcgtggtttaccttccattgacctttcatctattgtttcagaaaaaattgagaatgtgagaagggagaagcatatatgattcattaaatcaccttattgcacaaagatagaccaacctgcatacaaactagcttggagtcagttttcactttaattttcgtgtaacctttctcgatagcatgcttcaatcctaggattaatccatgatattcagctgcattatttgtggcaattcctaaaccttgacgcattttaaaaatctgtttttgagaaaattgatatattaagatacagaaaactgcattctccaattaacaaccatggttcaaaaaggattcataccaagcttccgtcctcagttttcagtacagctgcagcgccagagagaccgggatttccttttgatgcaccgtcaaactcaataatgcaagtttcctaccacaagaggagaagaagaaacagatcaacttaagcaaaacattctgcatccatccaattcactggaactatgaaataaggtatatacaaacatatcacaacactcacatatgaggtatcagcagatggctctagctcagcaagcttttcaactgacatggaagctgaaggaagttgatcctggaaaaaaatgaatacataagcaatgagcttaatcttttttctcataatcattaaacttcatcacaatatcatctcacctggaagagacaaggtgtaagagctccaaacatatcttcttttaagtctaaagctctaaaaacatagagtggtttcttcaaaccaacagtagaaagacactcctcggtgtctttgagcaacgagtatcccttataaacgctaactggaggatcataaacctgccattgaaaacttctgttattattatcccatctaagaaaagtatttatattagcaagagattgtgttaaggttaagatgaattcaccgaagatccaacttgagcttgacaatcgatcaaatccttataaattccaacaatgtcaccctttcgaacaacaaaaaaggcgtctttctctttatccgaatccgaaacagaaacagagctttttgacatctttgatttagcagtctttgatcttgaggaatagcaatgaacactagatacactcacacttgcaggctttaaactagattttaaagatgtatagaagcactgattccatggaatgtgggaagtgacatagctggacttcctaaacagcaccaaggaaatgtatgaacgagcacgagagaagcggttcattataggtagcactgagatttatggaagaaaaaggacacaactttagataactacagagagaggcaagaacaactataggatttacatattgccattgaggaacaaacactaaagctgataataattacaagttcaagagttcgttaaaatggctctattcaaatcacactttggcacaagaccactaataagattaccaagtggaacaatcgaaagagaagaagagacagcataccagagagagttttttttgtttaggagggagaagctcgccggaggcttctgtttgagcggtgtttccggtgccggaattggaaacaagaaggccaattttttggtctttttagaattttaaggagattttgaaacgacgtcgttatcgaaccctaattcctctgtagctaatgatgtcgtttaagataattaagaaacatgtgcttgagaataaagcccattaccacgtcgtttgtagtgtgccagaaatgatttagaacaaggtggtaattgatcaaaaataggcaaaaattaagcaaaaaatgaacaaaatataagtaaaatctatataaatatagaataggagagttctctctgtaacaatcgattctgttaccattttgtagttgcatgtctcgtctttagcaacaacaatgtcgtctttatttttgagcgtctgaatcacagagaaaacaaacagttaattagaaaatattttcattgtgtgctttatataaatttaatgcaaaatattataacattattaatgacattatatataaaggaacctaaaatataggtttgaacagtatattattcataagtttgatatttatcaaaatatattttttctggtgtgaatgaaaattgtttttggaaaacgagaaaatagtgtttactaaaaacgacaacattttagggaaacacatattcgaaaaaataaaaaaattgtgtttcaaccatgtatgtgaaacatacataaaagtgggattatcagagagggaaatgatatatcatcataagaaaatgttgataaatttatagataataaaagaatatatgattttaatttcaattgttagagaaaacacaaaattcgttacctccgtagaatcgagaggtgattcaagacgggaagtggatcatgtcgatggtaggaagggaagatgctatcaaaagaagaatgaaaaccgaaaggtgcattacctccattgttgaattttgatttctctcggaagctcttctataagtttaaagacagtatagctaaagaaattttttgagaagaaaccaagaatgtgaaatgttggtctttaatattactacttaggtatacttaatgtataaacttaattcatttactccatactattttagcttaattttcctttttaattatgactctatgttttgtgttttcccttcttttggtattttaatttttacattttaatcaatttatcaatgccaccaacattcaactcttctaattttcatttgagaacttagtagctcaagttcattgaatcaaagaaacgaataaaatatctttatcaaaagagtttttttagaatacaaacaaatagttgttctccacgatccataattgttcctgtctatgtttttgaacttttcttaaccgatcaaccgatcgacgtccatcaaatttcattgcaaaggtggttcttttgttgatagaatcgatcagcatcaagttccatctttgtttttcgataagcttgagagtagaattgtatgtaccatggtataaactaggagagcacatggaatattagagtggaatgactgattgagccaaatcgtagcttggaaataatctggaaagaacttagaactctcaaccatagctttaggtacaaaaattttgtttgtcagaatcaaacgacatgctattggcttgtggtttccaatattacaagataaaatcatatgacttatctgttggatactatcatactaattaagcttaaggaatgctaactctaagaagtggtatgtcaacgagacgatgagcaagatgaaatatcagctcttgtgagtagttacctcgggccgtcatcatcttttcttcatcgctcaagtctcagaagatcccctgaatatatggttccacttccacctggtgggttaggaagaagtgtatatgcatatgaacatctggccccaaattcatactctccaggtcacggacagagacatccactacagtactctcctccaattcatggacaacaacagttaccatatggtttacaaagggtttacagacattcaccatctgaagaaagatatttgggtttatccaatcaaaggtctcctcgcagtaactcatcattagaccccaaacaggaggaatgtaaatttttttttttgataactcagtgtccagaccacacagtgatctgactagtccactgggccgaagcccgcgaccagggatttttgagcctccacttaagggccccctggaactggtggtctgaggcggcagagcaaatccgcatgttaattccctggtggccaggaatcaatttgtaaatttgtaacaaagctttttgtttttgtttaagttagtgatttttttaatgttttggggcttaagaatgcaaaaaaatttgctctgtgtaattaacatttaagatgctaatgttattgcttcacaagttttagtcaacctcagatacatcgatgtcactatctaaatagacctctggtacttcatcatctggattctcttcatcttctgtctctgttccttcttgttctctttgcactgctcgagcaattgcggattccaaccttgtgcttacagtttcccatgacacaagcttttccatgaatgtatttatgtattcagctcttcggttctgcataaaacacaacaagcatgagaccattgctttcaaatttcgtgaaactttattcgggcattacctcaaaatccagatagtaagcgtgctgtgtggcacaaagagggaaaaagaaaactaaatcagcaatcaagaaaccaatcgctttaggtgaaattcagatagagagagatgagtagcatatattatacctcccaggtatcaatggtgagaagtggcttcatataaaggacagaccaaatgtgtgaggaaataaatatccttagtagccagcaacaaagattttctagatattgaaagttaagtcacttacagaataatcccatacgagcggatttactgcattgggcgtcttcactataacaagtttcttgtcttcctcctttgggagaggattaacggcatttgcaacgtcaagtctattcgccttatctgcatcaatgatccagaagcttaagtatgtaagtaatttggggttttgcatatttgaaaagggaacaaagataaaaacactcacatgcaagccatgtccaacccgaaccaaaattcgaagctgcagccgacttgaacctttccaaaaactcttcgaaagacccaaaatctctttctattaatctgaggagctctccagttggctttcctccacctccaggttggatagactcccagaagaactcgtggttccaagcctgcaagcccctcatacatctttaatttacattcaatcaacccatctcacattacgaaaacttgccactatgaccatggtcctaatctgattaaagatatgaatcgtcaggtggtttgcccacttaccctggatgttatttcttgtccaatccacagttcacaagaaactacatgtatcatgtcaatgcaagtaactaagtgatttcttgttacgttttaatgtctctacctatctatggcaatatttctacataacctgaaggtctttaacactgacattgccacttacacgaatacagtgtacttatggggttttcagtctaccttttacatgaaaactttatttttcttaagaaaaactggtggaaagcaatatggcatttacctgtgcagcgttgttgaaagcaggaagcatattgcctttgttgtatgaaagaagcacaacttcttccaaggataatgcatctagatccgtgcctaagatttgcttgttcaggttctctacataagttttgtgatgtttgccccagtgataatccaaggtttcccggctcatatgcggttccagagcatcctaccatatatcaacacacccaacgaccaacacagagtaagcaacatcacgcatatggttccaaagcagcaatctcaatatatctttgatttattaagtactacgattcacaaaatatcctatttgttattactacattcatctttaaacagatagcttgaatattagagtaaccatcaaccttcacagccttatatatatcactatcgtactattagaaccaaataaacaaaatctgatccaatgataaggttatatatcaaccaaaattcaacctaaaagctgggtctttttaatctactcgtttccaactctattgataacgagttcacgaaaacatacaagaggatatggaggtggcttcagctcaaatccagctgtgataacaccggaaacagccacctttgtccctaaccgtctctgcaaaatgaaaacacaccaaagagtgtgtttttgaattcaagttcaaaacaaaacaagtaagagtttcattgaagcatttcatcaaacactttccctacatggttcattgttcatgttacaacccaaaaaagagttccttgtagaattcatcagctaattcaaacttggaggagataaaagagaagtttcaaaaacaaacctttccgtttcttttccattgcattcgccggtttggccctgtaattcaccaactaaacccatttaaaaccccccaagtgttcatagtaagcgagagagtaagatagaaaaaggagagaccttgagaaggaagaagcagaggagagtacaagagagacgagggagtggctgtcactgcaacattcatcatcttcactcaaagcgttactgattatttttgattcaacaaatatacagattctttcttgctattatataactaagcccgccttcttatctcatagtcaaatttatttcctttttggttagtgttaaaatactaatttcaattgaattatatttgtttttgttcctgtaaaaataagtgtagttcaaaaataaaagattaaaattataataattgtgtgtttaaatgacattgagtgaatgaaaaaaattaatacatgatatttatgatttcagttataatttggtattaaagtgtggatttatatatatgattaattatgttgtatatgtggtttaaatacaaattatatggtttgatgcttttaaacaatgtgcttagagtcagatcttggtggaggagtcagatcttacacgacttcagtttttattgttttaatttttgtcaaatcgaaaatcaaaataaaaaattgtttcttgctattttctgttgtttgatttcattcataaatcgaaagcaaaatataaattatttggtttaattttacgatttttaatttcgtttttaaacaaaaatccatataaaacaaaatgatgatttcaatttggctagaccagacatctagtgttgcaatttgagaggatgatttcaagaactcaaagcaaaatgatgcattgacatctttgtttgttcatatgacgttgatttcactttctgtaacctttgtattgaatcttgcaattgcatatgatgagacaacggaaataagtgaaactagaaccaatacaaagttgtttaacgtatgaaaccatttctagtttattctaaaatccaaatgtttgagaacatatgtgagattcatatagggtcaaacatatcttcaaatttaaatggtaacaaattttatctaattattgccgtaaattttatactatttacttttattaaaatggtaaatttatatattaaaaatcttttatgagtgtttaaaaattagttttaagaaaataagataaatagtatttgcaattaaaaatgtttggtaataatgatatatagtagaattaaagaaaaaaatacttgagaaaaattgtgggattatatcctaaacactaaagactctcttatgtatagaggagaatgattttttttaaatcaaattataggaaaaaactatgattgtgttgaatagatagacactatatagtatactgcatgaaatttataggataaaaatatgggctatataatttaatgttttaattttaaaagttaagtttttagtaatttgggaaatagtaaatttaaatttgattaaattaatttatttgataaataagaaatctttctataagctaaatatttagaaatccgaaaatattatttttggatggtgtatttaatattaaaatatgtttggtttaaaaaataataaggataaggataaggatagtggaattaatagtgtttgacaatgagtatattatattcaataaatgaaaaataaaaatgatgagaacaattatgggcttgccacatcttttactatatagaggattccaaaaagttggaagaaaaacaattcctaaattgaaaagatttttttctttttcttgctatgaatgtaaataaaatctcaaaaaaaaaattaggagatgatatatatcaagatgaataaagacgaaagagacttaaaatttgttactgcttcccttctgtcatctttgtattatttcctatcatattgttaggaaagatttatttctttacatatgagaaatatgacagcatcaaattcaatgtgcatcaaacgttttgactatttttgattttcttccaaaattaaaacgacaaatttgattttgaaagcaacttttaaaaatacgtttcgccaaactaattacagtataaattggatctcatagccaataactttatctcatcaaacaaaactcaagtcatctatttctcttgttgcatagtcccccaaatattcatcatgtcgatcaagagtgttgtttctctcctagtagttgtatgcatcgcagcctccgttaatgctcagctaccgcagtttcccccaatcatgttcccgtttccaaatccgttcaaaccaagtcccggtatggcaggaagtcccgacttgagcaaatgttggtcaacagtgatggatttgccgggatgctttgaagagattcaacaagccgtaatgtccggcaaatttgaaggcgttggtcctgcttgttgtaaagctttccttgacgctgaagctaactgcttaccaaatcttccatccaacccgtttttccctcctatgatgaaacaccaatgctccaaaatggctagtcctccaaccaccaccgcctattagaatgcaaaaatgtagttgtgttttttcgaattttttgttagtcccagaatgttctagaagaagaaatgataataataatgtcttaatctaataataatgtctcatttcttatattgtgctccatatgattgatgttctttcttcttttgattgatgaatgaatctcaaagacatgttgcgtgatatctcttatgcggttatgacaatgctttctatataactcgacatgtagaccgatcacacacaatttagaatacatcacatacattacatactatcaaacaaaaatgttccaaaataatgaaaagaagatcacgcccaagctcttttcctaggggaaagatcagaagtcttgatatcatctattttagccgccattatgaaatcattcatgctcaaccctcctgcattattcatccaacaaaccgtcttaagaaaccatatattaaaactcaaactcgaacatcaaatatttgacataccgatagaagaggtaaatagttcagctcgaacttgggtaggactttccaagtgaagagaagggtaatgaccagaagcttcagcaaccttatggatcctgtttatgagttcaacaccgcacccaaaatccctcactttccacatacaccttattttcagaccacccgcttcattatccactatactccatcccaaaacctaaaacgtttacataataatcattgagattgatgtaccacatcattagagtggtaaccgtgaaccaaaacaccaacatgagccttatcaacactaatcatttcatttttttttaatctcgtaaccattgttcctaatatgtccctcatgatactaaaattttcattggcttttctatatttttgggtcacaattctatctttatagattagaaatctgttaaacgcagaatcaataacattttcacaatattttgatcaaccaacaaacttgtaaaatcaaaactcgaacatttttatactaagagagaaatagtataagtaccttgtggaggagagttctggcatcatcgccggacaaaggaggctgtgaagacgaaacaggggaacactgaagctgggagagagacaaaacagatgcgtttggtatcaaaatcttgtgctcagtgctttggcatcccaacactttatctccgaattgactcgctatctcctccgggtaagggtcacgagctccgaagtcaccaagaaaatcctgcgccagattagaccgggtcaccgttaaccggccgagtttacggttattcctacttacaggtggtaataaaccgaacactttaaggattgagcgagaaggttgacggaggaggagggaggacgcggagatgttacacggcggtgatgatgacgtggcggccatcgggagctgtgatttgctctgtaccgaagataagagttttggtttttagagagcgaaacgattttcagaccactggactgagttaaatgggtgaggtgccacgtaatcactaatgactaatgggaaccacaataaactttcgtgggaccgactttacacgtcacgttttaatctgagaagcccattgggtttgattgtacttttgtgtccacttttggtgaatctacttaagatttcataattccgaaagtatcctttttgggtatctttaattacaaacaaaccttcccttctttcccgatttcaagccctaaaattccgagacttctgtttctcgctttaacgacagtcgccgagtgagagatatagagagagaaagatgccggtgcacgatgagcaagagcatgaggtgtacggtggagagatcccagaagaggaagaaggtgagatggatacggaagagtacgaagaacacggcggagaagaaggtgccgccgccggagatgaggagcttgaacctggctctagctctagggtattgtgattcttcgatctataatttacttttatccaattgagactcttcttattttttactgtatttagtctgttatttgctttgattgtttgataggacttggaggatatgaagaaacgaattaaggagattgaggaagaagctggagctttgcgtgaaatgcaagccaaggctgagaaagatatgggtgctagtcaaggtttgtacttattaactgatacgtaaaatcttgaatctttgtgcgcagcttcacattaacctttaaattgatagattaggtttaaagcttgtcttgttgattatgatattgctttgggtttacatattggaatcttttagtgaatcaatgaatctgtctagaaatttactggagtttgagtatgagaaggaaatcattaatagtattgtggagtcttgtcagttagctaattgggtcaataccttttatgttgttgcatatcaatgaagacccttcaggtggtgttagtgcggctgagaaggaagaagtggattcgcgttcaatatatgttggcaatgtgaggcttgttccaccattaattttcacatgtttctcatatatgtttgtatcttttttaaagaaagtttgtgtgttttattgctttggtatcaatgaaatttggaggctgcttgttgtttatttctttatctctagtaattgctaaactaactttccttcatatttcagaaagccttcatatctcccatctgtgaagctgattctttagatatcctgtgtctttgtttttttgtgtatattaggtggactatgcatgtactccagaggaagtccagcagcattttcaatcatgtgggacagtgaatagggttacaattctgacagataagtttggtcaacctaaaggttttgcgtatgtcgaatttgtggaagtagaagctgttcagaattcgcttattttgaacgagtcagaactacatggtcgtcagataaaggtgcaaactcgttcaatacgatgtagttaattattttccatattacgatttgtcattactaaactttgtttaatctattttcaggtatctgcaaagaggactaatgtacctggaatgaggcaatttcgaggaagagggcgtccctttagaccgatgaggggattcatgccaggagttccattttatcctccatatgcttatgggtgtgttctagaaccttacctgcctatcctctcttttaaagtccatttgtttgattcatcatggttgttcataaaattgacaatggttgatggtttgtgcaggagagttcccaggttcagacggcctatgcgctacagaccgtactgattaggcaaattggtgttaaaaaagtagcagctgcttctccgttttcgggaaagcttatcatcatcaacacggttcatcggacgctgcagttgtttcgattaacagagatgagttgaagaattgtatggcagaagagagaggggaattatattctagattttctgtacaatatttgatgacaagtgcaacattttgatgagttcctttgtttttattatcttcaaacacgagtcacgatttcacaataactcgcaagcttccattgttctagatttgatgcatattgaccaaaaaaaaacaaaagttaattctctaagattaatttggccacgtcggtgaaagaaaaggaaactttcgtatatttacataaataggtttaaagaatgtattaactaaaaaagagaggattacttaaatatgagactcgttaaacccttttggactttcaaaggcggttcggttcttcttcttcttcttcctcctcgctctgcgccgcttaacctcgaagaaaaacctctctaggagctagcttcgtcgaatctctctgtttagacttaatcgttttgtttcgattctaagaatctagctgatagcgataacatagaagaaaccctaacttcgcgagctttgttcatcaacgcgtgtgagaaaaaaatgggtcgggacaacgatcagaagaagaataagaagaagagaaacagaagtaatgagaatgagaagagtgttgagaaagtagttgctaatgaagagaaagtcccaacacagcagaagcagaagcaacaacaaggacaacaaggaaattgtaatcaaagcaagaagaagaagaatcaagaagtttatcccttcggaaattacagaaactactatggctaccgagtgagtttcgtagtatattttcaaattccttcatagtctgctcatcttttggtttagtatctgattttggattcgtttggcaacataatgtgttagataagcaatgacacggatgaggatcctcggcttaaagtgttgaagaaggaatggtttgaaggcaaagactgtcttgacattggctgcaacagcggcatcatgactattcatattggtatcttcttcttatcaatatcataatttgttcctatctatgtccatccattatagtaatagatatgttgttgtagctatacctgtccttatgagaatgctatagtaaagtgtgattgaacttccattgtgtctgaaatctctctggcagcatccataattttatatagtcgttagctgatattgttttgctcttcttcagcaaaaaagttcggttgccggagcattcttggagttgacattgatacaagtaagactataattggttgtcataatatcttccaagttttgctttgtgtaggaactgaattatactcttaactacattatcattcaagtctgcactaaatgaactatgttttctttgattgaaggtcgcattgaggatgctcactggcatcttaggaagtttgtcagaatgcagaattctactaagcctagtgaaaagaaatctagttctgagggtgccgatggagtacatggatcgaaggagccatctgtttctctctccaatggcgaggcaaaggcagatagtgcagaaactaaagacttgtctcagattgtgtcgtttcagaaagagaattttgttcaaacccgaaatcttgacgacaatcgttatgatacaattctatggtaaacccctttccttttgtcacttgtacttttggtttctgccatttgggaggaataaaaacaaatgaacagtcaccatttcttttggtaatgctcatacctaaaagtgcatatgaaattttatctgtagttgagaaaagccttacaggaggtttctagttatgttagcttatgtaactaagcctttctagaaggagggccacatttttagttccaatcaaaacttcctctgtcttggatttcttatgctgacatgttcttttcgatgcagtttgagtgtgacaaaatgggttcatttgaactggggtgatgatggtttaatcaccttattttcaaagatttggcgtcttcttcaaccggtaactatattatatctaatcatgtgcccattatttgcttttcatatgcgcaactgacggttggctttgcttttcagggtggtatctttgtaatggaacctcagccttggaaatcttatgaaaacaatcgtcgtgtctcagaggtgtgtatatatacacaagtttatttctaattgcgcaagttagctagatatatagttttagtatttgtttgccttgtgtgtatgcagacaactgcaatgaattaccgaacgattgttttacgaccagaccgtttccaagaaattcttcttgataaggtactctctacttctctgttatactgccatgcaatagtctaagtgttgttcaaagttggattaagagtcagattaaatctagctcaaaacttatttgtgtaatgagtttagtcttggcttattttgttgtcatttgatcctgtctgtgatcggatcctcatgttccgttacttgtgttttggttttggcacagattgggtttagaacagtggaagatcttacatcaagcttgtccggtgcaagcaaagggtttgatagacagattcttgcgttccagaaatgaacataacaaaccagatgcctcattgaagaagaaggacaagttgttgagtttttgaatagccttgtgaaaatcaaattatgacatggttgaacacaagatataaaaggcaactaaaagtcgcttcatatctaatatgtaatctttttgctacagcttaggctcactaatctaattccattggtcctctttttgtacgcggttttatatgataatgacataaaactttgaatcgataaatgaaagaatctttgaatacaatgaatcaacttgatacccttccatgtaagcactaatcagcatagttgtagaacaatgtatacaatacagttgccacaagtgttggtaacaagaattacagtgtcaaataattgtaagctaaagggatgcccaagatggataaggacattcgtattcccatccagttccacagtattgaacgcaatgtaaccagagagcctcgtcatgctcctcatatctgcataagttagaacttagaaacatgagacaccatttggatgaaaacaataacacggttgtggttttagcatttttttttttacccttgtgggatcaactttgggcagttcgtacacattggatcgatgctgaaatcttcgcttgaatacacgtagtcatctggggagacaatctttctctcacccgcatcgattctttttgcaatgtaggtctcaagattatctatgtgttgattgagataaagagggtcattcgctatgggatgccctgtatattgtagatgcactcgtatctacaaacgtcaaaaccaaaatgagaaaccccaaaaggccaaactctctctatccactatcctcatggctaataagatctaaagatcgttgctttgtgagtttttaccactatatatgtataacagctgctaaaatccgtattatgtataatcaattgcttacttgatgggttcgccctgtcactggttcacatgagacgaggctatgagtcccatttgtatcgattctagtgaacttcgtgcatgcaggcttccccttcaccttcttatcgtcaccacttgaattggcgtcctgcataaaccatacacacattccaatatttttacttataagtgtctaatggaagattttatgctgtataactagaggcaaaatgtggctttacctctgctgtacttcttccttcgctgccattataatttatgttggcgtcgactatcatctgacacatcaaagtcatgcagctacatcaagtgaactccaaacaaaagtgttctccatattataacgccctcaagataactggtagattttgaggttcagatattatgactggactcaaattagttttctaatgtggacttatatcactcgtgctactgtatgaagttggaaattagagacagttacaaaaatcatctagtaacatcaaaaggacttcaaacctcatcttctgggaacacgccaataacctttgcaatataacgtttcttcaccattccaccctcaatctgaaacaatcaagataagtagtaagtatgaaattttgatttaccagagcaaatagcatcttaggaataatggtatggccaagcaaaatgagaccaacttgttcgagtacctgttgcctgaaaaaatcagcttttgccgcagttcttgctatgataagcaatccagaaaccaaacggtctaatctgtgaatagctgtgaaatgatgcaaggataactcgtattgtattattttttaaacaaggaacattttgacaatttatccttgtctaatactattagctggatacgaaatagagttcctaggtcatgctcagcatcaaggatgccaacaatcgtgttcttacggtattgaccacatggatgcacctatacaatacgaaaacgcccgacattattaccaaagtatcaatcatacaccacaaaggcattaaacatataatgggaattgtttcacaatgcttcgaatagtactaacagaaagagaatcagattatttggtttatgctctgaacaaaaagtgtttcacattctccagagaccaaatagagtgaaaacaatccaacagaaagaatactcacaggaacagaagctggtttgcagacagtaacaacgtcaggttcttgatgaaggatcacaacatcatcaatcatcaccggtggttcatgcctgaaaccttctcacacatttagaatttggatagacattgaatgcaaaactgatttcaaatagcaaatgcaaccatctgaataaagttcagcttaagaacaacctgtggaggaagtgagtaatcttttgggatgatttcacaatgtatgaaaccggtacaatttctccatcaactttgattcttccagatttgactgcaccaacctacaatgttcaaacatatcaaaatcccaaaaacacagatttatcatcaaactaataattccttgagattagaggaagagcagtacataataatcacgaggccgtcctttaaattcatcagcaaacaaatccacaattgttttcccagtccatcgtttgttcacctacatcaatttcaatctccatgtgactctagtatgagcaaaaacaagggataatgaagaaagatggaagatacttacatgagaaatgaactcgaagtagtaaggtctcacatggcgtcttcctgcacaaacaaatcaagcgattaaaccagagcaattagttgaatgaagagagtgtggagattggaggattcgtttttacctccatggaagatgtagtcctgtttctgtgatagtttagaagatgactgtaaaagtagatcagtactcatggtgtttgaggtagtggcgaggacgggagagacggctttctctacgccgtcgtcgttgtcgtcttcttgctgctttcgtttcatgtttttagattaatcttagccggtggtcgctgtcaatctaaacttcaaacaaattcgtattggtttgggtttaaccatgttttaagctacaccaaaccggaaaattaatgtaatacgtttggtaatccggtttggttttgatcggttgatttggtatttggtttattgattacacgaggaaatgttatagaatttaaaacgaaatacatttggttcaattcgatttgggtagtagacagtttggtttggtttgggttttggattttaggattttggtaagtttggtttttgaataatctcggttttttttttttcagtttgttcaattaatttcagtaattttgattgttctcatgacaactttctgatgctttaatcaaaatgagataattgtgactggcaagagtctgacaatgcggttgagcaaactagattctaacggacgaagaacgaaaaaaaaggagatgtgtgtataatttgcataacatacactagttacaatttgcataagtaatttatcaacatttaaatatccgtagaagattacattttcttcaccaaaattgtttttgaaacggtgaaaccgtataaccatctccatttactagatattgaaggagtgaaaatgtacttatataaatttatacctggttgaaaccgtatacacaactccatctcctaggtcacgaagacacgaaaccgagttttgtatagtgtgtgtttacattggttgtgaactgtgatgcgaggtaccttgtcggcttgtcgcaactatatagcttttaaaatatgacaactgagtcagaacatcaaatttgttgaagcaaacgtgctcgatgcttctttttacaaatgcatgggtcgacttcatgtcaaccatttttgcgttggatccttgaaagccaaatagtgcataccaagtatgttatcgtttcgaacgactagtaccaaatgccctgaccaaatgttatctacgtatccgattagctactatcacaagccacaacaatatcacaaatgtgcgtcccagaatttcacacatagccaacaatttgggtttcgacgaaaccagtcgcattttgttttgattggttctccctctgccacccgcaaacgctgcgtttgcggatggtagcggttgttagcgtttgacaccaatcatagaaaccgctagataccgcttgaaatcgccagatttcaaaagctccttcccgcaagcgtttgcggttgcgggcggtagcagttaggttaatttttttttttaattaattaaaataattatgtcttccacccaaaccgtatatatcttattcttatcagaaaaccctaatcaatatattgaaaccctattttctcaattatggcatctacccaaactaacgaaaatcaaaatcaaaatcaagaatcaaacgtaagtatgatctatcctttcatccattcattagctagtgtaattctcagagtatttcatggcatcgtcattttttttattttatatttttttgagtttttttattgaatacatgttttgatttgttttctcgattagaaaattatttggtcagacgagatgacccgtttcttgttaaaactttatcatatgtatagaggcaatccggaaaacccacgagttcaacattatttacagtttattacactacttgatgcaatttttggtgatgtaccaaatgcataaagtactaagctttttcttacaaaatttatttatttttgaatttaatgttttgtttatggttttaattattaagcatgtttaattttctaatattatcaatttatcataataatatattgtattttttttcttttaaaattaatatattatatttattttggttattttttatttaattactatcgcacccgctggtttaccagtcataaaactcccgtaaacgcacctattatcaaacgctcaaccagtcgttcaaaacgcttgataacgcttgaaaccgcaaccgcctgtttccgcaaactcccgcaaccgcaaccgcacccgcacactttctgctttatggtaaaaaataaatcttttggattattttccaaaaaagaaaataagaaacaaatcaaaaatcataaagaaatgacgtgtcatagcatatccccatcggcttcttcctcactgctcccaacatttttctctgattgcatcatttcatttcctttaagcaaacgagcttgagaagctttccgatttcaattccttttaattgacgatgccttcttcgttctccaagccggatttagatccttcttcttcgcctccaccgatttctcctttatctcaagacagctcggaggctgagcgccggcttcgagaagcggaggagaggctacgcgatgccatggcggagcttcagcgtagacaacgctctgcggcgcgtggatctcacgcggaattgtgtgatcacgctgacgtttcttgcgtcgccaatgccattgggaatttatgtcagagctttcttctctcttatggtgttagagttgggatcgggattcttcttcgcgcttttaagctcgctaggggacagtcttattcgtctcttctcgatcttaaggtgaggaattgatgaattggaatttgtttttgtggcaatttctggagatttagagtcttacgagtctctgctttagtgttccatttgatacggttgttttgaaactatggccaatgtgttattgacttatcattgtatatgcgattcactcacacgtgaacaatggttgcagcaacttgtttcagagaaagatttgatagttagggaggaagcatgtcgtattggtctactttttggtggctttactggctcgtatcatgcccttagatgctgtttgaggaagtggagaaagaaagagacgccattgaattcgtaagtttattttatttatttgtgttgcctaagatttcgattgttgtatctcttttcttataatgcttctactttttactttgtgcatagtgcttgaaaagtatattccttattatgactttgattaagggtggagcagagtcttagcaggttcagttgcgggtttgtctatcttggctttagatgattccaaccagcgtcgcacacttgctctatacctcttggctagattaggccaggtacatctaatggtcatagtattgtctgtcgtacagagtaatatcaccacacagatgtttttttcggagtctgattttttctcttattaataggcggcttataattccgctaagtcaaagaacaagttccatctttggggtagccattggagacatggagattcgttacttttttctcttgcatgtgctcaggtatttgagattcttctcttttcttcctgttctagttagtaatggagatagtatagacgttgaaagacatttttgtgtaccatacgtattctctccaatgtgatttggtagtgattatggtcagcaagctaattttgttgcaatgaggtcggtgcaggttatgtattcctttataatgcgtcctgaaaccttgccaaaatcatatagagaatttattcagaagactggtccagttgcaaggcctgtctaccaagctgtaagagagtgctgcagaggtggtccaattgatgtagcctccttgtcagcctatatttctagtaaaaacgaagcaagcgacgtgaaggtggaagagtttgcttccatcattccctgtgcagctattcatccaaacactaactcgtgtctggcccaaaatgctaatgcaatgtcagctacattcaagaaaacatttccattatatttctccctgacttttgtcccatatgttgttctacacctacaaaaagtaagactgtccctcaatatttgccgtttcagtcttttagattcctatggtttatgcattagtcagacatgatatgtagtttctgatgccatcctacactttcatttcagttcatggcttctccttaccggacatcttggcttgcaatcagagattcagttagatcgacgtccttcttgtctgcttttgttgggatttttcaggtagctggtttttacatttgatttgtgtcccctcatttcatacaattcacatagtttcctaaaaccattcccaaatgtatgtgccttcatcccatttgcattaggctttcatatgtgcccatagaaaagttgcaaccaaagaccacaagctcgtttattggtttgcgggtggtgcagcagccctctcagttatgctggagaagaaaccgagacgctctgagcttgctctatatgttcttccccgagcaggagattctctgtgggagatacttgttaatcgccaccttcttcccgacattaaaaatgctgaggtacaatacaattacaaaccacttttgttatttccaactttcttcccctttgagcaatggaactgatgttttatacaattaatggaaacaggtggctttattctgtggatgcatgggaggaataatgtactacctcgaatatgaacctgatacaatggctccgtttctgaggggactcatccgtcggtttcttgctagccaaataagcaatcctagcagcaaataccctcatagttcgtcctattcttatctccagaccctagatgcattgaagaaaccgaaaacgcaggagagccgagaaggcgaaactccgaaagccgaagaaaagtataacttggaagcaattcccggtctttagaagtataagcagaagctgtctgatactatattagcacctgacgttgaaattgagcaaaccaaaaaggaccctttacggaatcatgattttgattgtgtttcaggaagttaatgtgaaactttccagaaagaaagggttcctccacacagaaaacttaagagattgaagtgattcataggatttaggagcctgttttttattttctttcacgtaataacaacaactccactgtctcttctttatttcaatgagaagtagcagaatgaagaagatttatggcaagcgagtcaagctgtcttgatttgttaacaccaacacagtgttgaaacttgaaacagatcactagatatattcctttttgtcttgttataatcttgatctattgcttaaaaactcacttcaagaaaaacacagttttgtttagtttcctaatgcaagttctctcaaccgatggaaaaaaagtcaattcgtctaagatttgactctcatacccaaaaactattgtattactcaaattgttgaaatttcatctgtattggtcggagcggatatgaatttgcacatacgatgatctcagggtcagaaaatcaaaagataaagtaatgcaaacaactgacacttgtaagcatttgttccactttaaggaatacttcatatgctacaaagtcaaatgtcaaagggagttttgtaatagaaaatttcaaacaagcgtcgtgatggtacacaccttcattgtatattcaactcgatcttctctctctctttcttctgcatcatcaccaaaatggatgcttttgagactcatttaccgaaggagatcgtctctgatcctctctataactccttcaacccaaggagtgaagagtatgtcgtcgccggaaagattctcaggcagcggtcagtctttgacttggacaaaaacgggtttagccctcttcatgcagctgcggcagccggacaagtagagactgtgagggcaactttgggggttgaaaagaagctttgccgcttaaaagatagagatggaaagactcctctacatgtggcaacgatgagagggaaaatcgatgtgatcagagagattgtagcgagctgtgttgattgtttagaagacgagaccgtacaaggtcaaactgctttgcatcttgctgttctgcacctagagatcgaagcagtcatagccattgttgagttgatcacagagacaaatcgatttgatgtgttgaataagaaagatgaacagggtaacactgctcttcatcttgcaacctggagaaaaaatcgccaggtacgacgaattaagttgcggttaaatagttttcttccagtggaatcaaactctgtttttcttttgcctacaggtgattgaagtgttggttcaggcaataccagaagaatcaaggtcatttgaggtgaatgctatgaacaagatgggtctatcagcgatggatttgctggttatgtttccgagcgaagctggcgatagagaaatctatgagaaactcatcgaagctggagctcagagagggcgagacattggcactactaatgtcgagagaaccacttctacttccacatgccaagagagaacaatgaagtcccaaagccataaagaacttgtcaagtacttcactttcaaaaagcacagagactcaccatcagaagcacgtagcgcattactagtggtggcttcactagtcgccacagccacgtttcaggccagcttgaccccaccaggtggaacctggcaagatagctcaatacctgctgtatcccagaacacaacgaatgtgaatactacaaatcaacaagctcatacagcagggcaatctatcatggggaccttcaatggagttgctttcactttgtttgtgttcttcaacacaattgggttttcggtttcactgtctatgctcaacattctcaccctcgggttcccattgcggttccagcttcagatctgtatgattgctatgtatttctcgcacaacacaaccatggccagcattgcacctgatcatgtcaagctttactgcattctcatcacatccatcctcgctgctaccaccccgggtttgatgaggttgctcgagaaccctattggtatgctcgctcacttcttggactccaggtcacaaaaaatttgctccatgatttcactttcatgtaaacgttttgtaacataatagtagccagttcaatatctaccttatttcaaatcacaaggacttgttgttgcattgtccagaaatcaccaatgttattacgagtgatattatgatatatggagacttttttctatgaagagacatatattatggaatacccaagaacacagatcaactcatccttctatgtcgttacaaatgcatacctgattggtctgcaaacacagaaatttgagattttcttattcatctgggagtttacatattttgtgtgttttgtttcctatcttacactcgatcccacaaaacttagaggtgaagatacgattctgcacacaaccacctgctctaagcttcctaagttccacgtcaacagctccctttagggaagttctaatatcacccaacgcccagaccaaggatatatgcggccgcggatcctaaaagaaaaattgaagcagactcgatgggataagtgtccatgacgattttcattggctaaacagtaaaatacaatcaagctgtaaagtactatatagaaaagcaagtggaccttgtagaactccggcagattgtggagcttgtaaacttcattaacagcatcaatttgcttacttatctgaattaaggatatgataatcagtacaatatctaacacaaggtactgagtatgcaaaaatccaacattcaaggttaactcttgttgtacaacatacctcggatagtcctgaagtagtgatttccaaagaaaggaaagagcgagtatggtcatcattcacaaagacttcccacttattgaaatctatcaagtatctgtcaaaaacagaacggaaaacaattcacaaaccccatcgtaatttgggtagtatggtaggcaagaaatgatcttacctcttctgcaactgaagcttttgccgaagcatagaaatcaccgagttaatctgatgaacacgtagtggaacgtttcttcctaagcttatgtggaactctctccccaaggcacgctcaaacttctgatcatccttgcatagaatgctgagtggcacatcagcctctaccaaatgaagatgaggaacaactgatgcaaccttctttaaaaaacatacaatctccttctttggcagtggaggtatacaaactagaatcccaaaaacaaaataaacaatgagtgaaagagaaagacaagtgatacacttcatcaggcctgcacttcatcaatacattctcaaacacatacgtatcctcttatactaaacaaccacttcagaattcaaaaacctcgaaactctcagaaattttaagctacgaaatgaacaaataccaggtacgtaaacgtgcaaagcgtaatttccatcgacatgaggaaagtttcttacacgaactccaggctctgttgagaagaaatccagtgaaccttcaagttcagacgaaataaaaaataagtgatgagtgaaatctctaagaatttgattgaggaacaatcacagagacaattgatgagcatcttcacctgtggatacaatggaatcgagaagcgcaagcggtggaggaggcaaggaaatcgaatctttctctccagaatttgcagtaacgggactcgccggagaaagatcatcggtatcggaatccgatgaagagtcgccgtaggacgctctcaatgcttccattgcccgtaaattaattaaaacagaaaaaccaaacagagaaactatttaaaccagatttcattttcaagcataaaccagattaaaccaaaatgattctaatataaccaaattaaagcgaaccgaatataaaccgaaccatccgcgaagacaaagcagcacaattcggaaaccattaacgggccgagaatgggccttcaccgaagatcaaagcaaaaccctaattacgttccctataaattagacaccaatcgccggaggtttcatcattatcagtattcaatagcatctagggttctcttcttctgttattcaatcgtcgtttttatgggtctttttggatgattgatagtttttaagtttctttataattctctaatcgagagagggagattggcagtgatgactcggaaatttcaagctcaacagaccggaattaggcgtttcttccaatttattggttgagtcgtttctgtgtcgataaccccgctgatctgagccttcctctcttttcatttgattctgatttgtttgcgttttcgaatttgaaattctctggtaatcgatttatacgtttttatcgattttgaaatcggtgtttgcgcttttttaatgatgatggggattttggagattacgatgaggatgtacagctccctcttctgattaagctgaagagaattgctggcagaatcgaacctaaatcactagccactactgagttatccccttaatccccataaatagtttataagagtttgttttttggttttctattcagtaaaaacgaatttagatggtagataatgatgaagcaaaattaatctaatccaacacttgatctgagagatactatgtgcatctccaagtgaagttacaactgttagcttctgaatctaactttgttcaattgtgatttgcttcagtttaatgacaaactacgagtaaagtttaatcggaagaattgactaatacattcaaaatagttgtctgattaaatgtctattgaacacgacacaaaatagttatctatttgttcgaatatgattaggacatccatattcgaacaaatagataatttagtctgccaattctgaaaacattgttttgacactgagaatatcaaattaatgtatgaaattatctattttatctagtgcccgtacctagttgaatccgaagtaatcgatccctgtgtattgatttgaaagcatttggtcataaacattggcgtgttcttgttaaagagcagtcgtcagatatcttagaaactaatggcagttaccaacgatgttccaacgagcacccaatttgcctacaatgacgaaggctggggacttaaaattgattcgaaaaaacctgtaaaaaatatattatacaaaagtattggtcacaaactttgttatcaccgttagtgattcaaaggtagtcagattgtatgaactttttagtcttaatcaaaaattggtatagttgaagaaaaagaaaaatccaaagaccggcaatccaaaacgtttagttactatggtaatttgtaacttccgtataattaacagtttaatacagttcagtacttagcagagttccgttgtaacggaataacgggatccagttgattacgttttgaaaccagtaaagtcaaagatattattttgttgttaagaagaggaaaaaagtcaaagttatcctgtttgtttgttttccccaaattaagaaaaaagcaaaggcgtagagggagagagtttgttctcaggaagtcggtatctctatcgaagccgacttcacgtcacgattacttacttccacgttacattttgtcgtgttttcttccttccgtttccttctctggcaagtctgcttcgtacgtactctctcttcattcccacttcacactttctactttttaccaaatcctatcctcaactctaattcccaccatttctgatccacgatttcaaattgggtggttggaagcagtgtttgtgctgtaattggatctgatctgatcggattcgattgaaatttggatcccatggagaagcacgaggaggaaaacggtctttgcaaggcggaatctgttgatggtagccttgatgtttggagttgtcagaattctgattcttcttccgctgatcaccttgtcgttatggtccatgggatcttgggaaggtaaacaaactttgatggagttgagaattttgattgttctgttttacttgatatatttatgcaattcgccaaaatctcaataatgagaattgttcttgagaactgcagtacggatgattggaagtttggagctgagcagttcgtcaaaaagatgccagacaaagtctttgttcactgtaagttgtcttgcgctttgattaatgatgatttacaaagttccaaaattgaaattagtttcctttttcagaattaaacttagttagtggaccctttatctaatcattcagctattaataggttctgttttccatttcttgctactattgggtctgtgtcactggcaattatctttaaattctaagattcttatgatgctaggtttattgctccaagattcttatgatcttaccttttgtaagcaggtagtgaaaagaatgtgtctgcgcttactctagatggtgtggatgtaatgggtgaacgtctagcagctgaggtaaggcgtcacatataggtcctcttttatttacatttgtggagttggactctgtttgatgtaacgaaaatgcatgtcaggttcttgatattattcagagaaaaccaaatatctgtaaaatctcctttgttgcacattctttgggagggcttgcagcaagatatgcaattgggaaattgtacaagcccgctaatcaggaagatgttaaagactcggtagcggacagtagtcaagagactcccaaaggcacaatatgtggactcgaggctatgaattttattactgtagctacaccacatttgggttcaatgggtaataaacaggtaactctacttgtgtacatgcgtagtgcattgactttgctaaatcgtctattaaacttgtttgaaacgaattttcttctacaactttcattgcataacatggttctggtgagtgttaaaaaaatgaacaaaattaggaaacataacttgtttgctatcttaatatttgctactaaaaacctggcactctgtttacctaactttccaccagggtaatgtatataagttatgactgacaactgctttcttgaactatgcaaatctggttgtatgattgaattaccatttcacttatgtctggatattattctcattataacaatttattgttttcttccaggttccgtttctctttggtttttcttccattgagaaagttgcaggtctcattatccactggatatttaaaagaacgggccgtcaccttttcttgaaggatgaagaagagggaaaaccaccattgcttcgacgcatggtggaagataccgatgattgtcatttcatgtgtgccactctatgtcccatttgtcacaagttagtttacctaactttgtctcgataatgtctcactagaaaatgttttcctcaattgcagatctgcactgcgagccttcaaaaggcgggtggcttattcaaatgtgggccatgatcgtatcctttatgtgtgttacttgtagaaatgtccttgttagcatcagacattacattttttttttccttcactagatctaaatagacgttgttggctggaagacggcatccattagacgtgacagtgaattgcctaaggtatctgactctgactggattacttgatttggttcaggattttgatataatagttctctctgataaatgaataatttcttgtttaccagtgggaagattctctgaatgagaagtatcctcatattgtttacgaagaactctgcaaggcatgtgatatggaggacataccagaaggcgagaatcattcagacgacatagaaggttagcgtgcacttgttgcactgaccgtttaggcatttatctgtgattttgtagaacttaatgctcacttctcttatttctatttctactttctatgctttagatcttattagctggtaaaagaagtgttcagtacaaattcatatgttgatgatctaccatatgctgtgcttctgctttcttattcatatgcatcatgatgtatataataacgtagtgcctcgtcaattgtgcagaagaaatgatcaaaggcctctcctctgtctcatgggaaaaagttgatgttagctttcacagtagcaggcagaggtttgctgcccatagtgttatacaggtctctcactctcacctgccatacctcatgtgtcttaagatataacatttgtttatcctcacacctaaggctttttaattgcatcctctcttgatagttatctttctgttgttatatacattgaacgataacatattgttcattcattttgataggattaatctccacatactttctagtaaaaccataaagtctaatagtctgtgttatgccgtttacaggttaaaaatgaagatatgcatatagaaggagcagatgtcatagagcatatcatcgatcatttccatgcttaaatcagtaaacttttcatcacccaagagtttgggacacgacattaaggactcaaatttcttatagtagagcaacaattttccagctggacgtttatatgtcacgtagttgtttacactataaaatcatctcattttgtctgtaattgcacaggtagcaagacgtcaattatgaccaatgtatttgatacatggtattagcaaagcaaattgttcaattcaattgtatcatgtattcacaaatattttgcaatggaagctttgtgcctatatattttttttacttggaagaattcctaccgactgagtttgtggtgtcatttgataatcaacgtcttaacattctcagggtgaaggactaaaatgcaatcagtacactttcatcttcagtatttctctctggttgtttcctttgatttggtgacttgaaatagtctacgtaatcttgccatgttgtatgacgtgaacatgttacaaccttagcatcaagtacatctggaagtcgaagctctggtggagcattagttttctcttctatttgtgcgtcttgaacattctgtatctctttaggctggacattgatagtgatctagcaaagacaggtttgttggtttaagacctccctaagtttttgtaagtttgagctcgtttaaggaagggtagaaagaattgcatttaagaagaatgaatgaatatagtaaaacatttttttacaatcagctaatctagaagctttgaaaacaatccaatgttgattttttccagtttgaccctctgaagcttaagtaactacgagttgagagtgtccaagagatggacaaggagataacagaggcacggaaaatattcccatgtctttactgtctgctccgtcccaaaaccccttccaacttgatggcgttaatggacaagcatcagcctgaacctgagcttcttccctcttaacagctttacggctgatcagctggctttcatcctccgtcacctgtctcttcctctttgcttttaaagaaatagtcttcttgttgtctcccaagtcctcatgctttcctgcttcaagtgggaagttaagaatagctttgcttcctcgtagtttaaaagctgccttgtcataacctcttgcagcttccatggctgtgtcaaaagtgcctaaccagacacgaacacctttcttgtttgggtctctgatctcagccgcatacttaccccatggtcttctcctgacgcctctgtaatgcctttgatcattctcttgaaccaccggtgcagtagtaggaactgctatagtggcaagaggtggtttgcgttggcttagagttgaggtggtgcagtggtggatggtggaggcaaaggtgtctaaggaagggaaatcagtaagaaggtgttgggttatgagatctaaagctgactggtcttgttcttgctgttgttgatgtgaagaagccatagatgatgaattatgttggagtcttctttgtggttttgattatggattttggtttttgagattggaggttatatataaaagtgggattgagaggtttcgtagctagcttcttgggttggagagaggaaggatccttttcaattgttttgacttgtttagttctattgttgctttggagtgtggcaagtggactactctatcatttattattttaagataatgaaggatttgtggctatgtctttttcttgcgagggtccatcatcatagctattgtctatttccaggcttcttcatatcccagacacaaattaaaaatgtttttctgagagatatttgaaagaaaaattgacacttttttcttacttttaagggtaaagtttagttatattttggaaaaggtggatgcacgaatgtgtatgtgtccacttgactatgtgcctatgttagatggtattgctgccttggattctcgtttgggcacactgtggattatatgatttggccgcaatatttgaaacttatgttttttttcgtttaattgtttgaaacttttattcaatttaagttacttcatttttgtttctttgttgtttatatagaccaacttgcctattttgaacaatgaaagtttgaatttcctgcatgcaagttatatagaacaacttgccaaataaatcagattagaagatgttcaataaattcatggtcaagctttgaaaaactccggcccccacaagagtataaacaaaatgctggaaataaaagttttacgaggagcatttcacgaatgttggttaatcacaaaagtcttaattacttacttcaaaaattcttgttgacgaacaacaatgaaaagaaaaaagatacaagattttttgtcaccatgcataggcccgaataatatacagaaacgcaagatggatacaaatgccaaggacaccgggtaagtcggagaagtgctggtcgagaggacctacaaacataggcggagaagagctaagggtagaattaacttcattaaaacaattaccaccaaaataagaaacattggatgagaatctaactcctacactaggtgctcgacatttggatacgcatgtcggatttggtttttttaagtaaagaaatttaggatccaataagatatatataaaaaacgggtttggtatcgattcggatttgggtcgaatttaagatttcataacctataaactcggtacttttcagttcaaatgtttttctatctgattgtacctgattactcgaagttttacttgattaactgatattatatccgattatccgaaatttttacctagttatccgaaatattatcagattttccaaaatattgtccgattttccgatgtaagtaaagcttctatccatataagtgtagctaattttgggtaatcgggttactcgttcgggtatcgggtaatacccgaagcgacctgatacccaagattacaattacataggatccaataggtaaattagttatatcctacttgacccaaaccggttttttgggttggtttcgattcgggttttcagtttcattcatccacttctgttaatttgttaaatctttgaagttcagaaaacacaaggagtaagattagtgttggaaaactagaccagattcattcgcattcaactcacgccgtcgatcaaaggtatctggcgactccaattttgcctccacatagtctcaaaccgataaatgatcacttctccaaataacctaaaatagctgcccagtaaaaaaaatccctaaacccaacaaccaaatcaccacgatcacaccaccatccagacttgctagacgcaaaaaagtcatcgtgagtttcatcatcgatctaaaatctaaaacctttcacttctataaggcggaaccaccatcttttaagcttaacaaccataacaaacctcttacattatcggcaaaaaaatgctagtgaccgatccaaattaaatatattttttttttttttcacaaaaagtgatactttttatatagatcaagtgttgcaaaagatacaactgtggaaacttccacttacaaacttaactaacaagttaaagcatacattgttaaaacatggatcttctaaagtgaatgaagactccattgaacataacccaaaaggttgcagctacatcttcagattccatttctgcttgaatctccagtctattcaaacggaattgctgcacactaaccattaggtatgcaaatactccaataaaatcctgagcataccaattattcaaacccttgcttcactgagctaacataccattgccaaaaggtgtttaacgccaaaaagtgatgacagaataattagagtggttaccgcttctttggaggtttcagaatccctccttctttaagctctgttactttctgcttttgattccttcgaactgcctctggctgttcaacttgtgtggtcttgcgtttagatgagtcaccttcttcagttggcctggaaccttccccaatctcagctcttcttgatgattcaccaatctctaaaattcttgaaaatctagaagtgacttcatctgcaattggtggagagagatgagattctgacctgaaacgtggtgtaagagttgccatttgaggtttttcaaccatcaagttctgaggagtagctgttcttgaagggaacaggtaaagtcttgcagctgcaagctctgcagaattcaaaggaggggtagcagtccttggaggtggagttataggagcaggaaaggagtcatctgacagttgtgattgagaattcatatccgacctgcaaagctcctcatgtaaagccgctcttgtcctttctgccatgtcttgacctctaccatcatttcttggtgcaggaagaggaaccatgtaaggacaatgattccgttgatgagtgaaacgaagacaccgactacaaattcttctaagacgttcatattggaaacgtatgattgcagtctctccagaatcaaaccggattcgttggaagaaccttagtctatcagttataccaaacctgactcttactctgatgtatgcaatttgattagaagtagcttcctggaagtctatgaggacaatatgacccaattcctgtgcaatctcactaacagtttccacacaaacatatggcataggaattcccctaatctgaacccatagatcaatattggctagaaaatccaagtcaggaaagaactcccacctttgattgatgataaaccaattattaaaaagccaaggctctcttctttgaactgagatcaaatcaaatccaaattaaatatagaagattaaaaactaaattaaaattgaaaattaaaaaaaccgcgtttcactttaaaaaaaaccctaagtgctcgtctccttcgctttcctctgttctctcggatttaaaactcaaaaaaatcgtatttctccataagagtaacatatcactggacgtttcccaattatctcctcctacgctcccgactagcgtttatcctattccggtcgccgccggagaccttgtatctccatataatggtgtcgccgaaagatttagtggcgatagtacactcttcgctgctcggaacatcccggccaactccaacgcagcgtatcgaactcactcatgccattcgcaactcatttccctctcttcagaacctcctctctttcccggtacttgctcaatttccttgtactcgatgatgcgtccttctgttttctggatacagtaacgaattttgttttaatctctggcagcctccgaagccgtcggacagagcgcaagttcagtccaaagaaattcgactcccggattcgctgccaatatctttggatgaccaagatatcgctattgtaagtgtttgggagacgagtgtgtttgtttctccttagatttctagatgaacattctttggtctagtgaaggattagattttaaaatttagatatgagaacaactgacaccggctaaagcaagttttgattcaatttgtggatgcattgattcagagaaaggtgcctttaacgactctctgttcattgatatctaacagcctatgatcttcttgtattgttattgattgtagagcttgaaactgagtgatgagcttcacctaaatgagatagattctgttcgtctgcttgtatcttcgaatcaggaggtgcgattcctttcattttgcttctactctcatctcttatcttctaaagctctggagttattttctgcgatattttcttatattttttatcctatgtttagtggggcttaatgggacgagaccctcttgagattcaacggcttgcaactggactatggtatacagggagaagagatcttacatcaacgctatacacactcctgagggtagcttactctctcattatatttctgactttttttcttcttctagtgttcttaacgtcatcgcacattaccatttttctggttggataggcagttgttctggacgaggggcttgaacctgatcttatagctgacattcagggactcttagaagaactgattgaagctgggctcagacaacggttgattactcttataaaggtattaaccacttgggttctttataagttacatcctcataggtgtccattcttgaatctagtagaaaatattagatgtaaaagtcctttcagacgatcttgtgacttgatattttttgtttttctttggcattactatgtaattattgtattgatagcaaattctttggtgttaggaactcaatcgggaggatcctactggactgggtgggcccttatgcgagcgataccttattgactcaagaggtgctcttgttgaacgaagagctgttgttcagagggaaagattgatactgggacattgccttgttctttcaattttggttgatagacctggtaagctcctccatttcttataaagcttttgtgcgaagattaagaatgctacttgttaaacaaattcagctgttggatacagtgcttttcgttaatggtttggcttttccatgaaaagtacgtcgttagttctattgtatgccatagtaagtgaaactattgacaactggttttcacgtttgctaggacactatatatgctagactaattagatcattggtcaatgtgcaatgagatatattgtgtaatcatatatatcattgctatgtctgtgtaattatgcattgaacatgtttgactgaacttgagtatcatatgtgattatggtgtttggtattcatcctccgttgctctgatctcatttatcaaaaatttgaaaattttgattactttataatgaatattaagttgtttatatataggattaaaacactcttgtcatcacatatctcgttattgctcgaagaatattttctatgtcaatttcattcttcgaacatgtttgtttattgcaggttcgaaagatgtgaaggatatatactatattttaaaagataatgcagctcaattaactgaaggaaatgacaccataagttctcaggttcatgctagtcctgttcatgacgtagaggcttttgaagttttctttcttccctgcgtattaaatttgaaatgtgttagtttctgataaataattattttctttgttgcagattacttttagtcttctgttttctctcatcatcaccttcgtatcagatgcaatcagcagactatctgataagtcatctatgatatctcaagatgcttcatttaggacagactttcaggatattgtaagacgagttgatacatttttctttcgttcttctccctgtcaccaaagaccttccactactgacacttgcaaacacacttctgtcttgcttacgtcctaatcacctttcaggtcatggcttctggcagtgaccccactgctgatggcttcattggtggcataaggcttgcctgggctgtacatttaatgctgatacatgatggaatatcgggaatggatacaatttccactgcttcaacaacagatatggggcatatatgctcctgcctggagtccatcttctcaaaaaacgtgtttcaatttttgctggataatgttcttcgaactgcagcctaccaggtactttcattataaacatcatcctgaattttatgttctcagttagtgtccatcaaatgcggggtgcctatctggattccctgtgcacttgatatcatttgacgagctagtggaagagttactttgatttcccagctagtggatgacatgtttggctcttttaacttttcttgaagattgagatctgatattgatctctaccttggctagtagaattttatattgaatgagctattttgtaatggtgcctatggtgtttatattttccgtcatgacaactgtagtgtatattgtctgtttcatgaaaatggttttatgtgctggcctttatggataccgttttattttttcatgaattatatttttacttgattagtcattcccaaatgtaagagtgttctcatttctttaagctgatatttctgcttctaaacacgttatatatctataaatgatttcattatttgagatgtgattttattatattggtgtttggcgggtcctctttagatgctttgttcattcttgtttagtctctaggattttgctcgctaagtcagatctcaatttcaagtctctttccaggtttaccttgtgatctttgatttttcctgactcagcccacgttcccccttgtattggtgtatcattgtttgacattttgttagttgctacatgcagaatgatgaggaggacattatctacatatataatgcttatctgcacaagttagcctcttgttttttatctcacccgatcgcaagagataaggtttgttaaatatggagattaacgtatttctacttagcatttgtgtattgattatatgttggtgaccaaagtttgaacgctgcaacttaatcatgtaaagcttgtaattttttctccctacttcatggtctgataattatgatggaaattggtagtatctactttccatttagagggagtaacttgttgatgtatcagtcacagattctgagtatttcagctggatcacttagggaatctgagtggcatataacttcattaatggctgcacgttagatcattgctatttttcttatgttttgatagtgtctaattagatgaatgtatgagccaagatgagaaatacaatagcgtatctacatgtttatctcctgtgtcaagcctgacatcattattttgcaggtgaaggaatcaaaggacatggctatgagtgttctaaattcttaccgaacttctgatccgcttgatggaagtatgcagactgaagagtctgacaggccactgcccttcatttctcttatggagtttgtaagcaaaatttatcaggttgagaattactaccatataaaaatttatcaagagttctttatctttgtttttttttctgttatatttctcaaaaaatcttggaaaatgagtttgcttggtatcttgaagttgagttctgttcatatgttttttggtaccttattttgcttttcatagcacatagtgagcattcagaatccatctcgatcatatctcatttttatactacattcctggttttgtgttttttgatatttacaaccttttgcagaaggaacctgagctactctccgggaatgatgtcttgtggacttttgtgaattttgctggagaggaccacacaaattttaaaactcttgtggctttcttggaaatgctgtgtaccttggtatgagaaatctttatattggtattttggtgggaccttatttacttggtcactcattgagtttccttgctggcatctttatttaatttcaggcttccactcaggaaggtgcttctaaagtttatgagttgctccggggtacatcatttcgcagtataggatggcccactttgtttgattgtataagaatttacgatgagaagttcaagcagtctcttcaaactgctggagccatgatgccagagttcctggagggcgatgcaaaagcacttgtcgcttatctgaatgtacttcagaaggttatataactctattccaaatatattctgtttcaactttcattccacgtttaatatttttatatggtgctttttatctaagacaatttcagcttgtattcctaggaactgaactttaacagcgatgtggctctagttgactgtagaaattttttatatggtcaacaagtttatttttcatatgctgcaggttgttgaaaatggtaatcccactgagaggaaaaactggtttcctgatatcgaaccattttttaagcttctgggttacgaaaacatccctccatatctgaaggtcagtggcgtactggagattcttccccttacactttggactcgcaaatgctatgtggaaagcatctggtatcggtatctatataacttgtgttcattgtaactttatttttctgcagggtgctcttagaaagaccattgctgcctttgttaatgtctttccagaaatgagggactctatctgggcttttcttgagcagtatgatctgcctgttgttgtgggatcacaagttggaaagagtgaccaatcttctcaggtaattgcatgacttcgaggggatagttattagtagatattttaattctacttcgttagttaatataaacattttttacttatccgttaaaagacagggttgtcatgttgcatagacgattgatatcattgttttgttatgtaaagttgatgttggtaacacaaaaaattattaatattagtctaatttctgcaacaacttcatgtgatgaaagattgagtttcatttatttcacttaatactctcataacgcattgtgctatgttcactgtagctaaaacgtggatatcacgtgttgtttgatgctgcttttgcttttccaggtggagagaatcttcagcgtatcttcaaaacctaatgtcacatttcgtttatatgcaggtctatgatatgcaatttgagttaaatgaagtggaagcaaggagagaacagtatccttcaacaatatcgttccttaatcttataaatgctctgattgctggagagaaagatgtgaatgatcgtgggcgtaggtagtgatagccttagattgttgtatctttctatgaagcttaggcttcgtttttcttggtctaatgtttttatgtatatctttgtagatttattggcatcttcaggtttgtttatgatcatgtattcacaccttttcctcagagggcatattcagatccctgtgagaagtggcaattggttgtggcatgccttcaacattttcacatgtaagctcctgcttctgtttttagtaatttcctcttccttgctcggtccaatataaactctgatttttggaagaattaaggacatgtttctactttttaaacagcctatagtggtcctaccttttgtaaactacatcgcttttcatttagggcactatttatgttgaagacttgattaacatttttctgtatttcacttcaggatcttaagcatgtatgatattcaggaggaggatcttgatggatttactgagcatccacattttctggtgtcacttgaaacatcttcactgcaaacgcagctgccaattatagaattactaaaagtactaatttaatttgttgctttgttttctcttaccacattggactcatctcaagtagacatgcagtatgcagtatataattggttccacgtttttcttttaccaggatttcatgagtgggaaagctctctataggaacctcatgggtatccttcaggttggggtcaattccatcatcagcgagcgattgagtaaaacttatgggaagatcttagaaaaggctgtacaactttctttggaaatcttactactcgtctttgagaaggatttgcttgtttccgatgtttggcgtccgctgtaccaggtacttggttgttcttgtgatgcatctgagctttatgaaaagaatcgttgttcaagctatatgcaactttaccaactattcgtcaccaagtttcgctatttcatcaatctatacatccaatcccataaaagaaaattgcacaagattttcgttaaatttaagtattcctatctcgaattagatccacattctatttttcttatccataattaatgtaagttctagtgcaccattcgatttaggttactaactttaagtcaaagatgaagtgtagaaagcttagggaaatttcttttattgttgtcaatcataagctacttgactaatagcaataaatagtattcctccctccaacctttacttgagttggtttactttgaccattattgggttgcgttgtgtagaatgtgaaacggaactctattgtaaaatttggtaagtactttgaccaccagctatagcttgaacaacaattcttttcataaagcacaatcagcatgccttccctgattttatgttgaggtacatgatggtcaatactgtttaacttttgttattgctgcagcctttggatataattctctcacaagatcataatcaaattatagccttgttggagtatgtcagatatgattctcttcctcagattcagcgatcttcaatcaaaatcatgaacattttaaggtggtaacaaatttcgtttgagacatctctgtagtttgtttaaccacatacaacttttttcttagatagcattagcaaataccattataaacttctttcagatcctcagacttttagatgtttgattccttagctttgtataattagtttaaccttatgttttgatttgaattacatgggttttaattaataatatacttgatgacagttctcgcttggttggacttgttccaatgctgatcaaaattgatgctgcgaattccttgattgaggattatgccgcctgccttgagggacgacttgaagagggtgaagttgtagagaacagttgtgatgatctaggggtccttattatgcaggttagtttcagtagttgactgtttcacttaatagaatatcacactatgtgcactatggcttgggtcttatctactgtctttcatcatgattgattcattcgtacatattatatcatctcaattgtatgactttcacatttgtagcttctggttgataatatcaaccggcctgccccaagtatcacacatttgcttctgaagtttgatcttgatgcccctgtggaagggacagttttgcagccgaagtttcactacaggtttggttgtaacttgtatacagaataatatgtatttcaactatgatctcattttgttttacaatttgcagttgtctgaaggtcattcttgaaatgctggagaagcttccaaaccctgatataaacttcttactctttgagtttggcttccaggtgggacatactaatgccagatgataactatctggtctttttcagagaagtgaaattctatttggtctactgtcttttgtacacttaagttttactttttgcagcttttgtgtgagttgaatttggatccactaactagtggtccaaccatggatctattgagcagcaaaaaatatcagttttttctccaggtacaccagattttgcttcttcacataccaaaataatgccatattttttttgtgggctgcctcatccaagtcacaaataacacttatttttactcgtccttactttctattatactttgatgttgcagcacctcgataccatcggtgttgccactcttccaaaaagaagtggcagccaagcactccgtattagttcccttcatcaggtatatatattctacattttctgtgtcaagtgtatccgactctgattagttttatgacagaatctaagcggttttctctatgctatcaactatttttgttttaacgttttttccggaaatgttaaccgcctacatgcaatataattcttttgtggtagaatatccctaggctgtttttgtatctaatactctgttacgtttttttctattccatcatgcggaaagttgttcactcagcagatacagtaatttttagttcctgttttcctgctacgctctagtcatgtgcaaaatgataattgcctatatgcaatatttcttttggctggttctcggtcaatgaaaaagtgataatctgcatttatgcactacttctttttattgtgaccctttagaattcatgtaggtagttactttcttgctctattcatgtagatagttactttcttgctatgtctttcagaagcaaattctgttttgctaagctgtcaagtcttatttggtttctgctccctgtcattgtggagagattaagatggtggcacttttttctctcttgcttcttttgtaatagtttttgttatctaaacgtgttccttcaaatgacagattaataatctattacaatcctacatagtcgttttcgcatactgatatcatttctcattttctcaatctctacctttcccagagggcgtggctattaaagctcctagctattgcactgcatactggttctggaagcagttcagctcacctagaggcatgtcagagcatactttctcatctttttgggcgggaggtaactgaagcagcgaatgaacctttttcttccagtacatatcctcaggatggtcttgattatgctggaactagttcaatcagtaaaagtaaggtgagtttggaaacacctgcgttttatgctctactatactttggcacatcctagttttatccctacccctgccggcgttttgcatgtgtagcattggtctaagagtctaccattttatttttgaggcgatccatgcatgatacaaataactgtactgaccccactctttctaaactcaccagcatgttgccttgcagggtgatgtgcaccatctcttaacagtttgacatttattgaacagcagtatttaaaatattaagatgtctcctttttcatgcagcagcattttctttcactgtaaatctaacgatgttgcacctgtcatcatttcttgtctagttttaagtcgttttatgggtgctgctgtcttacttttgtttcttctttcgattgagttcaggcattggctttgcttgaaattcttcagtttagatctcctgatgcttcgatgcagcttcctcaaattgtgtcaagcctaaagtatgactcattggtaaggcttggggaatatagaagtgtgtttgcgtttaagtatatctctctaaatatggagtttaaaatttcaggtggaggacatacttgggaaccgtgatacctctgttagcggcagtatttactattattctgagcgtggtgatcggctaattgatctatcttccttcagcaacaaactctggcaggtttgttcttgcaataatggacatcagatcttctctctaatgaacattaatgtttctcctgtaattaatatttatgctgattcttttgtttgttcagaaactacattctggatttcccctagtagatagttttccaaatgttgctgagctgagtgaagttagagagacaattcaacagctgttgaaatggggctggaagtataaccgaaaccttgaggagcaagctgcccaacttcatatgttagctggctggtctcagattgttgaggtttatatctttcttaaaaatcagctcacctttagtatcattagcgtgtggcactctcttaagatatcaagtatttatcttttgtgttgtgcttcatatgtttttgttttaggtgtctgcttgcagaagaatatcttctcttgataaccggtctgaaattttgtaccggtgagtaccttttgtatcagaggttagttgcttgtggaagctttcttgaacattgcatgacttgttcttctctggttgttggcaggatacttgatgcctctcttagcgcctccgcgtctccagattgttcattaaaaatggcgtttgtactcactcaggtgcattttagctgttgagtaatgtttattgtaaaatgtgctgtctatgtactaactttaggtattaataggttgcccttacctgcattgccaaacttcgtgatgatagattttcatttcaaggggccttgagttctgataccgtgacatgtctagatgttatgatggtcaaacatttatccactggtgcttgccactcagttctatttaaacttgttatggcaattctaaggcatgagtcatcagaatccttgagaaggcggtacaattctaagttcccttagttgtatttttactttcttataatacaacataaagtgatattctgcccagcttatctaaatttagcttttcctcgtttctaacacatttacctttcttcatcagccaatatgcattgctcttgagctatttccagtactgccagcatatgattgctcttgatgtgccaacatcagttgtgcagttcttgttacttaatgagcaagatggtgaagatttggatatccagaaggcatgtgtttgctgatttacctgagtaagattttgttcggacgataatttaaatgttttttcctctttttgtcattcagattgacaaggagcaggctgaccttgctcgtgccaacttttttattataaagaaagaagctcagggcatcttggatctggtaattgttacttgtgtattgatatgagccatattcatttgcactgcttcacattgagaatactgattccaggtaatcaaggatgcaagtcaaggcagtgagtttgggaaaacaatatcactttatgtgctggaagctcttgtttgtattgatcacgagagatattttcttagtcagctccagagcagaggtttcatacgatcttgtcttggaagcattagtaatatctcctaccaggtaattttcctgtgaacttctgagcgtggtcattgctatgaatattgtagaagttttttagttgcgcactgctatgaaatttcttgttgcaacttgtttagctagtggtaattaattagtttgggcttgactgataaaccagcagaagtagattcaattgtatttgagtcaataataccctttcagtgcgtaggagttcacccatgcaaattcaagctcacagtatattatatatgcaagatcatcaaaataggatcgcaaacctgttgtaagagtggcataatgtggccaatttgctgttggtttgactttttgatccacgttaaaagactagacaccctatgtaactcgtgtgtgttttatgtcccatttacatagtaggtattggggatcacaatcttcatatgctgctagtttacatactttggagacctgatttatatgtgggttttcttatttcgaggacatgtcattcatgcatgtgtatttatcatattattgggctcaggatggaacacatttgctggagtcacaacagcgagcttgtacgttagaagcagaacttgcattgctacttagaattagtcacaagtacggaaagtctggaggccaggttctgttctccatgggtgcgctggaacatattgcttcatgtagagctatcagctttaaggtaatagattatctgtagttatcaagttttctatccgtgacctcaatattttctctgcttttaatccgaaaagtgccttccagggaaatatgaggcgtgtggatatgaaacttcagagtgatgtaggatataatgtgcaaaagcaacgaacgataatcactgctgtcctaagactggtgtttgctctaacctcattggttgagacctctgaattttttgaggtcagccgcgtttctttagatgaccttttttatgatcctttgcattgctaattcaatagtctcttccatatgtattggcctggtttagtgaacatgagttgccatttaaacactatcctcgagatcgtttagggcctttctaagactttgcagtttttatattcttacttgtgatttatttgaggagttgtgtgagagtaatacagaccttctaaaattgaatgacagacaccaagttcattttgcgtgagatatgaaattagtattattgcgcttttctctttcactaaaactaatggttgtttgcgtcttgtagaaacttgaatgatgtcactatttttccattgctattgtttacacctttaatgcctaaacaagtagaagcttaatcaaacattctgcatctcaatattagattcttttcacctattctttaatctattcaactaattatgcaagtccgtgttgtcgattattctgggtaactggttttcttggtatgcgaactataatgagttatttcctctttctctacctgggcgtttgataggggaggaataaaattgttcgtgacgtcgttgagtttatcaaaggacatcaatctctgtttgaccaacttcttcgtgaagactttactcaagcagatgatttattgatggagcaaattattcttgcagtgggaatattgagcaaggtaattctttggcgagctataagttcataattttcttttgcttctcttttcgtgatggcatcttcaaaagggctcataaaatcccacaagctagttagatgcgttttctagaaagtgagattgcttgttctgtaggtctggccttttgaagagaacgatggatatggatttgttcaagggctatttgatatgatgagcaagcttttcatcgcctccccgattaaatcgatattatcgcaggtaggacaagtagttcaggtcatatttgagtatcagtatatattttttcatgtgttagtggcaccttttcatcacatccttgaattcttatattcgatgggtttctcttttttgtttctcatctggtggacagaagggatcagagctcaaattgtctcagttgcgattcagcttgacttcttacttatattttctggtgaccaaaaattctctgaggttacaggtactctaccagttatttccctctgtttcttcattccacgttgacattattcagttgtttgaatgaactacaagtaaatactcatatgccccttgtcccaggtttcagatgattctcttgatagttccactaaactacgccaaccaacattgctgttgcttgcatctcttctttcgcatgtgactgattccctcgagagagcagcagagaagaagtccttacttcttcataaggtatattattctaattcctaccatttacatgtttcaaactctttttttttttttttacattcgaagttgcatgtatgattggcagattagagacataaacgagctctcaagacaagatgtagatgcgatcatcaagatctgtgattcccaagaatatgtcacaccgtccgacaacatacataaaaggttagtgaatttctttcttctgctcgctcatgcgtgcatatgccaaagcagaaatgggtattaacatagaatttttccagattttttctatcagtgattagtaagacgttttgaccactgtttttatttgttcgtggctctgttgttacttacctcaggagatacatagctatggttgaaatgtgccaaatcgtgggtaacagggaccagttaatcaccttgttactgcaacttgccgagcatgtactaaatattatcctgatccatctccaagataggtatgccactttatcttcaacaattgatatcttaaaagtttggaaatctacgggtttgctctaagatactatgctaaacacttcacatatgcagatccgttagttcaaatgaaaggggatcatatggttcaaaatcccatatacaacaggaagttacagatctctgtggcaaattgtcacctaccatagataggcttgcattactgaatgaggtaagcctaatcgattttcgagagttttcgattatttatgtgctgaaagtgaaaggtggtggtgacccgatttgtctatcccagggaaaagtaggacataacctgaaggtgttccagagactggcaacgactgtaaaagaaatggccatccaaaagtgtgtatgaaataagcttctcaagaaatgtatttttgtgtgtcaaatgtccaaatctaaatttgtagtatgagtctgtataacaaaatagtaaatccacatgatttcaaatgatactttctctgagactcttgagaaaaaactttaaaagctccagcttaattttaaagttatgaaagccaaaagttttaccattcacacttttaatgcttttctttttcacaacaatcttaactattctctgtttactattcacacctttaagttttaccgttcacacctttgaggcgaagagctactaattcacaacaatcttaactattcacacctttgagttgaagagctactaatactattctctgtgagccaagttgttttgggccgattggcttaatggatgtggattccgaacttccttttaattctttgcttctatagttctatagagtgggggaatgggagtgaccataacatcacgaccgatcgataataacgtccatcacgtgacttatgtcccggtccatgttgtgtactatagcaaaaaaaaaaaagacccagacgtacgtgtcgcaaaaaagacccatctctactcattaacacatgcaacggctgcatgaagacacttttgacacgtgacatggctcaagcgagccccaccagcgctcctctccttcataaatcatcattacttactccgaaaacacatcactaccttttctctgctaatttctactatttgtgttggagggatatattataataaaaagaaccaatggcggaccaaacaagaacccatcacgagatgataagccgagacagtacccaagaggcccatccgaaggccaggcagatggtgaaggcagcaaccgctgtcacagccggtggatccctacttgtcctctccggcttaacactcgctggaacagtcatcgcactcacggtggctactcctctcctcgtcatcttcagccccgtcttggttccagcagtggtaaccgttgctctcatcattaccggattccttgcatccggtggctttggaatagccgccattaccgccttctcttggctctacaggtaatttacgacccacacaaaatgtgacctaccgtttcaaaccgagcttgcaatgcacgttatattttatagaaagtttgaatattggagaatatggtcattgtatttaggcacatgacgggatctggatcggataagatagagaatgctcggatgaaggttggaagcagagtgcaggatactaagtatgggcagcacaacattggagtccaacaccaacaagtttcttaaaattcaaaggctaaaaacgatttccacattaaattgtcatccatcgttagatctcttctctttgtttttattttcaacgtttatgttgtaatgtgtgatatataataacatgcaatgtatgatgtaatcttgttgttgttgtatgagtaatgttttgatccttctatgcgagcggaaatcttcatatagacagtgtcattggtacattacacaaatcttcataatctccttctacgctagcagaaatctttaaccatgaacatttgttctctataaaagcgctgctattatgtggtaccaattcatttgttgtgctaacctcaaagaccaacaaaaagaagaatttaataaagatgatgaattccacgatctaacatactatagttataatactgtttcaaatacaagatcataaaatgttgaatggcagataagtaattacaatcggctatcgccttgtagaaaagattttgagcattagtaagccaattaaagtaccaaataccaatgacagtaaatgctctaattcagtaatcttattcactttcacattgttttcatgatcatctggatgctaacagctagcacattcccttgtgtaggtttctttggtttgatataagtaaatcaaatgaaacagagaaacaaatgaaagattgattcgcaaagcaccacagcttcttctaatttcattcaaatcacaggggcttgttctccaaaggggtgaaggagaaattgccggagaatatggactctttatctgtgtatgacaaaaaagaaccatataagaaaaggcatgtctattcgaaatgcaaatgcgagtaacataatgaggcattccaactatagcgtcataggtacctgttaaagaaagagaaccaagttctctccggacatatcttgccattgcctgaaacacacaagcaatgtcttaacaagtttggtacacaatgcctaaactagtatgtcaatgtgtgtgtgtttgcgagagagatagagaggagaaaatcatgcctgtgctgtttttaaatctgtgttatcaggtgttgttgttccatcatcagaaaatacgttcctacaatccaattgcatataaggttctgagacaaatccgttatctatggctgccatattgtatataaattcaagccgagctacttagctgtgtaatctctaccgaactcattgcataaagcatgacgttatagaagctttacctccataatttgatttgtaggtcatttggtttagcttccggaagtagcgcagcatcataggcaacaacatttccataaaatattctctccaactccttcatccacttggctagcagcaagttaacctgtaatttcaagaaagattaagaccatcttattttaaggaatctaagaaactaagatatctcttcgaaactatattaaagcaaaaccaagtctagcacgtaccccggctttagataccctgagttcaacatcatgattgtagatctcatagacgtattgaccaaggtcaacaccttcctgtccatcttccttcaagcggcgtaaaacaagccacatatgaaggacaagcagcgaatacgttattttgaatgttttctccaagttgaatactgcagcagagacagagcacccgatatataaacaaagcacaaaatgtaaatacataactctgtttgcaaaagttgtgttggaaaccaaataaagtaccatcatatattgcaggtttatcaacttgtgcaatgatccgcttgtagatcacgttagccccacggatagacatgctctgtttgctatagaacatcatcatctttagtatgaaacgacgaatccctacatagtctggttcatcaattctgagaggagagtctttaggcagagccaatgaacatggctttgaccaaaacatcttatccaagtttatctgtcaaacatagaacaaatccttttcatcaaagaagacacgattgtccagaagcagttgactaaaagagcatgaatctaaatcacaaacatactaatgaaactccaacagaaaaaaagggatgaatcctaaatgaggtacaatggggaggcagaagtcactttagtcccgcattcgatgaaactagaaacagagagaatcaaattgagcttaggttcgaatactatagtgagacctaaacattcacaacaactacgcattaacagctacttctgaaaacgagatctttaatctgagtaaacaaaatgttaccactttaagatcataccggagatttactggggaaatccttctgcgacggaggatcagctgccgccggcgcaacagtcgcgtacccatatcgggagaaaaaggagagatttttcatcgatccattagtggtcaaagatcgaagctttgaggtttgagtgacgactcgagctaatctgggcaacattagagagaaacccttgtggttttactcaacagatgaataaatctgaagggagaaatttgaatgagtaagatcgaattctaaaaccctaggcgaaaaaccctctccgactccttttctgtgtgattgatgatggggctaggtagtcgtccacgttagcgtctatttggccagatattcaattacagtgctaacttacgccgttattaggaacggaaaaccttggttatgcaaaaacaaacacattttaccgatattggtgacacgaaactgatggtcgattttagatagtaagagttgatgataccataaaatatgtttgtttataccattatcattttagggggataaggaactatgactactttgtcatccatttttttggtggatctctaatttgaactcaagtggcttatattgaatagttaagaaattatgctttctcatggccattggggaatttagtttcaattagtgaaaagagttttaattagattttattgtgcaccgaattttactgatttaggacatggtttacgcttattttctcaagagcaaaaatatttacggtctcctcaacaatatcatcaatttacactttttattactcttcgaaacgcttcatctctctctttctctctctcaagctgtcaaagtcacctctgtattcgcgtgaagataatttctcacaattagggttttttttttcttctgagttaactgttccatctccatcctaatcttcaccttctccttgatttcgagatctctgtcaatttgttgaatctgttctttatctaattagctcaactccgagtctttgctggattttgaaggtcaccactgttcaagtttacattttttttcctgctaatcgcttgatacccgtttctgctgttgtgggatttattgggtttttcttctttacgatttttgttgcagcttttgtagctgaagcaaatttgtaatctgtgatggtgtatgcactgattctgggtatggtattgtactctaggatctcgtagcgagaatgccaggcattcctcttgttagtcgtgaaacctcttcgtaagtctcatgaacaacctaatgcttctataatgtctctgcagcattgtgtaactttatactgtttctcttatgtataagctgaggaatcctagtaattcaaacttatcaaatttttattttgttgtggggttgcttacaattttggttgcgtatgatggtgaaatcacagttgttcaagaagcacagagcagatgtgccatgaagactcccgtctgcgtatttcggaagaggaggagattgctgctgaagagagcttggctgcctattgcaagcctgttgaactctacaatatcattcaacgccgtgctattaggaatgtatgtcttccttcctaccttttttagacagaatatgtttagttatgacttatgagctcagctgatatatcacatgtattggtttacttttgagttttgacaatgaaaatttacatgaaaatgtagtttgagttgacttcatttggtataagcaagtatgtgttgtcttgctatgcagtccatcctaatcatttctctctctctgtctcccctgtagcccttgtttcttcagcgatgtttgcattataagattgaggcaaaacataaaaggaggtaagctttttttttttccttcctttctctgttcagaatctccattacttttgggtaactattacactataccttagtaattcattccggacttgaatgctttctaagttttcggatagttatcaatatatattactgctttgcagaatacaaatgactgtattcctctcgggcgctatagatgctggggtacaaactcaaaaattattccctctgtatattttgttggcaagactcgtttctcctaagcctgtcgctgaggtatgcatttgaacctcagacagatttgcattgatctttattatttgtaacttacctattctttgctaacatttttcttgaaattctcaaattatagtattctgcagtatataggttcagtcgagcatgtatcctaactggtggattgggggttgatggagttagtcaagcccaagccaactttcttctccctgatatgaatagactcgcattggaggcaaaatcaggatcactcgctatcttgtttatcagctttggtgattaagactgactgtgtacaaaattatataaagacatttatatatgtacagtattcagataaactgatcacataattttcttcttgtagctggtgcgcaaaattctcaatttggcattgattcaggcaagattcattcaggtacttccatttcttcattgatataacattctaatattgaaaagttatgtatctttgggcattaccaattttccatgtaatagtatggaaaatctcagtcctatttattaacaaaagaattagggattctttgactccaattataagagtttctgaaagtcttttttttcattaactcttaccatcggaagcgtttttttctgccaggaaatataggaggacattgtttatggagcaaaatacctctgcaatcactgtatgcgtcgtggcagaaatcaccaaacatggacttgggacagagagtagacacagtctctcttgttgaaatgcagccttgcttcataaaggtaaacactattgcccaagtcttcctcttgttctatgactttatgctccctgtattgaaataaggactgtgtattgaacttcttttgttatttgaaaaagtaaattggaagtaattgctactgtgaattttatttttgccattagttttcagtcttgattatttaaatgaaaatattactggtataacttgtccattgctgcagctaaagtccatgagtgaggaaaagtgtgtctcgattcaggtgcccagcaatccactcacctcggtaactttgcacactttgctatacttccatacattattctgaaatatcatgtaatcatattcttacaattcttacacttcttatttgaagagctctccgcagcaagtgcaagtcaccatatctgcagaagaagttgggtcaacggaaaaatctccttatagttcattttcatataatgacatctcttcctcttccttgttgcaaattatcaggtaatcttcagtttagtctgcaatttcttctgcgctctcagatttcttgcctcatctcattatgattttttgtaattgtataaaatatattggccggtctgctatctcccttaatatatagttggcagttttcttgaattgtgactgtcctcctcttttatggggattatacaagtcgttacgtacaactaaaaatgtccatctcgttaagttgactctataccactacattcattgcataggttgagaacaggaaatgtagttttcaactacagatactataacaacaaattgcagaagactgaaggtaactagtattattttaacctgtttcatacccatgtgtgtctatatttcatccgttaccctaacctgttacgtatatgtttgctatgtgtcttgcagtaactgaagacttttcttgtccattctgcttagtaaaatgtgccagtttcaaggtggactttcatttccattctcattcatcctcttagtcaaagatacagctgtagtgactagtctttgtagtgatgcaatcttttctttttctcccaatcatgttgtagggcctgagatatcacttgccatcaacccacgatctcctcaatttcgagttttgggtttgtagctttaaaattcagttaacctgtttgatcttttttttttattttgtgggtgccactaatctgctttacttggttaggtaactgaagaatttcaggcggtaaatgtctccctcaagactgagacaatgatatccaaggttagaacatcttgtttgttcgatttatgttcattagtttctctgctgtatatcttataggctgtaacaaattcatttttcatttaaactaatatcctccatgggttgttgacttttgtgtggttaaataagggaactggaatctttagttgctatttgtcacactatgatccttgctattgtccttaatagcgtgatgagaataaactcaaaatgacatcgctgttctgtttactttttgtggccatgagaccgtcaaagctcgactgtagaataaagtcctggattatataggagtgtcaaatctaattgaagtagttggttctacaatatattctatgtctttgtagtttttcctatttgatgattactcttagcacagttttctaaatgttaatgttcattaaaaaatctgctcaggttaatgaggatgacgttgacccaaagcagcaaactttctttttttcgtaagttatctggcctatatgttgccttttattatctttccagcatctgtgtgagaccataaaaattcttcaatatgtgacagttccaaaaaattcagacggaggaggcaaaagagtcaggtacggagctcaaggcaagggcctcatcttggattaggttgcgaggtgctagataagactgatggtatgtgtttgactgaaatgacagttaattggatttgtagtattggcttcttttgtgatgagagcctgtcttagttgtatattttacgagtattttactttgttatgtgcaattttgcatgcaacaacgttggatcatttggcacagctttttattcttactttcagatgctcattctgttagaagtgagaagagccgaataccacctggaaagcattacgaaagaattgggggtgctgagtctggtcaaagagttcctcctggcacgagtcctgcagacgtgcaatcatgtggggatccagattatgtgcagtcgatagctggaagtacaatgttgcagtttgcaaaaacgaggaaaatatctatagaacggtcggacttgaggaagtatgtttgacttccttttgtcgttctatcctcttcttcaatttatatttaactacatatggttcatgcatgaaaaattgtgtcctagttttataacaagtagcttgttaatcccaaatgatgtgagtgagtttttcaaattttttcctcctccagccgaagcctccttcagaagagacagttcttccactctcatcgagctcaggtgatcttttttctttagctctcttgcttttgaagattgcaattgattttgactttgctatgtgtactatcgcagcccatggctctagaacaagtactttcggaccgggatagtgaagatgaagttgatgatgatgtggcagattttgaagatagaagggtatgtttttgaatttaatattttcaccgcatcagtagttgggtagaataaagctcagtagttgggtagatatatgtttcatgtgaaagggaaaggaatattgaagactgggcatgggcaaacgttaggagcaatattgtaatggttcagagatcaatagaaaatatgtgagcaagcctcacggtttgatatggaacagtagaaccagatcattagtgcttatataacactcattaaaagacgaagtgtgtccgtttgtactcgattctaacatagttgattctaacatagtttgtctgattctccatatagtgaataacgttatttcctattactattctttcagatgctcgatgatttcgttgatgtgactaaagatgagaaacagatgatgcacatgtggaactcgtttgtgaggaagcagcggtatgtcttatctcttttcagtacatgtcacgtggagttttccagtataaacatttagagtcgcgcatgtaaaggttgtggataattcctgcatgagttcttctggttaaaaaaaaaaaactgaacaattagataacatacgcatccatgttctctgactcattataagcattaccttgacagtggttttggaccctttgcagagtattagcagatggtcacattccatgggcatgcgaggcattctcaagattgcacggacccatcatggttcgaacaccgcacttgatttggtaattcaactctcatttcttccattgttttttccagtgtatcggagaagaaagcggttttgttgataaaagtgagctttttttgtgtaggtgctggagagtgtttatggtgaaactgtggaaccacggtcttcttgatgcccgaaccatgaacaactgtaatacctttctcgaacagctccaaatttgaaaacccaagaaatcattaatttaagtagaaaaacaaagaaagacaagagaagaagagttttgggttctcatttaactacttttggtgttttaagagaaagaggagcatatttatgcatgaatttgtcctcatcttttttttttttttttttaattataaatgtgtacattggcttatctttgacgcttgttcttcgagtaatgctttatacatgttccttactcatttaggatatcatatggttgaaaacttgaaatactaattgactttgtacactggaaaccagacatggatgttactctggaaacatgcatcaacatatgtccatgaaaaaatattagttttggtagaagaaacaagctcacctttttagattgcaaaatcaaaaactttctcaaaaagggaaccttgcttatgttgagagacaagcatcgtatggatcaagagtactttagcactaacactattatatattataaatctagtcttaacaacatgattagccaactgaatgatatataacctagtgccattgcatagatcaattttatgatcaatatttccaagtaacatgagagggccaccaatcttcagtcgcaaactgttgttagtcaatctaaacaatttgatgctattcagaaactcttgagagtaaaccataatatcagttgtgtttgtaaccgacgtctcaattctacacatggcaatatatagctaatcaattcctataaaattcataaactaatgtgggtattagaagaaaaaaacgttgttatctgatataatgtgatatagcatattaattactcgttaatcatattaacatcttggtttgttggatttagaatagctcgatctctctcttcaaagaaattatgatcactctcttttgcaaatgagtctccataatcttcctttactatttcttctctagatgttcgtgctcaattatcagcaaatcttcagggatatcaatctcagtctcatcattgttctgtcaatcaccaatatttagaatagatttagaaaatctttaggccatgtgggccggggcctgtgaagaagtcactacaaaccctaaaggaaacaatctatgggaacaaaaacccctgtgatatctattttatccacatgaactgaaatgctttactcaatgcgctcttgatctatcatccctaggaagcgaaggatcaaatcgctcttcctgtagcatccgctttgagatcaacaaataatctacctttgcttcgatccgatccgaggcaaaaaccctagattgctgctcaagtaattatacatgctcttttctcaattttttattttcttatctgtttctaaagtattgaaaacaaaaagaggaaaaacttatgtgtcatattgaacttaaacagtagagtcatgtcgtcacttcccgatgatttgctattgagcatcttcgcacgcatctcaagattgtactatccgactctctctcttgtctccaagagcttccgatctctactagcttcaccggacctttacaaagcccgatcactcttaggccacactgagagttgtctctacgtgtgctttcattttgattctggccctaacacacattggttcactctctgtcggaaacctgacggaaccctaaccaatgacaccagtaagaagaagaagtcaaatgggtatgttttggctactgtgccaattccccattctcctcctgcaaacttttcaagtctcgtggcggttggttctgatatctacaacattggtggatccatttacctaggaccctcctcgtctagtgtctcgattctggattcccagtctcacatgtggcgcgaggctccaagcttgcgggtggagctgatgtcacattctgctagcgtccttgacagaaagatatatgtagcaggaagctacaaagatggcaatggcgattccaactcctgtaagaacttgttcgaggtgttcgacacaaaaacacaagtgtggcatcctgagcccatcccatgcagcaagacaaaaggcattttttactccaaaagcgcatgtattgatggaaagtttcacgtggagacgactcacggagtggtgtatgcttacaaggaaggtagatgggacaaggctataccaacgatgtttggtatgagggcttcatattctttttgcgagataaataatgttttgttctatattcatcgcggagtgttcagatggtatgatactaagttaagaatgtggagaatattgaaaggtttgttaggactacctagtttacctgagaatatgtttgttagattggctgattatggtggaaagatggcggttttatgggaagaggatcgcccttcttgtggggctggtggcagagatgagatgatgatttggtgtgccgtgattgcgcttaaaaggcacctaaattttagtttttggggaaaggttgagtggtttgatcatgtgcttacagtccctaaacaacatgttttcgttaaggctcttactgctagtttgtgatgaatgtgccacaaggcttgaacatgtgttcttttggagtatgcaacgataatgaatgtgactttttctcttaatgcacttcttattatttgatgtcaacaaaaaagaaactaaagagttttaattttggcttactagagtttagtgtaactaaagatgatcacgaatacattgtgaaaaaaagaagttaaaacgagtagtactatatactatctactctgtataaaacagagcattctctgttattagtacatttagtagcttgacaagttacaagcaaaggcaatccaactttaaaaacactttgattgctctaatagtaagtatatacgatttttgaaatgttttatataggtcgtcaaataaagcccttcaggggatataatacattggatttgcgagtttgaaagatcgttgagacatggaggtacccaacaaatcactccattgatcacctgaattgcctctaatcctatatccctctttcaccatctcatctctcttctcagatttgtatagtgtcgccattttgtgctgttcctctggagatctgcacatcacacacagacacgagggcaaagcaaaacgaataaacaaaggatgttcaaaactgatgatgatatgtctaagatatcttatcaaaccatttgcagagatccagaattctatatgatccaccagcatcatcaaccattgcataacgaacaaactcattgcatgacttaaaatcaaagagctacccatgtttcttatcaaactatatgccaccggcatcaaccattgcataacgaaaaaactcatggcatgacctagaagcatgtatagttacaacctaagaagctgcatttgtttataattatacctgagaataagcttgtcccagttctggaaaccagcattgatgagattttcaacagtgacaagcctgtgactctctttcctccctgtaagcaagaaaactttgtatcccaaatctaacactctttggtaaagcttcaagcttggtgctatggctggtgccactcctctctctacccacttatcaaactccgaatgatcaaaaagctccaaccttcaaaattcccaaaacataatcaacaaagtcaagcattttctataaccaattgtcctcttttatgagtttctctagcaaaagaatcacatgaacatacacaaaccaaaccaagtttgagataaaaatgtgtaaagtaaaagttttgagagaatgtacccaaaaccatgatcaatgtaataaggaagattggataagagagtctcatcgatatcgaaaatccaaatatctttgccatcgccggagaattcgatgcttctcgcgaagatcaaagcttcttcagagactctctccaaatcggtgaggtagcctttacccatcacatagtccttcacgtaatcggcacattccaccgggattgttttccacggcgcgagattgttcatctccgccgcgaatctccaggtcgtacaatgcaaattgacatcttcttcggcagctttcttgtgtcgactctcgatttccgacgggtactcgagaatcgaatcggaaaacgcggaggtaaataaggaaaccaccacgaggaaaatcagataaatcctcatcggagaatcaaaggaaatcgaatcaatcaaaaaaaaaccgaacagagaaaaaaacgaaattagggttttctgaatttctgagaattcacaccaattgagaaactagaatcaaaattagggtttatattgagatgttgaagaagaggggaaagaataaaatggagaaaggaatcgagaaaaactcgaaagccagagaaaagggaaaattttgaaagtttcaaattggattaatggaataacgtacaaaagaagaaagctttgaattgtaatttcaatggagaaatgaaaagaatcggaacagtgctctgtttctttcatttaaagcagtggaggagaatgtcaaagacaggagtggtcggtcggtgacgtgtaagaaaagaaagcctatttatttatttttcactaattaatccaataaaagaatctgttcgtttcgggttcggatctaaaattaagatacaattgggtagatccggattccgttgatgcaccgttgggtccactaccgggtcctttgacggcgtcatacctttttttttttaatttcacctgacgtaattagtttttaaatatgcattacataatagtctggtaaaaaaaaaatgtttggttaatttggtttaatgtctaaattattcggcaatgaaggcttgttatgtgattcgagttttattattctttaattttacttaaatagacattttattatgttaaataatacattaatttagacatggtattcaagtttagatgtagagtttaagttatttctaaaatgtcttcttcttttttcattttatgtttgtatgtgatgaattataaaggaaaaaagaattactgatcagaaaatttcgtacgatctgtttaatgaagtcaatttctgatttaagagactataaaagtaacaaaatttcataaactattataaaatctgagtaagatccttaatccaaagtttaatactagtgataatgggaacttatgatagcggatagttgcacgcacgctaagctacgcctacgcgtggagtgttaatggaattgattgtgacataagtttcaagttatttaaccaataacgtgtttataagggctgattaattataccattaatgtattatgaccaaaactatctcacgtttggagaaaaagtcaataaacactatttagcatgtgttaaaattttaattattttcgttgatcacaacaacaaaaaaaaagataagggatacagatttgattatttttatgtcctttggacatgtttacttttcggacaagtcaaaagatatattatcttttggtgatacaaatttgaagttatagaaccattcaaaagttcatttgtatctaaaactagacgcattaaagtagaagctgtaataaaagcaaacacgagattatgagaatctaatcagatttagatcgaaatggtttatgaatcggttaataccaaattacatattacagtatgcaactctttacatttcaaccgaatccacaaaagtgaataaaataaatccaaatgcagtacaaaggtaattccaaaagaacaaacaaacgaaaagagaaaaaggcggtgagaacacctcgccgtttctctatgccgaaaaacgctacgcagtttcaaagagaggcaccaaaatggagcgcgcttttctctgttttgcctcactgatttctatttctccattcgacgatggctgcgtaaagagtgtgattgggcaaaaggttcacgttttgtaacggcgaattagtaaccggagacgtccggtggttctccatccactcctctatggctctccggtcataagtgtacccatcagccgcaatacatggctccttcatcacatcctgcaatataacaacattcttctttaaattaacctcacttctcttgcaagtaaacagataacgtagcaaacaagttattaccttaagtaatggacagaagaaatggcttggaggttgacttggcgcagcggaaagcgagtttcttgctttatcagctactttcttcaagctttccaatactggaagaatctgatcttccaaatcaggcctgtctttagaacggagctctgtacactggagtgctaaagcagctaattgcctagtttcttcgattggccagttacctgctttttcatcaagaatctgtattaactcatcgtcgttgttgttctccatggctgtttctactgtatatgtcagtgccatagcctgttgaccagtgagaagctgcagaatgatcattccgaaagcatacacgtctgattttggagatatccttccggttcgttgatattcgggatcgatatagcataacgttcccacggggcttgtctgcttgtacattgtgaatttggttgacaatgggtcggcagcttggatcattgtggaaagaccaacatctcctactttgctgacaaagttgtgattaagcaagatgttagcaggcttaagatcgcggtggatgattggtgtcggttttgatttgtggaggaaaacaagcgctgatgcgacttcccaagcgattcttaaccgcacgaaccacgggattggttgactatcgttgacttggaacagtctatcttccaagctaccgttttccatgtactcatacactagagcgccatgatcaggacatgctcctagaagaagaaccaagtgcgggtgcctgatcttgctcaagatttcgagctaagaggttaaatggtgaatacaaatgtcagtttttttgaagaaatcagagaaacatttcaaataagaattatgttttgattggttacctcttgatcgaattgcttggatagactactttcagcagaatgcaaaactttgacagcggcgattgtatgatgcagattgcatttgtaaacatccccgtaagctcccattccgatctttaaatcttcagagaatgatgaagttgcgttaataatttcttcccacgtgaactcttggtattgcagcttaggagccacaagggaactttcttcaagcttctccttctctttggcttcatgggttgctttcatctcagcttctcttctttgtgcagcttctctctcttcccttctcttctgctcaaacttctctgtttccttttttgctatccccttcgtttcgtgctccagaagcgttagctcttcaaacttaagctcgtttagctgaaaccataaaaaaggggcagatttattagacacacaaagtatgctttatcaaacacacgttatccttttctagagatattttcaagccaaccttacgagaagcatccaacgtttcaacttgagccactgcatacatttcatgagcgtgtctaagctcagctctcaacttcgaaatttcattaagcgtgtcctgaaatcaatgaaaaacatatcaatcccaaatgctttcgatctcacaagaggtttacaaaaaatcttatcgaaccttagtttacctggttgtctgtgaaatagtgtccaaggggagtaacaacatttccgtattcaaagttgctagacatggaactcatagcgtcttttctctcgtcaaaatctctaaactgaggattccaagaaacactacgtgatgtttcagggctacttctcttgcttgcttcctctgcagcatccgaagacctctttttagtttcatctgactcagtagaactagtttccataggaacagaaacccctcttactattgtcgggagattttgcattctcttattggacagagtgtgagggttagatttgagtgcattcgacataacatctaaagaatgtacaaaagaaaagcgaagaaaaatcagactcataaatcacacatcagtttctggtaaaaagattggtgaaagctccaaacctgagttagctcctgaaccagaagaacagctggaggaagttctctcaaaaccagattctattgaagtgtcattcctctccgtgtctgacgtgtcttttgcaagaatatggactcctccgtttgagacaacatagactgtgcacaagtttgacacagatgctgatatcgacgctgtaatatcataattcctggaagtagtttcaacagatatattcattcagaaaactctgtgcaatcagataatgaaaccgaaaagataatattccatgccatacctcgaggaggcagcttgagatgagcgtccaatgataagattgctgatcaaatgctgattaacctctttggttatcgccactgcaacactatttgattcaagcacttgaagttctactgcaacctttgtcaaagaagattcaaaacgagtttcatcgatctttagctatataacatatctgataaaggaagaccaagaatgacaaaaagttaaataaaaacctttttccgctcgcacattttcttgaaaggtttaagaagagtttcttttgtctcctgcatcactttttgtctataagcagccgctacttcctctagttcctcggatatagagactatgttccccgctaaggaaggaaacagaaaccggtatcaggctcttaagtagtcacaggaagtctcaggtagagaagaaaatctttggaacttacaagctgtaggtagagtagtaatctttggatggatgtgaatcagcttgaaagtgacatttttgtcagaaccaaacttgttgagcgcccacttaattacattcttgcttttaatgctcccactaatagctaacgcaacggtcatcggttcagaaggagccgcaagatcagccctcttaggaagctgggcacgcacagcctttgggtccagatatgagtttttgaaaaaagagtccattttattctccagaaagtcaaagcaccggcttgtagagcctctacaatgtcacagccagctctacgcaagatggtcagcaacggttctgctcatcgcctattctttcctccaaccaaatgagacagtagcaatctgtcattcaacaacatcacaattgaaatgaagatctttgagccaaaccaaaactagacaaccaaggaaccatagagaaatcgatatcacattgctgaataaaaatgtaaggttttgacaagatcctgatttcaaacagagaatgcatcgatcaagagatgctttgatacgatcagaattcaatatctagatagaacaaaaggtcaaaagccacattccaaagtctatttagatatagacagctagacaatgcaattgcagaggaattttgtaactctgaacctgaattttgagatttaagcacataaagtttcgaaatttactagaacaaaagcttggaaacaagaaacccatcaagccaagcatgatcggaatctctaataaacaagaaaaagtcacaactttgacctacctgatatttaaaggatgcaactttaagctgtggcataagaagaaaagaaggtatctttctcactttgccatcttgaagttgaagaagcgatggagtcttctattctcacacggagacattgacacaaagaagagccaaagacccaagttcgtggcttcgttcgtgctcccaatttcagagacagtcaattccttttgaataaccacataatcttatatttatagaaacaagaaaaaaaatgaagataacttggtcatgcatatgactcatgattcattgttgaagattcttctttcactcttttttattttgtttttgataatagattctttcactctcgttatttactagctcacacaaggattttcttcattatcagagagctacaaagaagagggaggggcttatattatttctcattttttttttatgtttgaaagtttctgccaattctcaacaatcttatgaagggatttgctaactagtatttttttttagatttggaaaatgtctgttttggaaactaatattatttttgtgcacggctggatatactttttcaaaaacatgaatattattaattcatcaagaaattaaaattaaagatgaagtatatattgttcttacttcggaaaaattgcatcacatgatgttagtcactttatatgatatcttgaggatttaacgtttttaaatatttttgtagtccatgttacatagtgtaaaactgtaaagtaacaaaatgcgtattcttcttaaatctcacatagttctgccatgtatatataatccctctgcatggcacttcaaatgagaatattgaatggagagtcggagaccatatgaaatcatggatcacgttcatgatagagatctatatatcccaattcacatatatactatatatattctataatatatcatctaggaatacagatgaaactgttacagagaataacaaaatttcgtgataattaaatctaatattcatttattattcttaatactttgaatatatatggaaaaaacatttatctaaaataattcttctatttaaataggggacttcagatttttaaaatttgagtattttgcttgaagaaatgagtatttttttataaaactttccttatgttttaagatgaatttttcatcttgtaactagacatatgatgtaattccaatttcttttacttttattttttattatatatgtaattccaatttcatttggtttttgcggttagtttacgaatgaattctacatattacaaaaatatcataaaatacatataatgatctatattttaatggggttttcctcccttggttgctcgcatgatctatcttgccatcacgtctttttgtctcccgatccctataatataggtatgtgacaatgtgtgtctatctttttctttctcttttaagtttttaaccaatccaatttttgtcaacaacacaatccaatgaattctaactaatatactatgaaagtggcatattaatataagtttatatgaatgaacgagaaaatgcacttagacataaaagagggaaagagagatacatatgcaatgtcaacgttgctcagcttcacaaacccatgttatgaatctttttcttaggtacatcaagtcgtatgattctttttaaacaaaccatcaagtatgattcattatatggttatatcccaaataagaaaatatatagataaatacatttaaatattgcatgatgtcatgcaccaaaaagcaacaatatataatcaacatgatatagaacttcgaccccaactcctccttcttacttgaacttgtttttggaattgatattatttttgggtaaaattaatggttaattcatttgagtcaggtttattttcttttgaattcaggtcggactttgaatttctttttcttttcttagtcaatatcatcatggttagatgcgaaccatgaccgggacaatatcggctatgtattttctgttttggtacatgtcactatgtcaccttgtttaattttagttgttctgtttgtgtaactacgagtctacgaatacattgtctaatgaaatgtgttgttatgttatatcacatgtcatatatagtgtaactcacaaaagatgtatcatgtcattttctttatttaaatcgtgttacgtaatgtgaagaacttaacaatatattagcaattttaatacatctgaaaatcattcaaaaaatcgaaaaacagaacaaaattttgttatcgtaaacaaccaagttaaatgatagatgaacacaatagatcaaggataaaaaaaagttgagatttgagatgaatttgttttttttttgtttttgtcactgaaatctttattgaaagcccattaacttacagataataggcccaataaacaaaatttacacgccgtctaaacccgatttccgacgacctacagaaaaacttcggtcggtcagtgaccctttaaaggaaagctattagcgattgattcgagagatgtgcaaagcttgttgatttgaggctctctctctactagggtttgttgatttgagttttctattcctcctatacgtgttcttcgattctcctgggatttttttttgaaaaagggaatagaagaagaagttgctgaattctcgatatggaatccatcatggaagaagctgatagttacattgagtatgtatcagtggcggagcggagagcgattgcagcgcagaagatacttcagcggaagggaaaagcttcggaattggaagaagaagctgacaaggaaaagctcgctgaagctaaacctagtttacttgttcaagcaactcagctcaagcgagatgtacccgaagttagtgctactgagcaaatcatcttacaagagaaagagatgatggagcatttatctgataagaagacgcttatgtctgttcgtgaacttgccaaaggtatcacttatacagagcctctcttaactgggtggaaacctcctttgcatattaggaagatgtctagtaagcagagagatttgattaggaagcaatggcatattattgttaatggtgatgatattcctcctcctattaagaactttaaggatatgaagtttcctagacctgttctcgatactctcaaggagaaaggtattgtgcagcctactcctattcaagttcagggtcttcctgtgattttggctgggagagatatgattgggattgctttcactggttccggaaagactttggttttcgtgcttcccatgatcatgattgctctccaagaagagatgatgatgcctattgctgctggtgaaggtcccattgggcttattgtttgcccttctagagagcttgctaggcagacttatgaagtggttgagcagtttgtggctcctttggttgaggctgggtacccgccattgaggtcgttgctatgtattggaggtattgatatgagatcccagttggaggttgtcaagagaggtgtccatattgttgttgcaacccctgggaggttaaaggatatgctcgccaagaaaaagatgagcttagatgcttgcaggtatgatttctttggttcttttcaatatgattaatcaacctgattgtaatatatgtttgcgtctactgtcttggctgccttgtttgatcttatatcctcgttttctgagttttgcacttggctagattcttggggatatctgcttattgtgcctgttttgttgtttctggttaacgggatagatcaataggattgtctagtgtctgttagctacttagcgcttcattgctatatatgttctttattgtgtgattctatcggattttttctctctgaataaattttccgcactggtgtttctttctgaatgcatctttcttgtctttggagtcttgagactgtgtcatttaatttcaaaatcttgagaatgttagatggcaatgatgtttaccttcctttttttcctttttttaggtacctgacactagatgaggcagataggttggttgatttgggtttcgaagatgacataagggaagtctttgaccactttaagtctcaacgtcaaacactattgttctctgccacaatgcccacaaagattcaaatctttgccagaagtgctctggtgaaacctgtgacagttaatgtaggaagagctggagctgcgaatctggatgtgatccaggaggtagaatacgtcaaacaagaagcaaagattgtttacctcctcgagtgtctacagaaaacctctccgccggttttgatattctgtgagaacaaagctgatgttgatgatattcacgagtacttgttactgaaaggagtggaagcagtggccatccatggaggaaaagatcaagaagacagagagtacgcaatctcttcgtttaaagctgggaaaaaagatgtgttggttgcgactgatgttgcttcaaagggtctagatttccctgatatacaacacgtaatcaactacgacatgccagcagagattgagaactatgtgcataggataggacgaacaggtcggtgtggtaaaactgggatagcaacgacgtttataaacaagaatcaaagcgaaaccactctgctggatttgaaacacttgttgcaagaagctaaacagaggattccacctgtccttgctgagctgaatgatccaatggaagaagcagagaccattgctaatgcaagtggtgtcaagggttgtgcctattgtggtggtcttggacatcgtatccgagactgtccaaaacttgagcaccagaagagtgtcgccatttctaactcaagaaaagattattttggctcgggtggctacagaggagaaatataatcttgttttgttccctttgctagttatctcatcttagctgttaccgaactgtgatgtttgtgatgtttatcttccatatgtcacgctttttacactgagtcgagttctatcatgtcaaaatatttcttagttaatatatatggtcggattcttgaactaaattttgtacacaatgtgcatgcggtaaggtgcaaggtctttcgaattgtatccctaaggttgcttttgagtttagttgttcattttggtgtctcttctttctgttgttattgttacaagtgcccctttacaccgttgggttgtattgaagatacattttcatatcagcgctgaaaggtaacgttttttttttatggggaaaaaggtatagactattaattacatcataatgatgtttacaatgagaaagagtaatatcatctccaatctccaatggttacatctcgaatttttggatactataatatgtttgccatgttctttttttggcaacattgtcatgttcactataagacttttctagtttccagtctcatttggctttttcacttgggtcactaactatgcacaaaagcttcatataaaaccacattcacatgcatgttgttatatctctggaccagatgcgaacagaggtataaggccacgcaatacttgggctgataattggtgagcctcaaagatctctccgtccaaattccacacactctcttccccaaatgatgtaaacgtgaaagctcgcgtctgcattaccaaatatattttgatcaggacccaaccaagttaagaagattagaaaaggaaaatgttttacaaaccttgtgatattccacaaactcgaagttcaaaggttctccacctctttttgcaagctcggttaggtgcctgtaacccattacaatctctgatataagccttactcataaaatgaatgacaataggaaaagtcgagacattaccataagtacttgggacgagaacaatcttttatgagtatgagatgaaggaaaccgtcggagaggtgtgcatccacaacaagcccatcaggtgctctttcatttcggtttgacatcactgcagcacctatactcaaaaaccgtcctttcgttctacaccatcttgttttttctggacaggggttaagtgttgtgcttgcactgttccaaccaaccttactgttacaaatcttgcaatttgcacgacatagtattttctctgatcttgtggtatttcgaaatggccatgtcttactccgcgtatgtagggaagctttagaattctctgattcagcttcttcaaacattacctctgcctcgtatgatcttacattaacatataaattaacaactcaaaaaaacagtgctttgcttggacgaaaaaacaaggtagatcatttggaggaaattccactaatgttttcttttggaagtttaaattggtaaatatgctagggaaatacctgtgcttcaagaatatcttagttccaacatagtcatagcgtttgggacccatccaccgatatttttcactttctgaaatgacatcaccataaaacccgtatctgaactaatcaattgtacaaaactctgttagagattggagaaatcaagttttctttcacaggcactaatggttaaagatattgaggatgctgttaataataaggaactaaagctccggacttgtaagtgaaggatgaaaaacagagcttcatgacttaacaaaatctgcctttccttgttacagaacatctcaacaaaaaaggtttagtccattacccagcgaatgaggctgcataacgaatataaggttcaatcgtcgaggttgatgctgttttccaccgcacaacctgcattgcatcaaggaagagctttctacctagaatgatatgcagcgctgatgttacaggatcacgagctcctgtggtgctgtaacgcaagagcataaatagtagtttaaaacttgaagcttatcagaagctatttttactttcctgaagctatcaccaaatctttcaaaatttgtatgtagaaaaagagaaaccagacagtagagattgaaaacgcatatgcagtagttatttatttagtaatcaactacagtttatttgctgatacaagtgaaacattttcccattcatggtgcaggataacttttgctagtggaaggatgactatgaataaatgatgataaaaaagcctaccacataactattgcatcagttgaacctgccgggatgaggccgaatcgaggcctttcactactgaagggatgatcgggatcttcaattcctgcgagattgtcaacaaaaaggaacaagaaaaacagaaaggaatgcaatttaataagaaagggtgacaaaatcaaacaatcggagcagacaatgtagagaactaaaatcactgaccttcacatgacccattgactgtccctgtaggtaaacagtaacacccagatattaaaactagttacctgtccccgcggttgaacaaagacgagataaagtgatcaaatacatactgaaattcatgacctcttgaactgaatcaggaagaagaggatagtgttccttttggtcagtctcatgaacttcatctcctggttctggaactgaggagctacctctactttgaacagaattgaaggaatctgaaggactaggtggaagagggactttaagtctcgacaagagatacccattaaggatttcgttgaagaaaccatccccaccctgacataggttgatttttcaagacataaacaatcatatcatgaaaagcggaatgaggaagaaaatatgactactaacatcagaaatggagaagtttcatcaacttttactaatccatattttgactcatagatgtaatgaatatgaaggttatgtcacaccacagaaataatttcacaaatgcgctgatctcagtcactacaaccacggtcaaaaaagataatttgggtcaatgcaagatagaaaaagcggtctacaacttacaacagctatgatgccatcatatgtatggagctctttgttttggatagatgccattacatcaaatgcatgtcctgctcgttctgttacaatcacctgatttaaatggtaaatcaagaatatcaaactaaggacctctagcatgaaaaatgaaaacatttgtgtgtcatgatgctatatcatcactagaaagcaacagtgaatggcaaaattgtggaagtcatgtcgcaatttctgctaaagcaaaataatatgtatatataacactttctgtacgctcatttgctgcaagtataaattatgactagggaaaaatcaattagtaactattgactttgataaaccacaatgaagcacatgatcaatatcaaattttccaaaattttctactgtagcacaaaatcaagtcagctactccaagaagcaaaatccgtgtgcctttttgtcatcaaagaataacctttaccctcataaaaacaattactaaatgatctttctgctagtgatgcaattaaatacagacctttgtattaactttagcgcgaatgaaaatcttggaaacagtttcccagaccttggagccatttcctttaccactttttggatggacaaatacctaaagaagtgggaatcaactttttcaaagcattcatgcaaaataggagaaacaaagtgctagagagccagaacagataagattttaccaaaagatttcttggtctttctacctccttgatcaaagagtaattcaattgatccatccaactctggcacgtctgcaaatccatatgtccaaaagtgaatgcagcaaggttccaaagacaaggctcttttggtgaactttgaaatccgtggacagtgaaccgatacatctacatcaaagcagagagactcatcacactgcaattaatctcaataagcaaacacacaagaaacgagagctgaaacaaaacctcttgagtatttaacaagcgttcccggaaacattctttggcatgtctaagtcctaactttggactatgcaccaagccatagctaacaaactccacagcataaatatcagagaatttgatctcagtttcggaattctcgcaaattataattcccaaacaagttgttccctcctgtcaatatagaacaagaaattggattagatcagtaacataacaatctatgatctactaggtagcaataaagaaagagaagctccaacatcaacaacaacaacaacacacacgacactaattttcaaaataggatgaattttgaaaagtctagagtcaacgaacacagttgcgtctgatgaacctgaggaagtatgaatgaatgaacacatatgccattaacgagaaaaatcttacacaatctgaagaatccaaacatttccaggacaaaccatcatgatttcgagaaagcaaaacttggccaacatgatccaagaaaaaacaaccgctcaatccaccgtcgcgatcgccggaattagaaaaactacaatactcgtcgtcacgaccttcctccatttcgaaatcggtattagcttgagcttagaagattcaacaaaattcgattttttggaagttaaaaaagaaaatgaaatgattttgtaaaatattaacggaaaccgaacggcggagccaagacggacggaagattggctacaattttgttgatctgctgcatatgagcattatgggccaattgcatcactaggctcggccgaagattggcttcaatatttgtccatatatattatctaattgacaataaaagtccccaaaaaataaaagacattattaacttggaaaagtccaatacactcatgttgaattacaaatccgttatactagaggatttatgttattgaacatgatatagtgatatttatattaattcattccaaataaatacaatctcatgttagtcaatcatattaatatcattctaaatcaactatattattaaaaacttagcaattctttatcagaaagctactaaaactgattttagatgatttccaatagtcttttgttgaaaaatattgttgaaaagagattgtttcgtttactgttttggagtttgtatacatatcgctgccagagataagtgatatcaaatgtcgagtacaatgcttttcgtttatcatatcatatgatactgcccaatagtccctaaacaattctatcatattacaagggttaactcccacaagttccacgatctccatgtgtctacttatatttattattttcagaaaaaatagagggaattttctctccatattcttcatctagaattttttttcaatatttcacgcatccgaataataagcaaaatatttgtacaagccactgaattgaaaatttgatatattttatgccagatactatgaccctgcatagcaggggccataatgctagtagtcctacaaaagagcagcaattattatcagtaacattaataaaattctcatggcctttctgcaaaggcaattgtctgaacagggagcttccagcctgaatctctgcatatttcacaacagcatagcaagggttaggatgtgagtcccaaacttccaacaagaaagatgtaagaaatcagggtacaagatctccaagaaacatcacacctgaaaaaaattaacaatgtcaacaaaacaaagattcgtgttaatgagatgtatacaataacaggggcaaacttttggattctattctagtagcagtttagatgttgtaaaatagaaaaaatgattagtgaaaacaaattcttttcatgtgggatagaaaacacattaaaagttactgaataaaacatagagcaaaaagggtagactgacaaaattcgaacatccaactcccggattctatgtttcagaattgaataccaggacagatgctcctgtagctgtggcattgctcacaaacacatcagtgaccatattataagctatagcagttagttattatgtgataaaactagaacagatatattacatgagaaggaaggctttcgagaacaaaattatggacaaaaagtcagtatcctgcaaactggaactctaaatatatgaggttgagaaagatttttttttttttttttttttttaaacgttggaacttttttgatcctatgttgaaagccagttgattcgatttcaaattttatcctacggagaacaaacaataacatcaaatgaggacatcttacctctccactaaggagtttctcatcagaacacgcatgctacttcatctcagccatgaacttctcatactcagactctccaacagaggatggattctctgcaggaggctgtactggaggtttgggagcccagggtacgttccccatgctctgtgaatagccaacagtgggtggcataggaggattaggtgcccaaggtgcattaacaagaccttgtgagtgatcaggtgttgagacagaaggattgttggcccatggcatgttacccatgttttgggaatgatcagtagacgaggccggtgcaggaggtgttggagggggaacagcattgtagtaagacggataactcatatatggaggctgtccaggcatagccgtgactgagctaccatagacatttggtggtatagacgacgtagcagcaccactatcagcttgtactcctggtgggaagctttgctggggttcactagaagatgggttttgagtagtgccaggtggaggtgcttgtgtcacatgaggtggtggtggtgggtattgcattccataaggaggcatatgttgaccatggacaggatggtaagaaccaggaggaggagggggaagagcatatggagaataggaaggaacaggaggaccccaaggaactggagctgttgaataaccaccagtggcatactgttgagatggataggcaccaggcggctggtttgagggaggataaccttgagttggtggttgaggagctggaggtcctggaggtgcaataggcggtggcgatttgcctgcaatcctgacagcgagtgttcggccttcgaaacgatagccattcattgcctgaacagcagtattagccatctgtacatcagcgtacttcacaaaaccatagcctttgctcagcccagtcacacggtccttgattacctttgccatcacaatttcaccaaaggatgaaaagagattaatcaaaccatcgtcctccagcatcggaggtaagaacccaatgtacaaatttgtttcgtcatattctttggaggggggtttagtcggagttgaccctaagccaggatgcgcacttgcaccattccctgcattattagcccatggaggattacttcccgaacttcccggaccaagagctaaggtagcactctgtttgagagaagattcaggtacagttcctcctaactctgccaagaagttctgatattcatcatccattttcttcccagtagtacccttcaccgggcaatcaatagtagggtgtccaccatcaccacagatcttgcaaagaacatcactcttaaaggtattcgtacgagaaggacatgcatactgtctatgtcctggctcaccacacagtctacagaattcttcatcccttattgtcccattcaaggttgcaagttccctgagctgttgcctcttgtgctcgttgagcacttcatcaacaggttgcaatagcttttcaaccataccagcagcagcttcaagagcttcctgagtctcagcctcgactaaaacatgcaagtcttcattctcagaagggtcatatttcaaatcctttttctgctgatgcctaccttcttttacagaccctttaccccgaattacaatttttgcaccagtctccctctccattctcttctgagtattacccctgggaccaataatcagaccaataaaattgtaaccaggaaactccttcattggaatgaaaagcttcttatggagcttaggaggtctataatctgccggaggtttaaaagcaggattcttcttgataatctgagcaataatttcttgtctttctctattcaacctctccctcgctcgatactccctagtgttgatcctaattcccatgttatcatacacaggctctggtgaaggagacctctgtccttctggtctatcatccaaaggcataccagactgcaacatcctactaatctcaagtaacctactattcaaagcttgaatctcaggatcaaactcaatacctccagtgaaatccttcatgaagtcaggtaactgaatttgcgtcctcggctcatcatctgcccatctcgacttacgcttcctagtcccagtaccggaatcagtacccccttcggcgctagggttattaatggactcagaaggcggaggatcccaccgactccgacgcttcctccggcttgtagtctcttcctctccaccagactgatccttatcgttaccactcagcgtcttgctaacaccgttctccgatagcaaaggacgtaagagctcaggctttgctgatgaaccattagtatcggggataggagtagaagaaccgtttaaagccacagactccgaattctgaggattcatatgatccaatgcgagtggagcagtgtctccgttggaggaaggaggaggttgatctagggtttgcgaattgggattgttcatttcgacggactccatagcaaaactcaagagttagggtttcagatctaagacaagaaatgtcgcgacttacatgagagagattattatcgaaaacgatattgagcagagtcgcggaatttggcccattataagcccaaatagttaaattcaattttcttacacttttagttaagagaatgttttaatttttaaaccattttgttgataaaaaaaaaaaaagtttaaatatttacatttttataaataaaaaatcaattaatacctaaaaattctaagctaataaaaacagattttaacatttaaatttttaaaacgcaatgttaatgttagtgtatatgctaattttgtctaatataagattttaggagaaatgagatatgaaactggtctccaactttggttcacatctatgcattgaatctcaaatattctagcatgtttaaacattatcagcctatttatgactaattttttgtttttctgactatttcgtatcttggaaaaatacacaaatatactcagtgtatgtcaaaaaaaaattattaatattatttcattttagggaaaaattaattaacgacggtcttcaattcgtgcaaagtcttcgaccgtgtccccaaccttctcgaacttccctttctcattactctctctaaacctcaaataatccccacatttaaatgatcgaaataccctcataccctcacaacctccgacgacttcatcaggggcaaacacgactttcccatcgtcaaagcaccaaaaaaaagcaagtgagaatctattaccaacgaaaccacgtcgtttcaagataactctgtgttgagacgatctcagccgtccattggtccatgcatgcaatagatctccgacgttgacaacgagtgcttcatctttagggttgatatccatcagaccaatcccatctctggttctgacttgaagacctccgatgtcatcttggtcaacgatcgtgatgcaactcatgtcagtgtgcattcctagcccttcgatcaaatcttgctcatcaccgttgtgatgatcatcttcttggtctgaagggattgtgtagttgttgatcctgaagtagccatgacagtttccaaactcagattcgtaatacttgtgatgaagatc

SEQ ID NO: 876 - DNA, 48008 bp, Arabidopsis thaliana
gtctccgaagctagagaggattgctttcattatcttctcacatagtttcgtcatcttttctccatattctttcatcaacccacttttttaaaaaaaaaagagaaaggaacaaaatcatttagttaacaatgtaaacaattggtttggtgttcatgcaaattgtttttccaaaacatcaacacatcattaaaaataataaaaatgcataaaattagaaaccagtagaaaggttttgtaaaaattgatcaaaaagacgaagaaaaaaaacaattgatttggtttcaagttatattcttataactttcactagtaatgctatcgaggagattagagataccttgtcagtggtgaaaacaagtctacttcaacatggttacatggaatggaaccaactttaatcaaggaaaaggttggaccggtcaactatagttattattgtcttagatttcagtgggtttatcagtaaactgtcagcaaaactagaggaccggtcctgaaatggttaaatacatcacaacatctctaactttcacattatttaatgtaccacgaagacataaagaatatgtgagtgcatgcctagatgcttaaagtgaatgcaaatatgcaatgcgcactagtgaaataaagagtgaccaatatagttggaatcagatttggtttttgtttgacattcatattattgtcacaaaaccgttctactattgttaataatttatgtattgggaaaacaatgtgcatgaacgtttctctaggaaagaataatctgaacattaagcaaaaggtggatataaattggttgagaggacagcttaattggtttcttaaaaaaaaataaaatatgaggcgacttttaaatcaagccatattaatgacatcgttttgggggttcccaaagaaaatgtcaacaaccatgttatttatatatatttttatatatacaactctatatcatatatatgtatatacctgaactcttcatcggtagcttggtcggaaaaagcatcaacggaagacttggccgaggcatagaaatcgggaccggagacacgaaggctttcaaagaaaggcgatgcgatgaaacggggagtgtaattagacgctcccattttcattttctcctcatcttctagctcgaaaactccggttgagaatctccggagtttcttgtacatgtcgcgggagacgccgtggttggttacgtagaagaaaccccactccttacacgcatcttgtagtgacgtcaatgatgactcgcttagaggctttgaaatgtcaaacaccggaagttccagagacattaatgacccccaaatgatgattatgaatgttgcattttgtgtttggggatacaactttagtttcgtttagttctccaaataggtttaattcgtgtgtgtatatatattgcatcaaaagtttataatactagtatataacttccactattcaatttatataatttggttgaaactcttgcatataaatctagtatttatttcgtataataatcggaaactctagatgctattcctaattaatctgtgtctttgccataatcaaaaccaactatttttacatttcaagatgtttggcccggcccttaaagaatgttatgaataatttaaaagaactcgagattcttgtttacattttagtgggattatatatcgctaaagtcaggggaaagtgcttaaatattaagcttttgaaaatggttactgcatcagcttgcgtgcgaaaatgagatcccatcacccttgaacatgaaggtagtaagtcacctttttaaccccaattaaaccgatcacattcgaaacagtttgaaaaaccaaaactatggaagcctaacaaagatacaacataagtaacaaatatttttctttacaaaaattttagagttacatttcgaaattgtagttagtatatcatttatgcacataaacgctaggcctagctagatagatggtcatctgactttaatttgataaaatgatttatatttgataaaatgaaaagaaattgagtggtgggctagcacttaaaaaacatctaaattaatcacttctcataaatatttaatcataagattcttatgaatatattaacaatgttaagtaagatagttattatatgatacaaagtctttaagcaatgaaaactttgtttatttgtccccttgacacaaagcagtttttaattgtcactaaggccctgttcgtttgatcagtcagatggatcatctggatgaaaatgagttttgatgttcgtttggtgccaaaaacggttcattcaaatgatccatccaaatgaatcatctggatgaatttgaaaattaaggctaaattttcaaactcattcggctgaactaaattggatcatttggatggagatgattctgtcaaaaataacaaatgacataaatatcctaattatttcaattgattatttagatgtatttttagatacaaaataaatagactaaaccttattttacaattatttttttaaaaaagaaaaattaaatttttctctaaaactgcaaaatcaaaattttccgctaaaaccgtaaaattacgttttcccgccaaaaccacaaaaatcatattttccgcaaaaaccgtaaaatcatgttttcccgtcaaaaccgcttaatcacgttttcccgtcaaaaccgcaaaatcacgttttaccgtcaaaaccgcaaaatcacgttttcccgtcaaaaccgcaaaatcacgttttaccgtcaaaaccgcagaatcacgttttcccgccaaaaccgcaaaaatcacgttttcccgccaaaaacgtaaaattttgttttccgccaaaaccgtaaaatcatgttttcccgccaaaaccacaaaataacgatttcccgtcaaaacctcaaaatcatgttttcccgccaaaaccgcaaaaatcacgttttcccgctaaaaacgtaaaattttattttccgccaaaaccgtaaaatcgagttttcttgtcaaaaccgtaaaatcacattttcccgctaaaaccataaaataaatttagaaatataaaaaactattatttgaaattcatttactttaaatatattttagattaataattaaaattaatatgtttacaagtaataataaaaatataattagatgaaatcatgggtattttaggtatttgtattattacaaatcatttggatgaagattagagataagcaaacgaacaacatctcattcatatgatttagtcaaatgaaccgactgaaaatgaaacaaacaagaatcagataaatcatccagatggacatgttgaatggattagttggatagatcagtcaaatggagaaacgaacagatcctaactcagccgaaataaaatggttaacgcaaagcctaccgttgtcttcgagtcgaaaaatagtcttttttctttagataacgtgaatatgaacataacttgaattattaaaatgaggttaaaaacagttcttatagtaattatataataaggtcaaacatatacagctagctggtctgctccattccgtctctataggaaagtttggaactcctcattctcgataatcttaaacaaattatttctgatgtggttgcatcccaactttaaactatttctcatatgtggttgcccaattaactctcttatctttcccattttcacattacgttaaaagattaatatagattatacagaaaaacacttgtagtagagtaaatacatttcatttgcaacatatacatttccatgctaagacttcaattcgaaagctactgaatgcataatggtgtatttccacataagccaattagggtgggatgctttgaaattaccattatataatatcaaatgtaagtgaaattcagtcgacggttatatacaatttatggataaaatatacaaatcttataatataaggtcggggacatgatgatgctgtgctggccatttttttgtaacccctttcgtcaaatttctttgcgcacaagtgattgactatcagactgatgagactctttctacataaatatgataatatttatttatatttataaatgatttttatgtttaaaatttactagttgatacaaataaatcacaagtggctcctaattttttttaaatacgccataatatttaaaattgtcaatttggcaaataacatagttgcttaatttgttttaaatttgtttctcactagttttattactagctattctatattttagatatataattaatttttttttttataaaaaacttgttatgttttttggccggatatatacacaaatattatacaccatatcataacatgactttgtgcaaatttctttgaaaataaagttactcgagtgttgcattaaccatattgaatgaccattgtttatttgacgtggattcaagtaatattggtgacttggtgtgtgtcgtgtttcgcagcagaactagtctagagaacgggtttggacgtttggttttaggagagcgagcgaaacttaaacctgcaccaccaaatggttaggaaatctcgaaatgagaaaaaagtttttttttttcttttctttcttccttctttaatggttctcgacgttcaaattagaacacatgtactacaagatcggtcgaacaacaaaacgcgggaagagaaatggaaggaaaaagataataataaagtattcatattgtttttttcaaattttggaaagtataacattcgtattattagataaccataagtcacaaaatttatcggcaaactcatcccaaagaccaagattttaaagtgaaactggtcaacccgcaggaacttaaacatacttttatagtttgtgcttaatcgcaaaatatgatttttatagatcaacgggacataattcatatgcgtaatacaagtttttcaaaattaatcaactacacgaaaataatatatttaaaatcaaaagcgctaggaattgaataataagtatatatatatatatataactgtatcattatagaaattgttcagtaatacagaatatgatgatccctgtctttcaaaagaatatattcctatgataagcctctctatttcaaatcatctctctctatatataattaataaccagagacgtaaaatccctaaattaaagaggaataatttcaaaaagttgccaaattattcccataaatatagttccttatataaatataagtggtacttttaaatacctgctcgcttgtaagttattatatatttcatggaagagaccttaccagttcacatcagcttacttgtagggaaagtaagatctgatgcatcagtttccagtgacaacttcaaacgttgaagagattcttgggagcttcttcgggtatgatggtgaagggaaacgtcaagccaagaggacgcttagctgcaagtggcttgactggaaaaggggatgggtaggcttgtctgtgacttggcgaagaagcattagtatcagtagcagcagcaagagcaggcaattggggccatgcgaacatccccacaggcctgcagattctgaaaccagtgttgcttattagtgaaagtggtgatctttcttgttgatcatgcttccttcctttttctctgttttgaggtgactctgtgatttggttacccttgttcaccaccttcacttctccttctagtgtctgtattggtggtgaatcctctagtagcaaaggtgtctctgttgagtctggctttttaggatagttctcgtccactgttttcttaagccatcccatgtcttcctgcaatatttgcatttatagtaacacaaatgtttcatcattattcgactatcagcaaagtggtctctcatagagacagaggaaatcatttatcacatacgctaaatgggcccattttacatggttcactgttatcctccaagggagtttcctatgactacttgtgatagttactaaatcaagattttacattttaagtaagggtttgtgtctacttggaaactcaatctagggatatacatacctccattttacgcaaggtttctccaataatcactagctggtcctcaattttgtatttctttttcagcagatcagcgtagatttcctaagaaaaagcagcagagatgttcacaaagtagcataaaacattttcacaagagagaggcctcagctattgtttcgagctcttacctttgctggagtcatcagattatcattctgactagtaacacaagaattaggcgtagtcatgataacaagctcctcctcttccttctttgacgcaagtttcttcaattctcttctcaagaccaagacagacatgagttaaaattgcaataagacaactaaagggagatgatcgtataaccaattcaataacttttctaccttttcaggctagctaattcttctctgatgtcacggatttctccagcgcagacaggatcttgagaagggttgtcaccaagcttccaaccaggtggaggagtccagtaaggatctttaactcctgcttctttccttatgtgaatcaaatcagaactctccaaccaatactccattgccccatctgcattgtgctttctcataaacctatcttgacctccaggagccaccttaccagccatgtgcttaagcagatgatccaatagacctgtgtcaccaatcagcttccttgcttctgacctcaactctggcctgagtatggagttgccaaacactgcattcttctccttcatcacttttaacatgttcctctcagctagtttgtaccttcaaaattaaccacaatcaatcaatagaaccaaggaaaatccaaattcagagatcataaaattcgttaatttttatgcattttacctctcaacagaccatctatcaatgaacttcctctctgatttcctcttataaaccacaatttgagtttccttcttctgatcataaaccttagctttctgagcgagtctctcagtacttgattcaatcagctttctcttacgatttccattagttatctcctttgcctcttgtttagtgcctcctatttcattcccatcatcatcatcctcttctttctccatctcttcttctttgtaaacttcatccttcactctagaactctcctcaccttccttattcttcctagtatcaatatgccgactctgatactgcacacgcaatctccttccccacttgatcatccctcccgatttcagctcagacgagcactttccctccggtgaagcagcgcgacagagacgagtattgtacgccggttgagaaaccacctcccttcttggaaatttgttcctgcgagaagaactagaaacccagaaaccccaggaatttctattcatagaaagttcatgaggtgcgattcttctgtaaagcaagtctccagctagctccgaagccatcacatgactctcgtcgaaaacaggaagaagaccaccaccactcctcttcttcatcggtttattccggttcatcctactgtaatcgaaatgcgatcggagtgaaaacatgcttgggtaccggagagacacgtcactcgccgtgattttgctcacctgcatcaataaaccttaaaaaatcactcgaaaacccagacgaacaacaaaaaacgagatctgtctataataaaaggtgaaaaaagcagagaatcgagtgaataccatgacgactctaatcgatttaagattttccggcgatctctgaggaagaatcgaagcatcgatttcgtaataagatccagctcttatatgcgcgactgcaactgtaagaacaaacccaaaccaaaaattcagaaattagaagagaagcgagaaaatcaacaaaaacgaagaaactatagcttcagtagtttaccattcaaagtcggtgacgacggcgaagagattttcccggcggtggtttctctaatcggattccgtttcacgaacatcgtactctgtagaacaagagaaaaactaagagagatattttttttctggagaatcaaaaattgttataaggaataatgaaaaaatcggtttgttgttgttgctgctgcctggagagaatatatttgaaaaaacctgactctgcgagtataacaagaaacacacacgcgctttctggtacgcgcgtgggagacactaaggaaacagaatcaagcggtgatgagttttatttttctcatcatgagactgatagtgactgagccatttatatcacagcgaaaaaaaataaaatctgagagcgagagagatcttacactcatgatttttgctctcgataatcttcgttcctccttttcactggattaaaaaaatcaaaatcagcaacggagaaaaaaaaacatggacgcggatggagaaattaaagcatttctgagaaatagagagaaaacataaacccagaaatatttgaagaattttgttttataccagaaaatctttttaatcagcagagagcttatggggaagacagcaaaaagaaaagttttgaaatgtcgcatttaatgaatctgggaggtggctttatatatgaggttagagagagagagagagtggtgtgagtgtgtgagtcttatatgcgtgtgcacggcacgtgactatattgctttcgcagcaagttggcgtatattgacagatttgccctcaaactgtatctaaactgtaaacgttcgcggaaattggtgtacgaaatcatctacaatgaaagattgaaagcagacgtagtgatattacggattgatgccacgtgtgtcattttgaaaatttaacggtgataagacctgaaggttaatgtaattggccgtagcgaataaatttcgtgttacacgtgcggagaaggcatcattaagctactgctactagagtggggaccgactacacacgtgaggaattgttttttttttttgtcacagtgattattcttacatatgattattttcggataatgatatgtgatttatgatgttttattcacattaaattgtttatgatgtaaggattaatgtctctaatgtatcgaccaattttatactccaatgataactgaatctgtttttctttattgagctgaagcttttttaaaatcaaaaagcttaatttacgtaataacatgatataattgatattttttttataaagtatttaaaccaatcaaaacaaataataagcttgaggacttatgaccatgattatttgcccaatacatttaagttatatttttttgttgagtcaacaatatttttaataatttaaaaatatttttttcttaattatcaaaaacagtcaacaatacatttaagttatatttttttgttgagtcaaatatgtataatgtaagatgttaaaaagataattaagaaaaaagtaaaaaactgtaaacgggcctaaatgggccaatctaagctgaatttttttggggatccgactatgagatggatcaaaataaacgggtctggataccttcataacgggtcgggtctgatgaggaaagagagtgattttttcgatcgccgagagatgaaaggtcagtgctttgtcgtcttctaccgtctccggaccaaagagctcaagtcacgcagctaacaaagtacagatttttcccttgtttcgattgcaaaagcgcataagcttcgtacttgccaaatctgaagtcaaaccaaatacactggtcaaacaaaaagtcgacgagccccagattccgatagcaaaaccagtcggacccaggatttcgatgagccacactggttagcttccgacccaattcacgtcctaggtcaccgagaacgtggtatgtgttttctaaggctttcgaaagggtttaggttatagtttagctttagctaagggattgggttttgttgtgcgtacttattgttcgatgaaacttctgaaagagttttggtcaattgataatgaacaaagtagaaaactttatctccttaaaagtagtgacatgggagctaattctcctgtttgtgtttcgcagaaactgtgtgagcatttgcagtttctctcttgtggttgagctaaataaaaatcattgtacattttcaagagctaattatttctgatcattgttatgtgatactttcttttgcagacttctttgcatgttttggttttgttgagtcggatgagttttatttttggcttctctctcgaccagtagcagaaagctatggaaggtgctgctgtggcggaagggctgtggggattagcggatcaccaccagaagcttggtgagatcggaaaaaccataaagtgcttggaagccatctgccagagtcaaatctctttccttcctcttgttgaagtcaagtctcgcctccgtttggctgctcttttactccgttactctcacaatgtcaaccatgccaagtcccatctcgagcgctctcttcttctccttaagtctattccttcctcctacgatctcaaatttcagaattatagcttgctcagccactgttatcacctccttgcttcattccctcctcaacgcaaccttcttgtcaaggctctcgaactcgcatcttctgtccctcaggatatttctgcgtacctctggtcttgcaatttcaactctcaactcgctaacacgttcattatccaagccgattttccttcttctctctccgctctcgagtctggttttctctctgcttcacacatatgttttcctgagctccaggtagatagtctcttttttatttttgcgttagaggttcaggtgatcgatctttgttgttaattatttgagtctttacagatgttcttcacagcttcaatgcttcacgttcatatcatgcaatggactgatgattattcagtggaaaaagctgtccagcgatgcgatgagatctggcagaccatttcttcagacaaggtatgttacagtacatatataattttttttgttttacccacttaacttcttcttgcttcgtttgacctgagtcaactgatttccctgtcatctgtagactgatcgctgccccggtttgttcttctacaatgagatgttgcatgttttctatcgcctcaggctctgcgattataagaacgctcagcatcatgtcgaccgcttggaccaggcaatgaatgctcattcgcataaaatgcaggagattcagcaacttctggatgagctcagttcgttaaatcttagtctctcccgttacgaccttccctccagagaaagatcggccctctcagcaagacaatctcagcttcaagatcgtgtaaacgcattatctccatcttctagcactgttaactctctggagcccgcatactttggcaacatagatcgtggatggacagagaagctactgctttcaccatctccaattgatggagaatggctaccaaaaagtgccatcgatgctttggtccatcttatggttgtcatatcgggacgtccaaagggactctttaaagagtgttcaaaacgtatcgagtctggactgcagatcattcaaggttgttctgttatccttagcagctgaaattcctgtttttttcttaattcacttcctactattgcattttgtctgcactagatactctcttctctttactttcgtttcactgaaatcaccagaaaacccactttacctcagattcgaatcagtgtagtaagtgattcattctcttagaatgtggcttctatgaggaaattagccacctgcttcttaggaacgcaattacaaaacttaggggattccatttcatggcatgacatgtgtgtttgctatgttttatgcagatgaactgatcaagcttggaattactgacgaagttagaggttcaatctacttctctgttgtaactacacttagttgaagcaacggttcttaatgttgaatctcacattttctttcttcatgttcctctcttacggcagaggctgatttgcggcacacagctatctggatgtctagggtttttcttatgctacagatgcagtttcttgagaatagagtggctttggaacttacaaggtctgattatgtcgaagctgaagaggtaaatcatcggttctttttacctatatttgttgttgtctcccttcaccacgccatgctgatatagagcctgctaatttatctaagttaacgagctcggtatgcaactatgcataatcgttcgagttcccctcacattaggtcctattagctgtcttctctggcgtcatgctttcttgaaggaaactttgacactaaatatcgtttgcgcaggctttggttgatatgaaaaattggtttacacgatttccaacgattttacaagcttctgagtgtatgattgagatgctcagggggcaatattctcattctgttggttgctacagcgaagctgctttccattgtattgaagcgaccaaggtaaaacttataaccatatgtgtatgatagatagttgcttcgttttggaatgaggtgtcttatgtgcctatgtaatattggtcaacatgtttgcctttttgctgcccatggcgatttctcatatgaaatgttatttcagttgacagagagtatttcaatgcaagcttcgtgtcaagcttttgcagctgtttcttaccttactattggagatgctgaatcatcatctaaggtttgacattttcatgcagttaactggatgtttatacttgatttactttattgccggagcttaagaagattgctttcaatcctctgatttgtcttcaggcacttgatttaattggaccactcaatggaatgacgaattcactatctggtgttcgagaggaagctagtattctctttgcttacggtcttctcttgatgaagcaacgagatctacaggaagcaaggtatgtgctcgtttctcagtttgttaaagggggtttttctctccaagtgtgataatgattatagaaaaccataagagagcaggatgatgcgctttatctgtgttcataggaagagaaaaaactatttcaagaatattcactaaattcatagtatgtgaaaatatgatttatgctcccaatgtaatgtatgatataaatgcagaaaccgtcttgccaagggtttgcagatcgctcataatcatatgggtaacctgcagctagttgcacagtatttgacactcctgggaaatttagctctttccttgcacgacaccgtacaagccagggagatcctgcgttcctctcttacacttgcaaagaaactttatgatatcccaactcagctatgggttctatccatcttcacaggttactattagagttttgtcaaaatagaattgagttaaaagtatgtccaaagctctgagcacaaaaatttgatttgtttggtgaatacagctctgtatcagcagttgggtgagaaaggcaacgagatggagaacgaagaattccggaagaagaaatgggatgagttgcagagtagacttgctgaagcgcgaggatcaattcatcacattgaactggtgaagacccaatgatccctcttctgtgtgttattgcaataagtaagatcttaagcaagaatttatataacacactctacttgttactgcttgcaggttgcgaaagctaggatagaattgtatcagatcgacaacaatccacaagaacagtcactagtagcatctgcgcaatcaatgcaagggaatctggatattccagagtctgttggtatagaaggtccatcacctgctccatcatcttcaaggctcgttggtttagacaccggaaaaagatggggaaaacgaaggatgtaacttttaaagacagagagtacctacgatttttgtattaagtgtgagttgtgtagatgtgttgattaaaatgtaactgttgtagttgtaggaccttctaagttagtcagtggttaaattgtataatatatatggaacattactacgcagcagctaaatgctttttatttagcgcaaggacaacaccgttttctttgtctttactagcttcctcactctggtgtggtctacaagtgtgacttagccaacggatatagtacagtgccaaagctgcaactaccattagcagaatagagacaagacaagctactagaacagacacaagcttcttgagctgtaagctgaacatgatttcagaggaagcccacagaggtttgcattgtcctcgtacgcataataaacaaggtaagtcagtatataaatctaagaatttggaatcttcatttcatttagatgacaaacttatacatatatatcaaaactgcagagagaccataccttttttgaatgtatagtaatacaagaacaacattataacacaatgatccggaaaataactaagaagtcacacctgtcggtaaaagaaataaagagaacgttttggtacaatacaatactatataaggattcccttttactatatctataggggaagagacactatgtgcattttgaaatttgtccttattacctatttgaacctattctctgcttcagacaataacctgagtgcatcttccatgcaaggacggtcagactggtcacttcttatgcagagaagtgcgacctcaacaactcttttaacttctccttgtttaaaatcacttgaactcacttcgttttctgtgtatacttctcttagaagaccatcctttggcttgttctgtatcatcaatccaccggcattcatcagcttaccatttgttaagatttccaaaataagttgtccaaagttgtagacgtccttttgcttctccactcttataacatcgttcatctgatctgctttagagagtctaatgttaggaaaaacaaaggatgatgtactaagagattttgtgtttcatggtaagtacctgtgttcaaatgtagcatgtatttgaacccaaattcacccaagcagggctctatcttatcgtcatcgaataatatattagacgacttcacatctccatgaggaattgcaggcaaacattcatggtgaagaaagcaaagtcccttagcaacaccagtgatgatcctcttcttagtttgccaatctttcttctttgtcttcattttctcagctagagtcgtcccggtatgcaggttattatcatacaacacatacacaagatgattgttgtaacaaaacccgagcaatctgaccagatttacatgtcttgcattccccatctgcgttaaaacgttcaggacaacactcttcttcttgtcatgcaactcaatttttctcactatgactgttattcctgttggcagaactgctttgctcactgaagctggaactgcttcactaggttcgggtgaaccaaagctcctcaaaacatcatctgctgtgaaatgagggagtcccgcgaaagacaccatcttccattgtccttgacttctttgacgaatatagtacaatgccaaagctgcaactaccattagcagaatagagactagacaagctaccagaacagacacaagcttccttgagctgtaagctgaacatgacttcagaggaagcccacataggtttgcattactctcgtacgcatgtttccccattgattgaaacactttgtcagatggtatggcacctctcaagttattgtgtgacaaatccatcttcttaagagagccacaagtggaaacagttggtgttaacatccctgatatattgttattgctcaattcaataacagtgatagatttgcaggattcaaacacagggagaccaccagagatactgcatgatgatgcagagaagttctgaagactaggcgcagaccaaatatgcggtggaagtttgcctcctagctcagggttattggagatattgaagtagtcaagttttgtagctttggatatatctaaaggaatacctcctgtgagtttgtttctagagaggtctatgtatgagatatcaggaatctcgctaaagctaaaagggatcacacctgagaatgaattatcttcaagccggatacgaacaagcgttgaacaatttgagagagatggagacagagttccagtgaagttattggagaaaagaatgagcttgaaaagaacacctcttgagcaaataccttgtgggatttcaccttggaaactgttggtggaaacgtccacccatctaagctttgaattcatccccaagcttttgggaagtgacccagagaagtaattgttccatatgaagagagtatccaaagaaggtagctgagcaattacttcagggagagtcccactcatttcattgaacataagattcaaaagcctgagattcttcaaacctgaaaaactctctggtatggttccagagatatggttgtctgagaggtctaagttaacaagagaagtaatttctccaagctcccatgggatttctctagaaagatggttcctaaagagaaacaaagattcaagctttgtgagattgctgaaatgctttggtaagaagccagagagattagctccagcaatgtcgaggtacttgagctcactcatgtaacctatttcccaagggattactccttcatatgagttatatccaatctccatgtgagtcaaagttgtgagattcccaagctcttgaggtatgtgaccacttagtaaattcccaccaagatgaagaaactcaagattcttgaaagatccgtactgactcggaatcgagccagtgaagtaactcccagcgagattcagtaccttgagattctctaactgagagagatggatcggtaatggaccggagaagctattgctcaaggcgtcgagaaagatcagattcttgagacttgagtcaccaccgttaccgtcagggaaacgtccggagaagttgtttctgctaatgtcaaggcttctgagattggtcatgttgaagaagatctcagccggaaactcgccggaaaacgagttgtcactgatgttgagttcaaggagttcggtgaagacgaggaactccttgcctgataaactcccagcgagattcttggaagagagatcgacggagacaacagaagttgagttttggttacatcggacaccagaccaagaacaacaagcgacaagattgtcggaaacttcaggagtgttgatgaaccagtcttttaagctgttgaaattgtcggtgagttgagattttaaagtgagaagagattctgtttgaggctcagcagctgcaactaaagtcaagaagaggcaaagataaaagaaagaacagagtttattatgcttagaagacgccattatagtttgaagaagaagaagagagagtctgagagatctgtaagaagaagcatatataaaagctgataaagatacaaaagatgattgaaatgaaaatctaaaacagtggaaagagacgaaaagcaagaaactttgatgggggagtgtgcttttgagtgaaaagctgttctcattgattgctcgctcatattcacgggaaatattttagtttatttcttctctctctaaaccaaaccgaaccaaatttctttttccggtttaaatcagaaccaatttctttcataaccaaataacccaatttcttcagggacaagtacgtctaaaggttcttgatttcgattttctcttgtctgagagacttaccacgagaggtttgctcattttggaaactcaccaaatagaggtttaccttcaatttaggataagctctttgtttgatttggatggaccctgagtcatgtgaacatattatctctcaatatgatgaggaatggaagatcgggccaacgtttatgacattgtgtgaacatttactcgtcagctttgcaattcgcttactgaaacagcaagccactaaggtcattacaggtccaatactgcaatggtaccagtagtagttagtgacagtaagaagaagaaaatcaagtggaaagctagtattgggaatttcgtggctccaggtattgtagcttatatcgacggacgtttgtgccgacaaattcctaatctaatagctcgccggatcgtgagtgggtttttgttaagttttctcgataaaagcagtgaacaataatcacttcctctgtatatatatacagtagaaccattacataaagtaaaagcaataaagctctttacgttttcttcttcttatcttcatcaatcactataatcaacataggacaatgagaccgatttcgaagtcttctgcatccgaaacccaaaggtgtagtatatggggtttaaacttggcccccaagcaaacacatgtaatttgttgatcagaacataagtttttttttttttaaagaaaaatatatttggttttccttgttatttattacagaaaaaggaaatatgtggcgatctcaaataaaccgacgtagattgaatacaaaaaaataaattaaaaattggaatttcctttttccgaaaattggaaactttaaatatgtctatataatcaacgaggtagtcctcatctctcacattgttcatcaatctcgctctttaattttctctctcagtctctagtttcttaagtactttttctctgcgttgtttttctctcaaacaatggctttttccgatgatctcccaccaccaccacgtgtgaacgatcatgtgaagacgagaagaaacagaaaaagaagaacgatcaagacgaagcaacttgaagaattgataagcaccgccacaagagccgctcatgttgcaagagacaaagggttttacatagtctctccggaagccatacaatgcgttgagatccttagacatatgcgaaccttacctctaaacgctcgtcttattaccaaaaccgacggtttacgcgttcttctatttctctctaagaacggtaaccctaaaatcaggtctgagtcaaaggccgtcattgatcactggaaaagcattctccataccaaagttcattaatggaagagaagagattcactgatcaggactacgaagatttcatcatcaatatggaagagtataaactagggttttattttatatttttgtttgtgacaaattttgtaagaaagtaatgtcattttgtttctgattcaaaagtttatacatatgaagaaccaaatcgatcattaataaacgaaagtagcataattgaggatgggggttatatgtatcaaattgagaattatgggaaactaaagaggtgattgattaagctgacgaatttgactgggagaaccgaatctaggtttattctttatagtttttcggtttaaatcagaaccagtctcttccataaccaaatatcctaaaccggaactaaccaaaccgaaaaaactcgaagacgaagagttgatttctagtccttgtccaaagaagaccactatttctgggttaagacaacaacaataaagacgcgcaaattcagttaaagaagatatacagctgaaggagcaaacaagaaatgtctgaatttgataagcatgtccaaaaccacatcaaaaatgagaagcctttcaattcaatcaaaccttcagaaatcgattcaactctctctttatccgattctcttctcctcaagatcatcgagaagcttcctgaatcacagagcaacgacgtctcactcgtctgcaaacgctggttgaatcttcagggacaacgtttacggagtctaaagcttcttgattttgattttctcttgtctgagagactcaccacgagattccctaatctcacgcatgtcgatttggtgaacgcgtgtatgaatccgcgggtcaattccggtattttgttctgtcacaagtcgatttcttttcatttatcttcagactcgtcgaattgggagtttcttgaggagaatctattgcacagtgacgtaattgatagagggcttaggatattaagcagagagagttttgatttgcttaaccttaaagtgattaacgcttctgaattgggattattgagtttagctggagactgctctgatttgcaagagttagaattgcataagtgtaatgataatctcttgcatggcattgctgcgtgtaagaatctgaagggattgagattggtaggaagcgtagacggattgtatagttcatctgtgtcggatataggattaacattcttagcacaaggatgtaggagtttggtgaagcttgagcttagtggttgtgaaggtagctttgatgggattaaagcaattgggcaatgttgtgaagtgcttgaggagttgagtatttgtgaccatagaatggacgatggttggatcgctgcgctttcgtattttgagagtttgaagatattgaggatttcgtcttgtagaaagatagacgctagtcctggaccggaaaagttgttgcggtcttgtcctgctatggagagtttgcagctcaagaggtgttgtttgaatgacaaggaggggataaaagctttgtttaaagtgtgtgatggagcaacagaggttaatattcaggattgttggggactgagtgatgattgtttcagtttggctaaagctttcaggtaacttgtcctttttgcttcattggtcttctcggtgggcttttgaatcatcatttttgttctttgcaggagggtgaggtttctgtctttggaaggatgctcagttttaacatcaggaggtttagagtcggtgattttacattgggaagagcttgagagtatgagagtagtgtcatgtaagagcataaaagacagcgaaatttcaccagcgctctcgtctttgttctcacttctcaaagaactaacttggagaccagacactaggtctcatctctcgtcgagtcttgaaggtgccgggattggaattagaggcagcaaattcttcaagaagagtgttttacattgaacatatgttgtgtaagtgcaaactcttagtttattatcttcttccctggggcattactactctctcttgtaaaataacacatcccaaactcttatgtatagcaatgtatagtattaaaactcttgcgttcacaatactaaatttcaattttagctgattagagattttaaaaaaaaaattgtaaggtttgtagtaataaatctttttatacaagagaaataccctaaaataccacactattaagttttagttccaaaagtatcatcattagttttttttcttcgaataatactacaactttttgtataaaaataattgttcaaccaaaatatattacaaataaaatataagatattttggatttcctattttcaattttgggtttatatttttactatttaaaagagattataattcattttaatattcaatgtgtggtaatattgggaaaaaataatattagtgatagtatttttaaaacaaaaacttaaaaatgtggtatgtttgagaattgctcttatacagctagtgttgcagtcatcgcaaatcaaccacaatagtaaagaagtaccatataagttatatttgaaaactctcaacctaatgcaacgaattataaacacatgatattctcaacatgatccgtgacagccgatattcttgctgacgacgttctagtctgaatttgaactcttctacgtctatttcgttttggtagtaatagtaaacgtgtgttgcatacttactccaatgatggagtataacgaattcatcaccagccaccaggatgagtgacatccgcaaatgtgatcggactaattaaaccttgaagcatgccagaaaaagtaaccttggaccaatcttgtttctcggcatcctccataactcacatatccgcatcctcgttgatcatgttattgcgaaatatccatgctaacttcccttggtagtttataagagtggaacctctatggctaatcgttatgttattgggagtctggacattgattaaatatctcagacctaacatcgaaaactcaccaaaacacaactaccgtccggatccttttctgttgctttgtaatagattgccccgttgatgcaaactgcattatcgaatggaaagtgacttccaatgccgcattgaaaattctcccatttctttttgggatctccgaatgtaagacttctatgcatataatttacacattttaaaaggtttgtttgttaataataatacccacgatctacgaatactgtatattgtccttttctaattcccacacgttgccttaccgaagtgtgatattatctaaaataggtgtaatgtaattatcataaatatacaaattaaatttttgtaaagaaaaaaatcaattaatatttttcttatcttaaatccgcatattaagctaatcctaatttaataattaacaacataattcaatgttttaagggtaaagtatagtagtagaccattttacacaatttaagagatgtgcacaacactatctttgtctcattctaagtcaaaagtcaacttaaaaatcccaccgtgattcccattttcttttattttagcccaaaaaacaaattaataaaaaattcgaaacactctctttttctctttcgttatgtctctctctctctctctccatctctttcaatgtatccgttagaacagttcgtaatccgccgctaaatcaaaccagcgagagagatagatccaacgtgaagaagaaatcgaaaacgatgacgtttagggagaaaatgccgacgagtcctaaatcgcctctgagaagacgacgttcgagctggaccggtacatggttaaaccatcagacgacgtcgtttaagcaagcagtctccgccgttattcaagctcaatcaccaagatccaggtttaaatccctatcttctgatttctccgacgtcgatcgaactctttcgttgtcagattctcttcttctcaagatccttgagaagcttcctgaatctcagaacgaagatgtttcactcgtgtgtaaacggtggttgagtgttcagggacggcgtttacggagtatgaaggtttttgattgggaatttttattgtctgggaggcttgtttcgaggtttcctaagcttacgagtgttgatttggttaacgcgtgtttcaatccgtcgagcaattcagggattttgctatgtcatacgtcgatttcgtttcatgtatcaaccgattcgtcgttgaatttgaattttgttgaggagagtctgttggataatgaaatggttgataaagggcttagggttttaggaagagggagttttgatttgattaagcttgtagtgattaatgctactgaattgggattgctgagtttagctgaggattgttcggatttgcaggagttagagttgcataagtgtagcgataatctcttgcgtggtattgctgcttgtgagaatctgaggggattgagattggttggaagtgttgatggattgtatagttcatcggtttctgatattggtttgacgattttagcacaagggtgtaagagattggtgaagcttgagcttagtggttgtgaaggtagttttgatgggattaaagcaattgggcaatgttgtgaagtgcttgaggagctgagtatttgtgatcatagaatggatgatggttggatagctgcgctttcgtattttgagagtttgaagactttgttgatttcgtcttgtagaaagatagattctagtcctggaccgggaaagttgctgggatcttgtccagctctggagagtttgcaactcaggaggtgttgtttgaatgacaaggaggggatgagagcgttgtttaaggtgtgtgatggagtaactaaggttaatattcaggattgttggggattggatgatgattctttcagcttggctaaagctttcaggtaacttggctttagatagcttccctatacatgtttcactttaactgaactgtatcataaacacttaaacttggtgttggtgttccacatgatatagttagcaaaagacataattccatgctatgatgactgaagttgttaatatggatgatgaaaggcatcgactgtttttgctttgatttgtgtgtttgatacataaactatggttacttaaaagagcagaagccatcgttttctattgttactcttaggtcttttcacatcatgatcgcatcatttaactgccaaaaaagtggaatgcagcttctctgagaaactaatgtgttctttaacagaactatatcgtaaaaacttaaacttggtgttgttgttttgatcatctttgtttcttgcaggagggtgcggtttttatctttggaaggatgctcaatcctaacaacaagcggtttagagtcagtaattctacactgggaagagcttgagagcatgagagtagtatcatgtaagaacataaaagacagcgaaatttcagccgcactctcgtctttgttctcccttctcaaagaactaacgtggagaccggacacaaggtctcatctctcatccagtcttgaaggtaccggaattggtaagagaggtagcaaattcttcaagaagagatgatgttctacattgaacataatgttatataatgtaatgtaagtcctcgcatctcatgtgccctgaaaattcttatacacacaaactcttcttattgtacgggcattattactctgttgtaaaatctgccaaatttgtagtcaatgttcaaacctcttatgtactgcaatgttctattgttatgtataataatgaaactcttgtctgtcgtccatatagtatcaatttcaatctaaagaatttacaagataaagaaatacaagaaacattgtttgttgttagggttattagtttcgatctctagagaaaaaaagtttgagaaagtcaaaacattcaaaacaaaagaaccttctttgtcttcgtctcgtatcttggatagatttcatagcttcgttacttctataagctctcatgaccgtgtcttgttccacttcctcttctctaaacatcaagtctgccacgtcatcttctccatagaagatatctctcttcccggcttcagctaagctcttccgtcgacttaacccttcagcactcgcctgaaaacatggtagtgatgcagaaactcgtgattcaggaatctttcctccgatcatcttctctggggatgaagtggtcctttgtatcatctaatcaataaaacgtagggcagagacttgtatacctaatttcgtagttatcgttacttataagaaaaagtttggtattttgttattttaataggactagatatataagaattatataatgcaaaacgtgttgcgattttttcaaagattcatatttatccaaaaaggagaaatttatctacctatagaaataatgcaaatcagatattttaggcatagaaaatcttaattttgagataatgataaatcatgattacacaaggaaaaccagaatccgaatctatctatatgagtttgaaacaaaccaaatcggtttacatatataaagttagattcaggcaaaacaaaaccttgaatctgatggggaaccattgaggactacaatggcctcatctcaagatcagagctatggtgtgaaaccggaacagagttgtggtggtgttggtctctgtcaccagaagcactcatctcttgaaccggtggtgggttgataacagtcataggcatcacaaagttatccgaaagacgattcttcatctcacggtgctcttgacaaaccgcacaaaagtgaaggcaacaatgcaccatacatggatcacatggagcattctgtttccatcaaaaccaaaaccaaaaaacacattttcagattcttttttcgcagtttgatcgattttagatgttaatgaagactttgcttacctgaagatgatatttcctttgtagagtttgacggacatttccagtgtatatcccacacatccaccaaacaaacaacaaaccttcccatataagtaaagaagtatgcggatcaataccgggaacacaagcaagcatcgatgcagcagtaagaccgccttctactacaatggaatggcaaatacatgctttcttccacgaggtttcctcatcactcagagtttcatagacacgtccaaatagaacacttgggcagaaaagtcccagccaaactgtaaagagcgtataaagacatgagaagcgaatcaaaaccgaaagatcaatcacttgatgatggatttattatacagatctgtggaaacgtttagatagaacttacaactattcatgtcctcagtgcagccgaatattccggtagtccagggctcatcagcaggagcttcaaaattctcaggcaaaggttggccacactcattgcatttgtgaacagctagctgcggaggagtttacacagaatcagaaaatttcatagatcgaattgggaaatctagagactctgatctgagagtcacaaatcagtcaaattgacacaaccacaaatcaaaattgatcatttgaagaagaagaatcacggatctaattcacaaatcactgacattttcgattgaatcgtgaacaggtgaaatcgaaaattgggaagcgtaattgtgaaattagatcagtagaggaaaagagacagacatacatgagaaacttcaatgggctgattgagttcaccgggatgaatctcatcgaccggagcttgttccttcgtcaacttcacgtatctcgacggtgctcctccgtccgacatctgaaatccaaaattagatcagccaaaattgaattgaaaaatggagaaaaagagagaaaaagagatctttacgaaccatatgaaggattggagaaaccgaagagtgtcctcaaaggttcgtcgtcttcactattttttttttttttggttttatgacattgaaacttattgaagggctgtttctgtgctttaaaccaaactgttacctaaacgagtttaagactaatttggtcttcttctcttccgttgactcactcaactcattaattaagctacgcattatgtaaaacgatgacgtttaactgcagaagaaatttccataattaaaatttgttgacttctttcacattgttttccgatttgatagttttagccggagttaaattggtatggtaagaaattcaaattttagttaacctcatgtcattataggcacgattcaaaattatgtgtaagtacgccaaacaactaattttcgttttatccctccacgtacaagtggttctgtttgcagatttgatggttttggccagatttgaactgttagtgtaagaaattcaattttagttaaatgatttaaagtttttttttgtatatatatgccaaaacgataaagtttcattgaataaatggttgttaacccgctgatcaatgcattagaaaattgggctacaaaaaacgtgaacttttttaatctgatcccaacgaaaccgtcaaagattatcattggtatccaactattgcatgctcttcatatccaactattgcatgctcttcaactctcatcaacaacttttattttgacaaatgttgcgtcattcttacaagtttgccatataaaagaagcttatctatagctgcaaaccaggagccccgaaacaatggtttcatatgctgagctcttgtttgaatcaaatagactgtagaggagaaatcggcaaaaaaaaaaaaaaaaaaaaagacaaagttgtaaatgtttagatcaggatttaagccaggattacaaagacgccatccggctttgtggtagaccaacaacacagctgttcttggaacctcaacacagaccaccaaaacagttcttgctcccaccagagaataccttacctactgttttactataatgctctagccttggagtttggaaaagattattaaaagttcataaacaacggagtgagtttacccgatagaaatcagatatcatgcagaccaatccattgaaggctagattccaagaaatgcaacagttatacctaaccccaaagccaaagattatcattccttctgtgtatacacctaagtgcagacagagaactcgaagaaaataaaccaaattcaaaacccaaaacttctattaaggatgacttctgttgtatatttgttacctcaaatagattcgtgtcattcgatcccaacaatcccgattctgtattctttaaatcagaaaggtatatcaaacttgaaatggtgtaccaaaagacaaaaataaaataaaatgacgctatagcatctcaagtatcgagaaatacaatgaaaatgtaaaagttttacgggtaatacctacctcaacgcttttgacctcttaacaaataaccgatgaaggagaatcggtaaggtctcaaactcttagaatagctgtgatccggtagaaagacaaattttatccataaattttaacaaggaagttccaaaagacaacacatgcttatgaaaccaaagggggtatcacattgtctacctcattaatttgcaaagttcctggccccaagacatagtgacaacaccttatctcaaactagtactggcaaatggtgcttctcaacaccctttcgtgaccagaccttccacgagggtctcaaactagtattggcgaatggggcttctcgacacccttctgtgaccagaccttccatgaggagatcgtgacctgcttcgatctcggtcctctctcccactcctcgatctcctgtcataaggctttctataatctctaccacggtctctgtgtctgtcaccatctctgtttcggtctcgatcacgatatctttctctatcactagaaccactcctcttactctcgctttccttctcccttggtttcctcttatcatctgcttcttttcctcttactagtctttcttcttcctttcctttatctttagcagcctagaatagaaaaagtaaacaaagcatcactatccccattttataaggaatgacagctcaaatgaaacaagattcaagtattagttctgagacttactttttgttcagcaataaaatcccgaaccaagccatagccaacatgttgctttccagtgacatgagactgtgttctttctactgcatcattagccacaagaaatgaaccacaaacctcacacaatgccatcttcttctcctgagccatcgcgagtaccttgtcagttggtcgttgtaacaacactgtcttctcagcatttagcccttccacctaccagagtttccaaatgataagcactcaatgtactaaatttatgatcataataaaggtgacacataaggtataactgcaaatacggaggaatcaagcagaacaccatatttcaagtttcagtatgatttgttaagacttcaaaagtcttctttttttagagaatggtaaacaaatagtaccttcctcattagcgcttcagcttcatccactttgccttcttcaccaagtgcttccacttgttccaaaaggttcttaactttctcctccaagacagacaattgttcagctttctctgctgatagagaaggtggtggaaccggttcaacttcttgtgcaagacgttctcgcccacgcctaactttcctatcaagatcattcacctgtaaccaattccaaatcttagcatagagaagaatcaaactctaaagaaaagaaaaaaaaaagtatgacaagcattacacaccaacttctcgcaaaactgtgcaagctcagcctcgaatttaggcacataggaatcatgcctcggagagttctcgaagctgaaacagaaataatcaaaactcattcacataaatgcgtaaaatgacattctaaggtaagcttagtcttaacctctacagataaacatgcaagatagccacatctcacacgaatcgattcagatttgtaacaaatcaaataaatataatgaagaagatctcaataaagcgtaacctttctttcaactttggatcatgaattctcgagcatgctcctgaaaacaacaatgaagcttaagataagctaaagaaaagcatcatacaaaaaagcaagtagatacaaatagtgagactaaccaagatcgcttttcgtgttaacaaagaggtcatgaggacaaaatcgaaccatatagaatgcacatacttctctatcgtcccacttaacctccttgaaccctcttctctcttcgtctgtcagattacgagctgcaaacaaaatcgagagcaatttcaacaaaaattcgctcaattcttaacatggatacagaaattaaagctttggagagctcaatttcgaggattaaattgaaaatagattttggtactcgattattctcacctgcgcccattagttcgtccaacagagctcgctgagcatccatggcgggctaagaagaaattgaaacttaatccagagagagataaaggaaattgcagaatcaaattgaagaaattttgaagaggatgacgaacaaaagtggagaagtgatgattagggtttcgttcgccacgacgaataaaaggcgttcgtctatggtaaaactctatgattgcaaaataaaaaataaaaaactctattccctatataaataatgaataatcatatcaagaaaaagttgaactaaaaaataatatcacgaaaaaacaaaacacttaacgaaattaaatttttaataaattcatagacataaggcaatcacaaatttaagttttattattttagaaaacaaaaatattgatttatattataggggaaagaaaaatattgatcgctaaatacatttatttcagatattagaacagatactagcgaataaaaatcagaaacgggcaatccgaatagtaaaaaacacaacctgaattatttttgatacctattgatttgaatggtggctgcgttttgcggtgcaggagaagtgcggtgcggttcaaatagtaacgaaaatatatagatacatatgtatatgtaaagattttgatactgttacagcactgttgcggtacggttttgggtgcggtctatgtcaccattaatggccataacgaaatgaaaatttcatgttacgagatggaattcagattgggttaaattcatgtagccataaaaaaattgtatgaaaatgtagccaaatttacttttcaagtattcattaattaagctaagagttgactttggcaaaataaataaatattcactaatttgactgaagataggttacaaaatgaattcataaaacatttgtagttaaattcacttttcaaactatcactaatttggataaaggttgattttgaaacgcgtaaaagttaactagtttggctaagaattgacttcggaataaaagttcacgaaattcaacccgtcttaaaatggacatgcctactaatcatcacccgtcctaaactttgtgactatgggaacgttttgttttgaatattatagtgacttcaaaacgtttccataatcgtatagactttactagctagaaaaatcaatgtactaaagacttgtcaaacaaacccttaattaaatgtactaaagacgtacggagaatgctctgttccaatgacttagtatttgtgtgaaaacaagaacaagatacattactcgttttaactcttatttcacatatgtatacgtgatcaccttgcattccctaaaacaaagagccattggaacgtctctaaacctttagcaaggaccaatgagtattttgatgtgttctttacatagttgcatacaccaaaagagaacatgcattccaaataaaaatgatattagcaaaaaaaaaaaaaacatgtttaagctttgtgacacataaatcatacagtagcagcaagaaccttgacgcgataacatagtgaatccttgttcttcatcatgcgcgagttgtttaacgaagccttgttcatctctggttttttaacacatccctagattgtaagaagggcttattatctttgcttttcatattgtagaaggtgagatgcttacctttaccgttgaattcagctgaattcaaaggccatttagagccttcgttttgcatctcacacaaaataagaaatctttttaccattcaagggtaaactagtaaacttatataaataaataaatcacattgaaattgtaaagccacaattgttttgaaacagagagagatgatatgataatcgagctacagaaacacttaaatcccttatatcatgatttagcaatttatcaccagccaaaagtaaacaacttgagcttgacgaaaccaatgaagaacatggcttcgttaaacaacttgcgtatgacgaaaccaatgaagaacatggcttcgttaaacaacttgcgcatgatgaagaacaaggaggattcgttaaacaacttgagcttgacgaaaccaatgaaaaacaaggctccgttaaacaacttgcgcatgacgaaaccagtgaagaacaaggcttcgttaaaaaacttacgcatgaagaacaaggattcgttaaacaagttgcgcacgaaaccaatgaagagcaaggcttcgttagcgaatctctgaatcttgccggtcctgacaagaggagggaaaaacaaccaaccagcagtcacaacgacaaaccccataaccatcacttgtaatatcaaacacgggcaaaattcaaaccctatccaccgcgcaatcttcttctttaacctggcgtcgtacgccacaatgcaaaccccatgtaacacgaagaacagagtaacctctccagtaggccgctcacgagttatatagaagaagagaaactcgtgaagtgcaccggagacaaggaatgtgacaaaaactcccaagtacagagcattctcggagttcattttcccttcagtgattcgccgcatcctagcgtagacgtctggcaggaggatcgtcgggagcatgagtgtccaccagtgaccccagaagtctcgaagagaataggccaagtatggttcattcagctgtggctcgagttcgcaatcaagagctatagagaagaaagcgttgaagagctttaagagaatctcaagtaccaagtatagatggagtggatagagaacaaatagcacaatgggatatatatgttgtatgtgattatacatatgtaacactacactcaagattacaactttagtcacgaattggttactaaacaaaacttcaatggggtattcccattggaagaaatagtctcggcgcttagggttttgttgaagcttgatggggaagcaagcgaagcagatgaatcgggtgagatttgagggaagtggaaaaagtgggccttgattgaaggagaagagtatgagtttgaaattggcgagccatgagatgaaaagcgctgtgtaaccagagaggtgaacagaggcgaaaaacagaggaagaacacgaaacagagcacaaattggaagaacagagagaaatctaaagataccaggtttgattctggttggtacgtagtaacagtaagatatggagattattacagaaaccgaaaccttgatcaagttcttgagttcttcctccatctatccgatctttttttttttttgtctttcttgactttgttatgacagctacacattgttagaagattcggaccaaggaaccagttttgcctcttcctctcacgcaatgttagtggaagccatttcatctatgatttggtcttaactaaaacggcttgtcacgagtacattttatttaagtaacaaactattttctaaacaataaaaaacacgaaaaaactacgtaactaaaacattagacaatgctgtaatacaatatgacaatggacgagccgatttgttagcaaagtcttatcgaaacccaagtagatttgagactaatcgaaactgatacgacgcatcttacaaacaagattagctgtagggcagtcgagttcattaccagcttctgatttcatcacatctttgagctcacctctcggtgtagccaaacacgtctgaaaagttgcaagaactggcggaattggcatggacagagccgaaagcacattgctcaagtactcaatatctacagagagttgttgtgctcctcggtctgaaatgtattggattcctctcaattggtccatgtacagagcggttgctccttctgctacctgttgttttattaaaaaaaaaacacttagtggttaaggtcttagcttattgcgattcggtttgacaaaagcttaaattagacttaccttgaacatccattcggttgcaaagaattgtgcatcctcgttgtttgaatcgccgttggttgagatgccttcagctagaggctcaagctgctgcggcaaagtaaggagatattctccaacacttgtaacataagactgcgggtatgagctgaaatttggtagaggaaaagcagtttgttcctcgacggaagaccagattggtaggcgagatacttcccctagacgttgcctgacttttgatataaggacgtcatagacaagttcattgactgtgtcggcaaatgcagcaactctctgagacgccaaaggcagtgcgtggaatcgtggatctttggactgcaaaaaatcaaagggaaaagggaatcgatacgcatgaaatatcaaatagttaattcagaaactttgtaaatcaagcctacaggttttcactacctgctccaataggtttaatagtttgtgagccttctccggaacatcaaccaaccgaatagctgccacatccatggaagctcgtccagccatagacaaatctccagcagtttgttcacttttcaaatgtgataggttgtgatccaaatttgtgccaaataatgaaatagacaagctggagtttagtctagctagagttgctctcaaagaggcttcaaagacagaagacctgctcgtgagacaatcagctacagtaagaatttgaagtgctccttgaacaatggaccattcctcatttgaagtcaaatccatcttgcgagagctctcccttttctctgcacttgcatctttctttgagccaactccatcacctgtaccatccactccacacacaactctcaaagatttgagtgtttcttgaagcatagagatatactgcaacattatgtcatctaatgcaagtatcagctcgtctgcctctgaccctccagtaaagccaatacacctttcaactgcagcttcaagaagaacaacaacttggggaatagactcttccatcctacgcactgtttcactgagttcaattccttgagccccaacaccacgagtaacagcccctctcagatccaccactgcaatctcagaggataaaatagcacgttccatcttcccatacctaaagcatgatcaaaccttatgtcacaaacagccttgaagaaccacgacccaaaaaagtttcatcaaaaaaatgggacaatccataaatactagaaatggatacaagacatgggggaagagaagtacacaacatgaaaacttacttttgcttaaacgattcaaagggtgagtacacggccttcagcgtatctattaagatcctaagttcagattccgcaaacaggtgctgaatatttcttgcaaaggaaccagttacgttgtgcagttcaatcagagcctcaagatgcttggtctgaatattaatacccttgggcaagtctccagataatagatccatcacacctgttcaaggaaaacatcagaattgtcagtattctcctaaatacacaaaatacagatataagtcaattgaagataatcgtgcattgtctggaaaatttccagtgactaaatgaaaaatgtaacaaataagttgttgttcaaacttcctgcaagtctctcttgcatattgacagattcatgacatcggccactatgcacaaaaattacaaacttaacaagaacagccaaaaactttagctcatgtaaaggcagaaaaaagtgatactcttcttacatctatctacccaaacatgaggatggtagagtagaaccactaaagaagcaacgcaatcccaattcagctgggtaaaaagactagactaagaaggaaacctaataatcaaactgtactgacatcatatctaacctttggcgagtgcttttgtttcaggaacagcatctccagttgcaaggttaagacgagaaacaaaactagcccccagtactcccatggtctcaaccaacagctttgggacgagagtcatgtagtcatcagggaaggcaaccatacacctaaacaatcatgaaagcaaaaacgtacaacagtgattgatacttaaagctgcaatcacctaaagatctgacatactgtcactggaagggcccggaaaatatatacagtttactgtaaataaaagtaaaacatttaccatttccactcttgctcaagatagagtagcaactcgtcgtaaaagcttgtcagccaactggcaaatgatgtctgagatgatgtcgactgaaactcatcgccgctagacaacctttgactttcacttctctcattggcaagcttgtttgccctttgctttgtgtcaaaatcttcccagagttgtttaatcggctttagacggacttttgaatattgcaactccagagacttgaatctcccaatccggatgagaattactcgcaaatcttgggcgacatcaacctgccaaatttggggaaaggcttttcagtccaataatggcaacagagacattacaacctaaagtagttgggttctctagatatacaggttccaaccttgtgatatgttaatgcatcagtaagacgtggctgcaccatcgcctccagcctatcttccaatacctctagttgctttctcacattagcaaattctgcaacctgttgacaaaaattggactttaagtggtgacggaaaaagacttaaatcctcagagtactgaagctgacataaaactacctctccaacagcagacaggcaatttcgcatgctagcaagagtttctgcagcacgaggaagatcgccactagcaaatacatcctcaaccgtcgagcttaactgagttaaccctgcagcatcctgtacatataccaaaaagaagagaatcaattgcagatctacccccaagtgtccacataatggatcacaaaatcactatgaatactaacctgtagtgttttgtaggcagcctccattctctgtttgacattgtccactctagcaagcgcagctatacaatctgctgaagaaccctctgcctgcagagtaccgaattcgataagagcacaagtttcaggaatttgatataatctaattttcgagaagagatccaaacaaaatctcaggaatcagcacaaatgcgtaccttcttgagcttctggaggattccagcaacagaaccacgcagagacacagcatcatcacggagacgcaacacgtctcgtgtggcacgaggaacacggaggagagcaccaccgctctgctcttcaagagaagctccgatctcctcggaggcaatctgaagcttcatttccagatccacaagatgtttctcgagtgaatcctgtgggtgacgcgcctggcacgacgagttaacccatcgcttcgcatcgaacttctcatctgagaatggacctagatccagcatcatccttgatccgatcacccgatttaccttagattctcttcagcttcgacgatgatgatgttgaagagaagaagatcctctgatttcgcagatacactgaagaagaaactaaaccaaatcgatctaaaccgactttcaaattcgactttaaaaccaaaccaaagtaaacggaagataaatttacaaatctgggccccaaagtgatgggccgtcacggaaaaagttttcttctttctttttctttatttttctttattttacttggagaccacgcagttctagaaccatccttaagcgactctctagcctctagcagcttcttctactctctgttctatataaacctttctctaacagcttttttttcgttcaaagagtataaaaaatatctcatcgagcttgaaaataattaatcacttgctaattctaagcttcttctctttccaaaaatggcgtcatcatcggctttagctctcaggagacttctctcttcttccaccgtcgccgtccctcgcgccttaagagccgttcgtccggtggctgcttcatctcgcctcttcaataccaacgccgccagaaactatgaagacggtgtcgataggaaccatcactcaaaccgacatgtttctcgccacggcggcgatttcttctcacgtaaatccatggttcctccgtccaatttcgctatagattttcccaatttgatacatgtttagtgatttatgtatagagtacatctaactttgttttggagatctgttgaatctgaaaatttggttgttttttcaaacagatatactcgatccgtttactccaacgagaagcttgagccagatgctgaatttcatggaccaggtaagcgaaatccctttggtatcagctactcgtggaatgggagcttctggagttagacgtggttggaacgtgaaagagaaagacgacgcgttgcatctaaggatagatatgccgggactaagcagagaggatgtgaaattggctttggaacagaacacattggtgattagaggagaaggggaaacagaggagggagaagatgtttctggagatggacggaggtttacgagtaggattgagttaccggagaaagtatacaagactgatgagattaaggcggaaatgaagaatggtgtgttgaaagtggtgattccaaagattaaagaggatgagcgtaacaatattcgtcacataaacgttgactagagtgttttattttggattgtttgagatggaatggaagtaagtgagtgaatttgtgaactttaaggtgtcctttggtgaatcaaggagaatgacatttcccacggtcctatgtgttcgggattttgacttttttcgttacatcaatgatctatgtacgtttgactactttcatatcataggttcggattttgtttcccaaattcttgatatcggattctggatatgaatatcgtagcaactatgatatagttgaagttatttggatattatttatggagaaaaagagtctgctaggacgattttctatcattatacctatggactatggtggtgttatcaaacatgctggacagagccatgatcaacgatacattcgatgctcattctcgatgttcaaactcggttttataaggggatgatacatcaaattgataccaagtaactgattttgaatgtgctggaaatgttgatataggtctcagcaaccagaagaaggttgtgggacaagactattagagaattttgctaccgtttttttttcacctctgtttggcaaagcgcgctctttatagctttacttctttggaaccacttcggtgaccatagaactcgttcgtgtcggcatcgtcaaatttaagtaactttttatttaccgcatggtttattattttgagtttttttcttccgcattttatattcttcatttttccttgtccatcgagaaagagagacaaaaagaggacgcaattgccggtgctgaggagaattttccaatcgcgaactcaggttttgatccatttcgctctctgcagaatccaccattatcttcatattttcttctattgacctcaatctttcagctcatctctctcctttggttaattgaatttcccagtttcttcaattttacttatttaatacatatctctctcaattgcagtatcctatgaacttcgtgatcatggttttgaattttacttgcttcgattggcctacgttataaaaaaattgaaactttttaactcaattctctaacttacataagcttttggtttgcttagcttatgcaaaatcatgttgatgcaggggacgtcatgctaaatgagaatctgtgggttaattcggagtgagaaggctataatagtttctaatggggataacatatttgcacatttccgtggcaacaacagctttgagctttgtgggtttacaagtctggacggagttgtctcttgatagacttagagctgatgggataatcaccaagaacatttctttagggaattctgagaatacccttgagcttcttctgagttctcacactacaattgcattgctggcaagttttgttctcaatatctacattcttcttgttctttctctcaaggtaagagtggtcttttacttccgaggttaagtttaagcaatattcgtcggctagctttattcttacgtagaatagatatacatcttttgaatggttctttcctttagatggaattcaatgtaaagctcgtagtttggctattagaaaatacatgaattataagtttgcacctgcgggttaagagttgtggtgtaagaaccaagtatttctgacctgaaggatttaaaaactcttggttttcgatagttataaggcttccgtgaaaccaaataccatgctatttgttgccttaagggtctgcacatacttgtagggtaataatagactagctgttttgggaaatgtctttcaatcattgtgtgaggatctgataactcttaatattccctgcagactctgttttttggagatctatatgccattgaaactagaaaactggtggaaaggcttgccaattacatcatttacaaggtagttttttgtactttgatgaaagacagtagggtgcaacggaaaccaacccacaatttctgtcacttatatagttttatgatatctgggatattctattatctcctttactgaatatattgcaaaaaaggatgaagacgaaatcctacttaaaatgacaagcattaatggtacatgagcatatatttctaccacattattcgattggatatctgatctgtttgcataaaattaagttatttgcagatgtgtgccattttcatgttaataaccttcttggttactcctgtttttagggcacttttctgccattcgtggttccacgaacagtatttcagggggtcctatggacaatctggttgactgttctgtgtactctaaaggtatggtatacaggttgcataattggctttcttgatttatgatcaggaagtgctgatttttttttctagacaccctaatgtgtagtaaaatgttgtgtagatgtttcaagctttggctagagatcggcttgatcgattgaatgcatctccttcttcgactccttggacatactttcgtgtgtattcagcactgttcatggttctctctactgatttgtgctggtatttccttaactctttggtatcatgtgaaattttgagttgcggctttttcaaccccttttttttttttaatatgagtgcactattttccttcttctatttcaaaatatgagtgtaaagttttcctcctagtttctgtctctggaaccagatatatattcttaaaataaaataaagtatagttgtatatcagaggagacaaaacaaattaaccctaagtctctgaatggtgcacatgactttcatgatgcatatagttctagtgaaagcagtgtaattttctgctaagataaaacagaggctttagtatgttctgagggtgcatatgctgtagtgagcggagaaaatattgtgttctagagttcccgtatttattatactgcagttcaatgaggagaaaatagggagtttttaattcatacaccagaccctctggattatcatattctgttctagtgattgaagaatgaacttgttcgtctctggatgttaattttgtcgaatcttgcaggataaagctttcccttatgatatacaatacagttggttcgtctgtctatttactgttactttttgagccatgcggtatagcttttgagaccttgcaggtacttgagtaagatagttgtattcattgtttatgttacccttctttgtaaccgtacctagaaatatagagggttgatcaatcgcataatggatcatttttttcaggcgttgttgattcacgggtttcaactgcttgatatgtggatcaaccacttagcagtcaagaattcagattgccagagatcaaagttttatgattccatgacagcaggttttgtctttttctcggcatatgattgtaattatgttttctgttagactgcaggcgtgcattatttgaaattttttgtcctgtttggtgttcacattactaacttgacctcttacccattgaataggctcgttattggaatggaaaggcctcctcaaccgaaatcttggtttcttcctagacatggctaccttggtaatggccctcggtcattatttgcacatctggtggctccatggaatggccttccatctggtggatgcagttttgtttctcaacatacgtgtaagtctgttaattgactttctttgtaaaagtgccactctactggtttcttaataggcacatacctaattgttaagttctttgtgtgttcccgtttgattttgacaggccttgctaagttcaattttgaaacgaataaaaggatacatcaaactgagagtagctttaggtgctcttcatgcagctcttcttgatgcaacttcagaagagctacgggattatgatgacgaatgtgctatatgtcgggtaagtttctgcttgatagttattggtctccttactttttttagtagctcactaatcttggaaccattatgaatgataggaaccaatggctaaggctaaaagacttcactgcaaccacctttttcatcttggctgcctacgatcatggtatgctagctctgttatgttggcagccttgtgctattgcggttctgtgagaactgtaaatcataatgatattttgactctggcaggttggatcaaggtttaaatgaggtttactcttgtcctacttgccgtaagcctctttttgttggtagaactgaaagtgaggcgaatcctagcagaggagaagtctcaagcgatgaacacttagcccgtcaatttgagagacaaaacaattctgtgcatgcactaaccactggaatgtttccaactgagacgccaaatttcaccgaaagtgatccttggaggttgggttcattgttccatatgttttcttcttaagtgcattaaagtaacagtgtgttcataacaagatcatcaacttcctgtggtttcctatccctgagctaaaatactatgcattctctaattttgtctaattatacttggttcttttgggtagcaagtaattgttggttttgtgaggaccaagcttgtgcccccattgattttctttttaaagactggctttcttaaacgggattagcagttctcacctttttctcatgccatataggaattcagaggtggatccaagctggctgcaaacatggtcagatcagggtgttgatgttgtgggttcctctgcaggctccagatccgttgggctggggcaggttcaattgatgatgaggcatcttgcatctgtaggggaaggttctgctcagactacacttgacgatgcttcttggggtctctggccaatgaatccttcgcaagcatcgacttcatctacatatgttcctcctggtgctggaggaagaacaggtggtctgcatctaagaactgtctcccgtgcagcaaataacatggcgagtatactagcaatggccgagacagtaagggaagtcctcccacatgtgcctgatgaaataatttttcaggtaaatattagatgcatttattggtatgtgtctgctttgacaagcaagctacttgctgggttgaattgctaggatatttagttagtttcctgcatcaaatgaaaggaaaacatttgtatatatgaatttgtgaagcaaaattttcattaagaaattaatgggctcaatttttctgagtttaatggccatttgttgtcatttgtttgcacacgctgggtattgaagtgatgattgattcaatcttctttcaggacctgcaaagaacaaattctgtttctgttacagtgaacaatcttctccagatgtgaaaattggtttgcctaaaagtaattagcagttccattcgataagatagacgcatcaggaaacatccttgtcttttaagtttgactcaccaccacacatttagaagcgttgtctgctgtaaataggaggcattcttgcaacagactttgcaagagtaagaggctctagagtagattttgttcattgctcttgtgggataaataaagctcatttagttgcattgttcagtctgatgttggaggctttattctctggagctggtaaccagtctatgggaatgcacgtctgaggactgatgctacctccatttgtataagaacgtgtaattttacaataaaacaaaaagcagaatgtattgttattgatccaatagatcttctcaattgctgaaccgtttccttaaagctgggtcctgctgtctactctataccggtttctttagcttgaatttgcaggtttcatggcttcttggaacagaggaaagacattctgagggaacattcttggtccagatgttgggttcttggttcttgaagctcttttactttgaactaacatgtgttatttgttttagaaacacgcaggaattgagcaattcaataggactttttgaagacaagatgtctcggagattgtgtcaaagctcaaaaagtagtgttaacagtcatcgtcaacctccaaaccatcctcgaggcagacaaaaccattaaggtaattaaaacaattgccttcaaaaagtgctttaagtttttcatataataatgcaatccgaaactagcttgcattatcttaatagaatatttaccgtggtagtcggtaagttttggggattggtctcaaatgagatgtgtaagagacaagaagtagtaaatcactcgtttttcaccgaggtttatatgtccttttccttttgttgtttctttctctctttttgactcatgtttggcttttcccatgagcttttccagcacattcatctggattgattaaataaaaaacttgtttattctgtgatttaattcttacattcaaatacttatgcgtgaacttgctcttattatatagtctcctactacctattaagtcttttaacggttcataatcctcttagtcgttgagccttgtatgactgcttctgttgtgaccaatgagctcaatccatgttgcttcaatgatccttctcttgtttctcttcttgcatcattctgattctcgtcacctcgacaatgtccacattacagcgtctcggttttcactcgtcaaggttcttgatccacatttcaattcatcaacttttcatttactttcatgttcttcgtatttgcggtatctgtttatcaccttctcaaaactaaggcttctttttgtttttctgtggcttaggatcaaaatgttgtctctagttcgacatctaaagaacccgttaaagtttctcggtttgtgccgggtccattgaagcaccaccatcgtcgtccaccgctcttatttgcagattatccgaagccgtccactcggcctccacgccataactgaaacctctctctttagttttttttttttgtcttcatatttagtgtttttgtatgtgagagagagtacatacgtccttaacagttttcttaatatgtttccaaatgtggaattcttttgaagtataggttcatgttttcatttctagctgacaaaatccatctattttgagtaagttttgggtaagagacgcattcatagctgctcaaactatcacgaatttgcttgccggtttaggcccattacaggttaaaagcccaattgtggctcatttacattctctatcaattttgtaaatgtaagcaaatgtgtgattttgcccaaaaaaaaaaaaaagcaaatgtgtgcatgcatgtaatgaattcgctactagactactactataattgagtgtaactttcaatagatagtaatgaattcgtataacatattgttcttaattcatgtgacgtaagacgactgtattctttgataaactattaggatattagtagtttatagtctaaaaatatcatgaaactaaacgaaattcaagttaaaaaaaatggagttgttgaggcatgaacgatggtcaaagggaggagcagaaacagcggcgtcaaacaagaggattctgactggtaaatttcaatttccaaaagatcttccaatttttatactctactactattaaacaataattactactatatgatttaacataatatatcttcataaacaagtttcaaaataagtaaaatgagtcgagaatccaactggtgaaatggtcctacctacaatcttccctcaattggtaccgaacgaaccttacatctcctcgaaaagccaaatctccatatatatattttttttcttacaaaacagtctttcattttccacttctaaaattggttccaattttttgtcgtcttcttgtcagaatctttgaccgtcttctttgtagtattgcttaaattacactgcctctcgtcaaaactaagtttgacccgacttttctttctttaaacaacttctttgagacgtcggctctttatttttattttcttgtgttcttcttctgtttaaacaccataatcaaatttggtcaagtggtacggtagcaagtagtaactgtttttactggttaaactgattattgaactcaatgaatgacatctttattgattttgtgaccacatcattcagatatttgatttggactgatagtctaaaacatgtttatatcgagtttcgaaaaatattgttagtgagttatgaaataaaaaccttacataatctctgcttggaaaacaaaagcttatagtgttagatgaaacagtaaaataataattcgaaacaacaaataacattgtgaccgctcataattgttgagaagaagaaagtaactaaagtaaaatcatacgaagaaagaaagtaaaaccataaaataggctttgatcaacaagccaacaactttatgccacgtaaccaaatcctatggttagaatttcatattgatcgatgatcccacatggagcccatgtcgtcccacgagaggtccctctggtttttcttttggaactgagtctaaagaaaatgacattttattatatataaaaaaaaacgtcaccgacctcctcctctacaccagctgtgtccgagagcgacggcaccataaaggagccatctcacggtggcgggaccaaacctctaattcgacttatccacgtcagacctgactcgactaaaaccacgctttgaaaccatctgccacgtgtctttcgccgttgttttttatagatccacatttgggcccccattatgatcggcggtttttttggaacctttaattaattagaaacacattagccacactaattaatttaatgttaaccaaccaccacatttaaatatatgaaatcacggcgttacatcacgcgctaaacgggatatcgtatatctcacgcgctattctcattggctgcgtatagtacacgtacacgtcacctgttttctcaaaaatttctggcgagtcaacaaccgtcgggagagaaaaaaaaagttcattttttttatttgtctattttcttctgttttttttttattagttagcttcacaaaatcttatatttatattttctaatttctgatatcagaattttttggagtttatttattttggggatagtttctctgcgattttcttgggcacttaaaaagacatttttattcacagttcgtctttaggcaaatctctccgtttcttatttttcttctcctttcccatttattttctgtgtcccttgtttggttccagagaaaccgcgagaaacaaaaaaatcagagaagaagaagagaaaacaaaaaaaaaaatctgtcttcttcccgtcgtttaacgctttcagtttcgaaagttgtatctgcatttttctcaggtaatcatttcttagcttaaagtttagtgttttataccattttagcataaagtcaccatttttacaatctctgttctttgttatgagctgggattttttagttttggttcaaagttgaagtctttttgggatgtttgttgtatggttgaatgtctgaaccaaaccagtttaagaaaaaccggattttgttttctgggtttaggaatttggtagtttgtttattatgggttggattttatgtgaagtgacaatgatttgtc

SEQ ID NO: 877 - DNA, 81293 bp, Arabidopsis thaliana
aagctttaagcacaacacatttgaaatggtggtggtgggtcaagacaatgtttcattgtctattctctgcaagtgtgttactaaacttttggtaaaaatttatgttttcttcgataccatacaaaatcttctgatgtgcctgtctttgtgcttatacatttgtggcaatttggtattcaatatttatatatctgaaatgtagttttaccacagtagtttctctccaaaatgtgtttgttttttatgcttgaaatgtagggtttggatttttgctctattctttagctttagatgtttggttggtaaaaattgtgaaataatcccaaagtaatacagagattttctatatcagtcagaaatttctatttggagaaataatcccaaacttttgttcctttgatagagaggttcaatattggctataatgcgatctctctggcattacccttgaaaattttctattacaaagtaaagtcatttcatgaataatgtgttttcttgattaccttttggtacaactgtcagcaaactaaagacaaagaaatgttacaaaccttttgtttgtttctcattggctcatagcttgaggtctatgtgtgattttggtatccaatgttttcttgttatagcttaagagaatgttttcaaacttttttcaacagatacaatcttagtaatcacacttgagtatttttcttaactggttttgtttcttggcatcttcatttcagggtctatatttctctgaggaattggattcttatagaagttaaaccgcagagcttcttctatccaatagtcctctgagaatcgtcgatatagtttgctgatatagttgttatggacatgaaatctggtcactcgtctcctgtaatgactgattctccaccaataagcaactcaagattaaccattcgtcagaatagacttccttactcatcagcagcagccacggctatctcacagaacaacaatctcttactaaccgttccaagaaagaaaactgggatccttgatgatgttaagtctaatggttggcttgatgcgatgaaatcttcttctcctcctcctacaatacttaacaaagataacttaagcaatgatgctacggatatgacttatcgcgaatggatggtcagtcccttactgtcctttttttcatctgaaaatatgtgccgttgttttgatgttgatagtcttctttttgttttgttttataatcctgttttagcagctcaagtatccatcagctcttacctcttttgagaaaatcatgagttttgcaaaaggcaaaagaatagcattgtttcttgattatgacgggacactttcgcctattgttgaggaacctgattgtgcatacatgtcaagtgctgtaagtttttaactttcctctattaaattcaattgctaaaacagatcaaatttgtgattcatcctcataatgaattatatggttcacgcctttttacatgtttagatgcgtagtgcagtgcaaaatgttgccaagtatttccctaccgcgatcattagtggaagaagccgggataaggtaatctttctacatgttttattttcttcatcaagaacattttcttgtgtgatctaatgtaataatagtacattttgcttcatctaggtgtatgagtttgttaatttgagtgaactttattacgccggaagccatggaatggacatcatgagtcccgcaggagaatctttaaaccatgaacatagccgtactgtatcagtttacgaacaggttcattttcttgctttttgtttgttttctacaatatctgtttgctacatcagattcttaaaatgtgatgtttgcaaatttcaggggaaagatgtaaatctattccagcctgctagcgagtttctcccgatgatcgataaggtattttgaaacacatcttctgctatatataacaacatcatgtatgattgttgaactcttgatatgatcttctcaggtgctttgttctcttatagagagtacaaaagatatcaaaggggtaaaagtagaagacaacaagttctgcatctctgtgcattaccgcaatgtagaagaaaaggtttggtttctcaattcagtaacatttttggttcctttataaaccaatacactttcttgaaaaagctcttctttgttacagaactggacattggttgcacagtgtgtagatgatgtcatcagaacatatccaaaactacggctaacacatggccggaaggtaaaaacgtctgaaatctttcttacgtatttcaacaaaaagaagttcaaagttttgattttgttctcttggtttgtatgttttgcttaaaaggttttagagatccgtcctgtgattgactgggacaaagggaaagctgtgacatttctacttgaatcactcggtagttaacaaaatccttctcatctatctgcttctgttctgaatcttggtttggtttggccattgactttaatacatttctcaggcctaaacaactgtgaggatgttcttccaatctatgttggggatgatcgaacagacgaagatgcatttaaggtttgttcttataaacacattgagctaaaacatttcattaagaaatagttttgacttaaagtgcaagtaatgtcaggtactacgagatggaccaaaccacggttatggtatattagtctctgctgtgcctaaagacagcaatgccttttactcgcttcgtgacccgtctgaggtaaattaagaaatcattcaactgaaaatacttgagctacgattttagatcatacgagtttgatatttttgttatgtatatatcaggtgatggagtttctgaagtcattggtgacatggaagagatcaatgggttaaagtagaagaagaagatgtagaagaaaagtggttaacgttaatatatattacaaatatgcaagttagaggtttattgttacttttcggctttatacaaaaactaccgttgagatttaacttaacggtatcggaggagagatcacatgatggcttaaaacatgccggagatactttttccgaccaatctctttatcttctacaactgtaaattcctccatctccggattaattcaagacatttttgtttaaaattttatgtgaagtaataactttttaatagaacaaaatgcaacataacgttcacattcttctcaatcaaaattgagcaaagctaaatttgcagagaggaaaaaataagatggaatattttgattgtttattgcttattgtatttgtttgctttatgttgagttggtttagtcctaatttcataaaaaaaaaaccatagaacctattgataacatattacagtttgggacaagcttaagctgcacgatactgaatccaaagaaatgtctattataaatagttgttgctagggcactagggttttgtacatcgttttggcgagcctggtatatttgatgagcctggtctattgggtggccctcttccatgtgcatgcggtgaacaacttccacctacctcagccttgatctctgtgatcaccttttgatcccaaaccccttctcctattaatgaaacaaacagcactttcaatagttagagtaaaaaacatttttctatattttagttaaatcaatccaaatcaaacaaacattgtattaaaaaccagttaacatatctagtgggagaaaaattataaggatttcagtttttttctcttttcttcatatgctaagaaattgtaatattaaactgcaaaaaggaaattaaatggtttaaactttattttctttgagttttctattatttgagagatattttgctaaagatggaatctgaaaccaaaatcgagatcaaagtaaatatggagtaacaatggacccccattcatttttaaatccaaaaactgaaccaaacttaaactgggcatatataaaaacttactggcttcgtatggtactcgagcctctgctgtgtttgatagtccagtgagcaacagaaaactcaaagtcagtaagcaaaccacaacgttatacatttttttatagtatggtcgtttttttttttccggtacgtagttttaaaaggatgagtttttgaaatgtgaattcatgaatatatgtagagaaatgaactcacgtaatcacgttgcgatgataatttcaatgatttttcttttgtaataaagataaggttacgcggatactcctttttttctttgtggaaaatgcgtaattgactcttgaaatgtatcaagtcctcttatggagaacaacgtatttgactacttcccaataccggtatcattagtggaagaatcagaattaaggtaatggtttacttgttattttcttcatattgtatataacgttttcttgtgtggtcaaatgtaataacaatccccttttttcattcatgtctatgagtttgttagattgagtgaactttattacgcttatctctattatgaatcttggttaggtttgttgactctgaaacattgtttaattcaggcctacataatgaacttgtattttttcttttagttacatttttcttgttgccgtttcctaccaaaagaactttccacaaaatgttttcaaaatggatgggttttgataaagggttttgtgcaaaacaaattcttcaactcaccaatttttgcaaagaaaccatatataattaatttgcgcttgtagctcgagcaactcttccaatttcgattgtgaatgaagcatcaagcaaactctacatgagtggtaacatagtccaaacctgacgcggataaataacattgaaaaatcaaagttcacccacctccacttgattacaatatgtaggacataaagtgtctttcgttagactttgtcaagctaagtttgctctgccactcataagctattggaaaggcatccaccataaaaatttaaggagtttttttggactccttgatgctttccaatttgcttagaaaagatttggaaattaaggtttttctacatactcacaaagtcacaattgttttaaaaaaattaatttatcattgttgactttgaaaaagtgaatgtgacgagaataaatagaacaagatgagctaggaaaacaattaagagatttaaaaagatgttaaaagtgttatattggtaaaaatcaaatcctctatcgtctccaccaatcaaccccacaaatcttcatccatcttgaaatgaacattaacaatgttgatttttatcaacggtttgcaactgcatgcagttgtggaattgccaaatagtgccatggaaaatatgtgcataaattaatttcaagccatacttggtttgaataagcatgattatattacatatgcgtttacaaatttttgaataaaatctgcaaaattcgaacccccatatcaaatcttgaatatcccaaagtataattcagtagaaaacggagatttactttgtaaatcataaagatattctgacagtacataattattatatatttaagtcggattaacgatgtttagcttcatttttcaagaattctaacatgaaaaattggatatatataggtctcagattcttacatgtgaattgtgaaatattgtgagttggagaagcgtgcttttgttcaaccgtgcgctttacgtaaaggtatgtcattggtgcatgggagcctttaattttttactgtaaaaatatctcaagtgacccgtgaatctaaagattataaagattacatatatagagaaggctcgtttgtctttaatatacataaactagcaatatttgaatattcatggcatgaccccattattgctatataaaaagagccaagtgtccaattcctgatttcagatgaagtaaaagacaaccaaatatgagtttatgctctgatctcactgagaaattagacgaggagattttagaggacttgacgtccaatgtgaagcaaatacaagacaacgtattggaggagatactcacacttaatgctaacacagagtatcttcgacgttttctccatgggagctctagtaaagagcttttcaagaagaacgtccctgtggtgacctacgaggatgtgaagccttttatcgatcgtgtcacgaatggagagccctctgatattatctctggcaaccccattaccggattccttctaaggtatatacttttcatttcctggcttttttcttcttttcaaaaattgtattagagcaactttatcattggttattatacaatcaatgtgagtgatgttagaaactctagagataatgtgctctaatggtttttcactgtagttctggaacatccggaggaaaacagaagatgtttcctcgtaacaacaagtacttggaaaacataaaattcatcttttattaccgatcgctcgttataagcaagtaatgatgataacacaacatattcttttaataaaacatttttatatttgtagattattgatgaaagtctcttttggtgtcatgataggcatatagatggtcttgaacatggaaagggaatggtatttaacttttgtacatcagagaacacaactccttctggtttgccatcatcagctgcatcgacgagcttcttcaagagtgattatttcaagaaccgaccatcgtattggcattggtcttacacaagccctgacgaagtcatattgtgttcagacaccaagcagactttgtactgtcatcttctatgcggtcttgttcaaagagacgatgttgtgaaggttggtgccgcctttgttactattttggtccgagcaataaatcttcttgagaattcttggaaggaaatttgcactaatatccgttttggtcatcttagtgagtggatcactgatattagttgtagagactccgtttcaaagattcttggagagcctaatcctgaattggctgatctcatagaaaatgaatgcaacaataaatcatgggaaggtatagttccaagactttggcctaaagccaaattcatagaatgcattgcaaccggtcaaatggctcaacacatcccaacattggagttttactctaacaagttgccatcgatttcctcgagttacgtatcttctgaaactatgtttggtattaatatgagtcctctttgcaaaccagaaaatgtatcatacacatttctgcccaacttgtcatattttgagttcctacttgttgatgccggtgacaaaaccgaaattgttgatctcgtggatgtcaagttagggtgctattacgagcccttggtcacaaatcattccggtgagtacttaggaaaaattattgatatatatacatacactcgactaatcgattaattatattgtttttgtttttgctaggcctacacagatataagatgggtgatattttactggtgactggattttataataatgcacctcaatttagatttgtgcgtagaggaaatctgactctaagtattcatttggagataactacagatgaagaccttttaaacgcggtcacagacgcaaagatggttcttgaatcatcaaatttgatgttgatggacttcacaagctatgcggatatttctactactccgggtcattatgttctttattgggagctcaaagcaaaataccgcaacgacattgttgaaatcgataagaatgttttggtagaatgttgctatgtggtggaagaatcattgaacaattcttatagagtatataggagtaaaggtggattaattggagctttggagataagattggtgcagcaaggaacttttgatgctctcatggagtttttcatcactcaaggtgcttcttcaactcaatacaagacacctatttgcatcaaatctactgaggccttggtgattttagaagaaaatgtccatgcttgtttctttactgataagtccctttctttgaacttttcgtcataatctctatattatgtaggcattgaaataaaagctcgtggtaaacaacatgaaacgagatcaaacgcatgcccttgaaactcattttttaagtgtatctcttattattattttatttttatgtaagtgtatcactgttgacacataacatttcaaatgccaatgtaaaagcaacgactaaggaagagtcttgtgcatgcaatatgaaaatgagaaatcgaaaaggttaacattatattgttggcaaaataaacgagaccttgaattatgttcattatttacgtatcatacataagcttaaaattatgttcatgagaccttgaattatgttcattatgtacgtacataagcttatgaacataattcaaggtctcattaagctcattagctgtcaacattatgtacgtacattatgttagttcttaaaataatcaaatcaaactattctaggatataaaatgaacataatttgaagaagaaacactaattaactgtctacagtctacacacatttataacgcaattagatcccaaacaaaagcataccacacacgtatctaccaaaattatcaataaaatcacatctttatagaaatggaagtttccttaaataagaatttacacatcgttaatggaatgtaatcagtagaaatagaaagaaacaataataagaaatcaatgagaatcattggcgtaattgtgtcagtatctaatgcacatccacttatatatagacacatatttttaactttattacaaattaattacaatttagacgaaccggttaattcggtaaccagtaatactaacgcgtttagggattagtatcaacagcaaaatctgtgtcactaaattaataaataaatagagaatataaattcctcattttggtttcttcttcaacctctttgtcagagaagtttcaaaaaacccacacacacactttacacactcttcatcttcttcttcttcctcttcgtcttcttcttcatcatcgttttcgatttgttgctccgataatgtcgttcctataacccgaagatcatcaacgaagaaagcgaaaaaaacctcaaaaaatcactgagattattacaaatggcggctactgattttttcttcgctttcgtcttctctttcgctcttatcttcggcttctctttcgctggtgatccttacgtctcttacgatttcaccctctcctacatcactgcttctcctctcggtgttcctcaacaggtttcgtttcgcttccatttttttccctcttaaaaccctattttttccttcgaaattgaggttttgaaacgttaatctagtgattttgtctccttgattttgctaataacgtagttgttgctctagatctaacattacgattaactcgtcggaggtggtttcaaagtttgagcttatcagattggattttgtttcgtgtgtaggttatagcagtcaatgggaaatttccaggtcctgtgattaacgctacgacaaactacaatgttcatgttaacgtactcaatcatttggatgagcctcttttacttacttggtgatgatccatctcttaacattctcataatcacttgtggctgcttcttaggatttgttgttgtgattcctgacattgtgtttatttggataggcctggtgttcagatgaggcgtaactcgtggcaagacggtgttcttggaacaaactgtccaattccaccgaattggaacttcacttatgattttcagttgaaagatcagattggaagttatttctactctccttcacttaactttcagagagcctctggtggttttggtgcactcataatcaataacagagaccttgttcctattccgttcactgagcctgatggtgaaatcatctttattattggtgattggtatactcagaaccatacagtaagtgcagttttggtgtctagatggtgtttagtgatgacttttggttctgagtgttatgtttttatatttgtgaaactctgttttctttcaggctttaaggaggatacttgactctggtaaagaacttgggatgcccgatggagtactcatcaatgggaaaggtcctttcaagtacaatagcagtgtacctgatggaattgaacatgaaaccgttaatgttgatccaggtaacatttttagagttgtattttaactttgctttcattctgtttccatttgcatttggttgtggaattgtgtgcattggatctccagtttcagttttttttgttgctgtcattgctttgcaaatcaaagttggctttgatatttcttccctcttacttcattctgagttacattttacagggaaaacatacaggatccgtgttcacaatgttggtatctcgacaagcttgaacttcaggattcagaaccacaaattgctcttgattgagactgagggtcgctacacctcccaaatgaacttcaccgattttgatgttcatgtgggacagtcttattctttcctggtaaccatggaccaaaacgccacaagtgactactacattgtggcgagtgctagatttgttaatgaaacagtgtggcaaagagtcacaggtgttggcattctccattattccaattccaaaggacctgcttctggtcctttgccagtttcagcaactgatgttaatcacccttggtctgcaatgaaccaaccgagagccataaagtatgtctagaaaactgttcaagcaaatgaatgtttcacataaacctgtagccatgtaaatgtgatcctgattcttttcatatgcaggcaaaacacatctgcaagtggagctcgtccaaatccgcagggatcatttcactacggacagatcaacattacaagaacatacatcttgaggagtttgcctccaacaaaaatcaatgggaaacttcgtgctacacttaatggaatttcatttgtcaatccaagcacccccatgaggcttgcggatgaccataaagtgaaaggagattatatgttagattttccagacagaccacttgatgaaaaacttccacgtttgtccagctctatcatcaacgcaacatacaagggctttatacaagttatcttccagaacaatgacaccaaaatccagagcttccatattgatggatatgcattttacgtggttgcgtaagtaaatcatgccactcttgggtacatttattacattttcgatcagtttaactggtctaacgaggattttcaaattttggtattccaggatggactttggtatatggtcagaagacagaaacagttcttataacaactgggatgcagtagcacgaagcacggtggaggtaaactctcatttgcaatcggtctctgtacaccatttgaagtgataatattggtcagcaggtttactttattgggtacttttttgttttaacgtttgcttcaggtctatccaggagcatggactgctgtacttatttctctcgataatgttggagtttggaatatccgggttgagaatcttgacagatggtatcttggccaagaaacatacatgcgaattataaaccctgaggaaaacggaagtacggaaatggatccgcctgaaaatgttatgtattgtggtgctcttcaggccatgcaaaagtaaggatcagaaactttactctctgcttctctaatttaacctttatgtaaaacaaactaagaaactcttatttgctgttttcctccagggaacaacatcacagctcggccacaaaatcaatgacaaatggacagttgatactaattttcagcatgatgatggttttgctctcctcgttttcgtccttttgctgagtctgttccatcatttacgaatctactctggtttggtattctgatctcccattagggctgtagatggagaatgtataactacaaacagcagttgggttcgttctgtttctctcatatttcattgattgttaggtactcatatcttctatcctcatgattctaaacaacgttagttcgtgagggtttgtgtttagagctttgttcttcgtagttctaggtcatttggagttcaaaactttggcaacgactgtaactaaagttctcatttgtgggtcttctacattaatttctactattatcctcgtttctggatattcaatatgcaatgctacttctgtttgggacaattattaggacatgtaacattcgaaaattcgtttcgatcatgtttttgcagtggtactgaaatctcgttcttccatctatagctaaaacttcagtttcataataggcataatgagttatatattcaaaagtataaaatttatatcattgcaacttaaacacgaaaaaccaaagacggtctttagagtccagaagtgaagggtatgccggtgcgtgggagccatgctgtaccagcgataaactttccaacagtgaaagcagatgcatcggaagctctacccaacacatgaaaccctttccaactgacacgccacctcgtggatgaagctggtccagtattcttatattctgcatagaagagagtgtccagaccaaacaccgaaccttcaatccacggagaccacccgactggactcacaacattatccaaatacgtctgaagaaccacggttcgtgagaacttcatccaaggccggcccatgtacgtcttaacggtaccgaccactggttttagatcaggagccggtaggattcttgagttatggatagagatccctgtgttctgaaacggatcagcacgaccttgtgcggtaattacattggcttgacctttgagtggccggcgagggaggatgagacagttttggaaaacagcagccgcgttaccgaatatgaaatcgacggttccatagatgtaacactcacggtaaaactggcgttgagaatggaccatcagtgtatcttggtatccttcgattgagcatttgtagaagattgagaggtcagacgatgaacgaagtgccacggcctggcccttggctggaccagctgtgttcctaaacgttatgcctttggcaatgaagtgaagtccctcgatacctggaccacatgcaatttagccaattgtttcataatgagagaaaatgaaatatggtaacgcttacacattttgcggggaaaaaaaacaaaaaaaaacaacggttacgtttaaatcttttttttaaaagtagtggtaattgattacgatcccaatgtatgatttaacttggacgtctccaccatgtatgttatctattggaaaactcaaatcgtacggaatattcgaatacttttcattaatgacatagaaacttgttagatccaatctactaactagaaattaataaaaaaaaaatgaaatgaataaattatttaccggcagtagcggaattgtacgtggtgtaacctccttggacacttcgaccgccggtgataatggtggatctcattccatctccgaccaacattatgtcatcattatttagacgtacgttaatgttttcttgatatatacctctttttacgtatataacgaacctccctgacgtcacctttctccgtcccgccacgtcaatagccgcttgtaccgtgttgaaatgtcctgatccgtccttggccaccacgaggttggctcgaacggcacgcaggagtctcttatctttacgggaaagccacgtcggaaagcccttttgattagcagtggtgttgcctttgtttccagcggtcaagagggctccgttgacggctaagcagttgctaatgaggtgggagattttggtgtttgaaacgatgggtgtgatgaagtctgtgacgtttaaatcggatgagccacgtcggcaggtctcggtgtttgtaagcgcggtgctcagccacgtttgagcgtcgaagtcagtgcaacttttcgcggcaccggctttaggagacacgccatgcaatgtccggtttaactgcatgatcgtgtctccatagaggtcaatgcaatccgccaaaactgcttgtttcttgctatccgtgcagttcttgccggaattagtcaactcggcacgggcggatatggcccgatccatggctgcttccaccagcattactcggaactcggataattgtgtcggctgttgaaatccgttgtggttcttgaagtagcatttgcatggatcagggtatggagttttgtcgcaccaatcggtggaattgcggtcggctacggtggtgagaggatggacgcagagtagtactagtaatattaaatgtagaaatagaatagagagtttttgcatcatcatattcatgttgcttcttttgttaacttgatgttgttttggtttgagaaggtggagttgaatgtaactcaaagtacaatgctagagactagagagtgggaacatgatcttcaatctatatcttaaatctaaaaatatatggtgtggtggtattgacatttaaagcaacacaagcaaacaaaatttatattgtgaggttatgagtgagatctacctttggtagctcgaatgctgctgttttcttattgcgtgaacgattcctatcacctttttctactaaagattttcttttagggagattttcaggaggaatactaacaaaaagttcgaccattttttatttattttagctattctttaaacacaaatttataaaataagaattcatattcgttagtagtactggtaataaaagcaacaagaactagttttcaaagcaattacttcactatatactaatgtgagaaatattccacattaaaagtaggaaaatattgaattagaaattcatgaaatttaatatgatatcaaaatctaattcattggtctaattagctacgatttatcggttcaagatagactaataagactcatcaatcgagatactatatatgttatgtttcacattagaagttcaaaagaatctaaaatagaatataaattttaacatattgccatctgtttctggtttaaattaaaaaaaatatatatatcatcggaaaacttggttttttttaaaaaacctattgtaacactaaacgaaaatactagttcttgaacaattattttcctagaagaacgctgtgtacgagagatcttgattcttaattaaacactgaaaaataaaactaattaaaacaatccgacaacaattaaatatcgtcacttgaaggtattaaatatgattattaacatcctatctagaatcctagaaataaacaaacgcttctatacatcatttttcttctctcctgctgtgaatccttcacttcacatgctatttatatcgtcaaccaataacataattaacaattacattcaaatttacattaattaatgcaaaacctgtgaacatttttctttgtttaattaactatcagttgagaatgtgtgataccattcacatcttaaccggagttgaaactggtttggggagtaatgcttatctattgaaaacataaacttgagtggcatgttagccttctctaatttaattgactgtgaacattcaacttgtcgagaaagatggcatgttagtcttcttctctaattaatactcgcaaataatataaaagtgacccatgtgattccttgagtgtcgacattttggattcgtgagaactaaaagatgcacttgtgtgaattgtgttttcagcaaataaaagagcagttgaaaatcctttgagtgtccatgcacacactccaatcactgtaaaaacaaatataagaaacgcacacacaacttgagatttggctacgtatctacgctcttacaatatgatcttgcttaattatgattatttgatacgaagacatcttttaggtcgacactaaccaattttcaacatatattccacgaaatacatacgtccctaacttagacccaaagactagaaaccttattttgttcctctagctaggaaccagactcttccaccgcatggattcatgttccatcgatcagactcttgatcactaatatagacggaaactcaactcttgttttgtttgctcctaatatttcggctaactcgagctaagacaagacacaccttttcatttgtattcattttcacattaaaaattgatgtctcttttatttttctaatttcattaggataaaatttcatataaaccgtttcttttactaccccatttttccaaggttcatgtaaattttcgatcggagatgggatggtcaacatgagttgacttatataggtgattgaagtagacggttatggtcttatatatggaagtgtaaattactacttaagattcgtatacacatgctaaaatttggtttctgcaggatcaaaagagactatctccaaatcttatcgaaaatatttccctcactcttgacacatgcaaatacacttatataatttttatgagaattgatcttagccacgttcacgtcaaactatgctataactttttttttcacgcctctcctcttttagtcaaatgagagtgaaataggaatttttttaattattattatttatttatttttgctacgtcaataggaaatgatttgtaaaaatgaattatatgttataaactttgacatcgttttagttaaagcatggaaaatcaaagatggccttagagttctgaagtgaagggtatgccagagcctgggagccacgcagtaccagcgatgaattttccaacagagaaagcagatgcatcggaagctttactcaacacatgaaaccctttccaacggacacgccacctcgtggatgaagccggtccgatattcttatattccgcatagaacagcgtgtcgagaccatacgtcgaacctttagtccacggagaccacccgacaggactcacaacactatcgatgtacgtcttaagaaccacggtgcgggagtacatcatccagggtcgacccatatatgtcttaacactacggaccaccggttttaagtcaggagcgggtatgattattgagttatgaatagagatccctgtgttctgaaatagatcagtacgaccttgtgcggttattacattggcttgacctttgagtggcaggcgaggcaggatgatacagttttggaaaacaacggccgcgtttccgaagatgaaatcgacagttccatagatgtagcactcgcgataaaactggcgttgtgaatggaccatcaatgtgtcttggtatccttcgatggagcatctatagaagattgagaggtccgaggatgaccgtagtgccactgcctggccttttgccggacctgccgtgttctggaacgctatgccttttgctatgaagtgaagtccctctatacctatatcacacgcaatttagccaaccgttacatcgtgaggtaaaaatgaaataaatttcaaatggtaacttttacgtttatttagatatagtcataataatgctgtaaaaaatgatagtgataataattggtgaagatcccaatgaatgatttaattaacttatacgtctccaccatgaatcttatcgattaatcggaaaactcaatttcgtacggaaatttaaaatatcttactattaatgagaaaaaataaattaaaatcaaataaaatgatttcattaatttaccggcagtggcagaactgtacgtggtgtaacctcctttaacacttcgaccaccggtgataatggtatatctcattccatctccgaccaacattatgttatcattatttagacgtacgttaaggttttcttgatatatccctctttttacgtatataacgaacctccctgacgtcacctttctccgtcccgccacgtcaatagccgcttgcaccgtcttgaaatgtcccgatccgtctttggccactacaagattcgcacgcactgattgcaattgcaaaagtctcctctctttacgggaaacccacgttggaaaacccttggaatcaccggtggtgctgtcattttttccggcggtcaaaagggctccgttgacggctaagcagttgctgatgaggtgagagatttttgtgtttgaaacaataggtgtagtgaaatctgagacgttgagatcggaggagccgcgtcggcaagtctcagtgtttgtaagcgcggtgcttagccacgtttgagcgtcgaagtcagtacaccttctcccggtttttgaagacacgccctgcagcgttctgtttagctgcatgacagtgtctccatagaggttaatgcaatccgccaaaactgcttgtttcttgaaatctgtgcagttcttgcttgaattggtcaatttgtcccaagcggatacggcccgatccatggctgcttccacgagaagtactcggaactcggatatttgtgttggcagtcgaaaaccgctgtgttttatgaagtagcgtttgcatggatatgggtatggagttttgtcgcaccacccgtcaatgttggtagaattgccgtcggctacggtggtaagaggacggaggcagagtagtaatattaatagtaaatgtagagatagaaaagagatattttgcaccatcatgatattcatgttgcttcttttgctaactttttttgtgtgtggaatttgaatttagttcatagtaaaatgttaagagactagagagtaagaacatgactctaatctaataacttaaaactatgtttatatattgtggtaatatcaacattaaagcaaataaaatttaactaataaatatatatatatatatatatatatatatatatatatatatatattgtgaggtcatgagtgaggtagccttagctctcgatagctctttttcttattgcgtgaacgattcgactttctttttttaattacaaagatattttaccagggggattttgaggaggttacttgtaccattactgttaacaaacgtttcgagattgtttacttatagtaattttggcaagttaaaattcctcgatgaaagtccccggttcaaatctcgtatgttataatattttggtgacattaaaagtaacatgatccgacaacaattaaatatcgtcacttgaagttattaaatatgactattacattgaatatagaatccaagaagttaaaagtcataagcaaacgctttgtttgcttataccatttctttttcctctcatggcacttctgctgtgaatccttcacttcacgtgcctgctaatatcgtcaacaaacataaatgcattcaaatcgaaacaaaagcaaaacgtgctaacatttttatttgtctacattatcatgatcaccaagaccctagtttagtgtcaactacttaaatgacttgtaattagtacaaacaactttctttgttttttgccttataccacacaaacgggtttttagtctataaaatagcctcggattgaattggattgcgtcagtaacaaaaaattaatattatgatgctgtaaactcttgttatttgacacaatataaatttagtaatttcagattataacttatatactatatgcattttgagtaattatataattttaatttgttatgaacaatattcaacttgtcgagaaagatggcatgttcgtcttctctaattaatacgtaaaaaaatgacccaagtgatccttcgagtgtccatgcacacactctcacgcaatcaccacatttctcgtacatctttcatcatgttttcttgcttattttatgatggaaatctcatactgtatttctgatctaagactattggaaacaactttttttttttttttgactattattggaaacaactgttttgatgacgagaatgatctttattcatcgaagagatagtaatatatataaattctaacataaaaaaaatcaatttattcggttagattatatatcatgttttacatatgttatacttgatattaaaaaaaaaaaaataatgaaaacaaaaatttgaatgataaaaaaaaaagagaatgaattaagtatagtttttaacaaaaagaaaaagtaagaataagtatagttattcaaaaaaatgttaggccgtaatctttagctaaaggatttagctcggtttagtttgggtttggttcggtttagttcggttaaatgctaaatcctatcgaaaaataaaaacaacaaaaatctaataaactttgttgactataccctaacaccctactaacacctccctctttcaatctccgatcaaatacaaacgcatacttccaatttcgccggcgaagatgcagcagaggaagccgacggcgggtagacccagtggtaccgatggatccgatttctcataccgcatggtcgttgactctcgtgagtttccaaaactccaaatctcctctgtcccagatcctttttctctcaatttcttcttgatccatgtgctttgctttgttttaggttacacgaaggtcactaaagaaaaagctcgtctccgtcctttgatctttgttcaggtaattgaatctctttgattttggattgattggtctataattcgattttgtgatgcatttcaaaatgttacatcctttgagcactgaattaatcaattcatgtttagtatatgatcaggttctcataattgcaatatcacattcgttgctttgttctaattgaaattgtagtgttattgaagttgtgtagcattagtttaaagagtttgatattgttctgtgagatatgtatctctttttagctaaactcttacagggttttacttgcaggctgcgatttatgtaatcggattatcgtgtgcgtttctaacaacaactaaaaaggatgagaagaacacccttgctattgcagctgctgttgctggcttagtgtgttcattgataggagaattaggttaactctctcttctttgttgttttgctggttacgcgtaatgaaaaagtatccttttgttttggtgtctttatatatgtttgttggaaaaaggttgcagacgtagcagagtaaaccttttgaggctctacacggctgcatcaaccattgttatggttctttctgtgttttgtgctgttaggagcagattaaccatggaggtaaaccgcctaacttcaacaaaccttactctcatcattagtcctttagctgacaagcttttagtagttagaaacactagtaaaggatcaggtaatggtttaaagcagaaaaggattacacttttgtagtcgtgaaaaaacagttggttatggtagtcatggtattacagaatatggaaattgagcttgacgttgatacttctcctgactctaaataaatgttgtaggaacgcaatagctctggaacaaccgcgaagcttgagctcgcaggtttcatttgtgctcaattaggtaaaacttcctgaagattcttcttgtttttttttttgatgtggtctatacttacttgcaacttgagttgcacattccgggaatatggatcttatcggttttttttgttgaatgcaggagcggtggtgcagatattagcgatcatcgttacagggtcccttgtcaataatatgtctccacctacgaaagcagcatagaggaacataaaatttgggcactgtcgtgtgtgcttctcttaaatgaagaacttaggaatttgtaatttttgaaccatttttgttctctccaccaagtgattagtgttatacaacgttgtttacttcagctttttaatcagtcattcaaacacattattcattgcgcgatgcaccaagtaagtcctttcaaatagcacatcggaatatgattcgcttagagaacatgtaggtccgaaatccaaatggtgacatgatgcggtaaaaaaattcttagccgtaaagaaatggtagagatatttgcatattgagaaacgatgagaacaaaatgtgtgtatagtttaccgtcttcactcttactttaccaactttgtgattcgtacgcagcctttaccgttgtgggttaccaatcataacaaccgttaagattgtaaacgtggtagacataacaaaagtgaaatttggtcatgatgtcgtttacaagagatgaacgattctcgggtcaaaccatttcaatctttcaatccaaatgcaacagaagaaactagaaatgttacaagctatattcatataagtataatagtttatcaggtataaggttgatgaaaattttggttaagtttcgcggtgttaatgacttgtgtttgccaaaagtgaaagcttatttggggtttgatagaaatattgaggttttacaaggttaattacaatttatttatttttaattgaaaatggtgtgcaaatcgtagatgcaaaagtcaaacgtaaacaaagggataaccacttatcagaaaataacgagttctcatgcttaagcttaacgattcaattcacatagaaaaataatataattcgtcggccggtacctacatgaagcaatatatataaaattaggcaaatactcgacgacgacaaatgttaataaaaaaagaggtgttatatgagactcacggtcatgttgttttccagccaagaacaccaagtggcccatgttaatgtcctcttcccaattctcacatatccattttattcttttattgatattaccgtgtacgtttatttcaattgttccaaatattagtattatcgttttctatgataaccagggttcctatgtgtggaagccgtacttatcacatgttctttgcttactatgtgaatattattgcgacggtctattattgtatcatatgatacacagtcagctagaaagctgaaatctccttgttactatttagttgaactcaagttcgaatctttgtaatagcattatttgtatataatagtattactgaaatgtcaatgaaaacttagccataatgtaatagtaaacgcatccataataagttacaaatgattaaagatgagtcacaataaaagatgcaagtagatagtattttgtaagtaatagataaaatggattcgcattcactaagaacattagaaaacactctaggtcatgttcattggacccgcgtcacccgccacaaatagttaggagtttgtatatatttgatccttttttttacttagtattattgttttttgaagttcgtatcgcatagaaatacttccaaaccgttttaaaacataactaagtgtagattctcatcataatcatacaaattatgtcttagttaagtttcaaaaaattttggacttaaaactaattgactataagtctataaatagattggtccatttcttttaaattttatcttttaagttccaaacaaatcagaaaaaggtgcatatatatatagagtatttgtttgcatattcaacttttactagattttgtcatacgaaaaagatcgatattgaaattcagagtccgattcaattgatcaaagagactttatatgaaaacatggcttatatagcttcaaacaataaattatttgtaaaatgccaacctatacaaaaatcatgtatatgtaatattgtaatgcatgatagaccacttagcaaataattaattatttgggaaattagaagatcgataaggaacgagttattcctccaaaagaggagatctaatccatgttcatcacatcacgtgtcacgtacctcacatttgcttaggcttaaatagcggaataaacttgtaataatgttttagtcttgttgaaggcatttaaagatttattttctcttttcacaattcacactatacattatttcggaacttatattatctcctttcacacactaatgaagtgcctcgtcgaacaaatgaagcaatcacgaatgatgatggttgctaaaaatacatgttcgttaacgcatggttgttttttaaacatgtacaaccgaatcattcgaatatatatagccggattgattattttatatgcataagtatataattaagttatggtcaattttaatcaacaacaaaatcttgtaaagttaacacatcaaattatttctaataaaaaaggacaacgccggatatacaaatagtttgagatggttatgatataaacctgactgaattagtttatactagcaaattcaattggggaaaatcatcatgtattatataattaacaattagatgaaaaccagaggagttaatgagatcattaccctagtagtagtagattcaaaatggtgaagtcaaatagtattatcaatgaatgcggataattataataatcggaccttatattagtggccttgttgagtacacactaataaaccataacaaaagaagaaaaacataatcacaacggaatcatctttactgttgtaccacagaaaaccattcatattaggaatatctaattccaacagttgagacttgagagttgaccacgatatattatacaatttctcttaaccatttttgaaaaaacaagttacgtacacatacacataatacgatctttctgttgtattaagaaaattgatacatcatacatctagatcgatataattattttttattgaacaaagctaagatcgatacaattataaaccatatacttacgttaaaaaaagaagaagagatctatctattcagttccttcactcaatttaaaaacaaatgtgcatgtgtattgaatatatataatacacacaacaaacaacatagtttcacaattcgtccctgcaaaatttgttcacaccctaaaatattggaagctgccatcatcaacatgtcgcaagtcctctactctctaacgatcgtctttgttttcttcgcttcgacaaacatccagaaaacatcaggcagtgcatcatcctactcccaaaaccacaaaacgttcgtgaaaacggcttgcaattcgacaacataccccgacaaatgctacaagtccttatcctcctactcatcgaatatcaaatccgacccgatcaaactatgcaccaccgcgcttaacctcaacgtgaaatccgcaaaggaagcaacgtccgttgtctctaagcttctcaaaatgtctcagaaatcaaccgccggacgaaagggtaaaatgttaccagaggctcttatactcaaggactgtctcgaggagatgaaggacacaattattgagctcaagcaagcgatcacggagatgaagaatctacaagatggtggctctatggctgagcatataacgaacgttaggacgtgggtgagctcggcgttgaccgacgaagggacttgtacggacgggttcgaggaggtgaaagtgaataaagaaacaaagaagaaggtaaataaggttgttgaggaacttgcaacgacgactagtaatactttggcgcttattacgaatctacgttactagcttacgaataataaaaataaaagtgaagaaagttattattgatgaattattactactccttgcatgtgcatgcgataaatttcttgtgtctattatatattattgtatcatgttaatgttagagctaatttaagttaagccaacttgtatgatatatatcacatatatgtttattatgctaaagtaaaatggtgaaagcattttcaaagaaattgtattcaaaaacgaatatatacttacaaacagaaaatgatttcaatagtaggaacataggcaaccatgtgatttctcctgttcttattccgcaattgttactagaatagagttgtctaatttggtatctgaaccatttatgcagaaggctcttgtttgcttgttatatacatacatgataatgtgtagatgaacaaatgtagtttctaaaacaaatcctattatagaagagaggacacaacttcttttgaattggaacgtgtcattgttttatacttcaatgctgggtttctccatattgatacacttgttaagccatccatctcgcagcttcataaaaaagaatctctggtcgaaccttcttttctccacagaacctgaccacactcttccagttaccaatatcctatggcatcacaacacatagatcaacaatgtcaggcctatctaaagtcacaattcaactcaaggaaggcaaaaaatcaactgttttatcttacctctcctactaaagactcacgcttgagattgacccatcggttcttttcataagctatgcaaatgtgttcttcttctacttcactgcaaccaacctacatcacattcccatatatcccgacacattgtaaaagagaaatacagaagagcaataggacaatcatttgtgagactttttctaccattgacacaagccggtagttagtgtttggttctaagccttcgtacagcctgctgatatctatctcccactccaaagcctttgttgtttcagatatttctttttcagtttcactcttctcccattctaacactaatgttgcaaaaccacaaaacaccaactctgctttataaatgaaatgagtatatataagatcacaatcatgtttctcaaaccttaccgattgtgaagattggcgggcatctacttataatatgatgaacaatatttgtccttccacatcctcctgatctagtgtcacataacattttatattccatgcgggtcaccttaaggatatccacaaacttcatatttccgagagcacactgcatatatataaacacataacaactttataaggggaagcactagtttctgtaggaaagataaggaggaaaataaatgaaacataccttcaggtctctaattgaatctgcagccacaacaatgccatgagaacgttgctctggataatttggccgacttctgcattttatacaactcattctttcattttcctccaaggtgaaaaggcgagttaccaaactctctctttctcgatatttccagcaatgccaaaactcaaagatggctacaactacctcagcagcatcagcatcactcaactgaatagagtaaagatagagtgtcattaaaatagcagattattgacagaaagaaaaagaaaaacaccatgcctagaaggttaccttctccacacaaaccatggaaaacatttcttcaacggaaacaagtaagtcgcttaagaggcaactgtagactccctcgatttttatgtcctctgacacaaaagcagtaaataaagtttgtagcgcagaaggaactggttcttccaagtggtcttgaaacggttgcatattgtgcatcaaatactctttgagaatcttaatgttcaggagggcctgcaataccacatgtttctgtgaacttatcaacgagaataagaaagtaaagagatctagaatgagctgaatcagaagacgacaattaaaatacttaatcatatatttgttggtaactacttcaccttcagcgtcatgtcaagagctgaattgtatctggctgaagcttctccagatgctgactccatatgttctgacagtgaatcttctctaggcatgttttgcatatcttgaagatagcgaatgaataatattaagaattatacatctctaaacaaaattatttgaattattcgtcaatagagaaaattttaaacaaccagggtcaaatttagtagcttcctcttgattgtcagtgttggatgaaatttccaatcgacccctttcacctgcacgagtatcttctggttccataaaatcttctttcacaatttttagtgatggagatgtaactccaggttcaagatcgacagaaggttcactggacatgtaagaacacgttttgctcagagaaaacccaaaaatatttatcaacatgcgaaaaacactcttgaggtacttactgttcaacagtcttatcaaggggagtagacaagctcgttgaattcctctgttacgccatgaagaccattcattcttacaaccgattatccgaaaaagttagagaagcaaatagagaatttagaagttgaaagaccttattgttttttttcttctttgaccgtgacttcttctcctcctcgagtaaaagataagctgctgctatatctgacttggcgttggattccatattcacaatttcattctagataataagatacatactaacatataagaaacaattcaaaggccaaatcagatggtaaacaaaagctctctatatataaccgaagtttcagaccaaccagtaagaaaggtttcagcagtcgaaggatataagtgcggttgtcaaaagcagaaagcctggtgaggttggttagcaaagtaatccttgaattatcaatcagcaaaatcttagaatcgattagtagaacctgcgagtcatatagatatttttagatgggctattctatgttattatgttgtaatgaatattaacatcaaacaaaccttgtgggtgaccactgatttcaggtggtgtatggacttcaacgctatatcatcgccgagacttttacgctgacgtataagattcatgcaatcttctgaatcgaggaaatcaaatgtcggatgcgatgctccttggagaacatctcgtactgcccacaagaaaaaatttgcagtgatggaattttcggagactctctcttcacagctatcgcatagaagagatgcatatttattccactgatcttccagaagattctttctcctttcatcttcactcatacacaagttctcaacgacagtaagagctgcatcataatctaagaccagatatttctttgcatatttttttcccaaaaacgaaaatgtgaactgaacagctttcagaacagccacccagataccaaaattgtgttccctgataggtctgggaaagatcgtatctactgaattgtagtcagttaaccaggatatgatatcatctccctgagctggtgccttggcgtagtgagcattgggatcaaaaacattgattgtcccttcatcatcgaatggaacatctttgcattttagcagtcttttatccagaagcagaaatgaaaactgagggtcaaagtcgatcttttctttgactcgagtatgatccaagaaactgttcactgctctgcaaaccagatctgtaccatcattccttttacacttgatggtttttagaaagtctaggatttgattgagttcatgactttcaagaaaacagatactctgaggtgttcccactaggtgagaatcaataagactctgttcggaaacatcaagttttgcaagatgttgaaccggaaaacgcatcagccactctcgaatgctagaaggaagaattttatggtcacaaagtgacacaaggagcaatttgatttccttgagtaacttactgcgatcttcatctgcagctaaaggccactcttcggaccatccattcttaggtgcaaacgctttcacatctgcgagccgattcttgatcatttcaacggcagctactgtatccactggttcccaagctccaaccgatatcttacgagcccagtcctttcctatcctctggaccatatcctttttcgaagcatttttaaaatctgcatcatgttgttgttcaaaatgattcttacattcttcagcactagaaagcttcttcaaacatttacttctacacatccaaaacgtccattttctatctgccttagcagaagtgagaactttctcaaaaacatctcgtccctctctgttatgtactccctcgacaaaacttttaagctttgcaatgcttactttcataaagtctcttttgatcttaatatccaatcccatccaataagacctcaattcttgaatctcgtcgtcaacaaggtctgaacttttctttggctcccaaactttagactcagagcttaaaggggaagtcttggctccagcgatcatgcgctctgcatctctgattaaagtattgaattctttgttcatatctttttttagctcttgcaacattgatcgagcaacaggactcgtgttttctgggtaagtaactgataaatcttgttttgatttcttcacgcattgcttgtaatacgatactgacccaagctgtttggccaaattgtagaatcccattgcacaaagtcgtgataatatcacatcttgagaatagcattgtacagaagccaccaagtatgcgaaacccacgtctggattctctgttatgtcctctagtttcacgaacattgtaccttgtttgatatgaagaaaccatgagtccttgtctttcttgtggtcaaaaatcaaatcttcaagtatctccaaggccttgcagtgatttcctttaacgaattcttctctagatttcgtgatgagttttatgacctcaacatcttccaggaaagatggcttcatcatagtaacgactctcaagattcttgcgttttcttgctctccaaggtttcctttgcttcggagagaaatttgtcagaatgtagaaaacaacagcaacagtgagctggcttttctcacgtgagagccacgtgaaaagggttgatacaaaaaaaaaaccaattatgagcactgaggaattctgtcgaaccccttgtaagcaatatccgtttgggattttcacggagtagcaaaccaaaacaaatcccaaaaattgtgtgaatcttcgattttgggttaagacccaaatgtagaacgatcttcatgttggtgttacacaaaattcgtggaaatgtttggacttgaaaatcaacaatctcaatcttcttcgtcggatctctaataagtgttttgagttttactgttaaagaagacacattagctattctactgttattaagttctcgtttcaaacgccatgccgtttgttatatttaaaaacggcagcgcatcgctctatcccctactaaaccctgagcatttttaagttaaactcagaggtcctctgtcacaagccgcaagaagaagcagagcaatgtggaagctgacgcggcgactgcagccgcatatcaattcgacccgatggttagtccgaaatttccggaatggaggagctggagacgccaccggtctctatggcttcgatcatctaaaaacagctaaagggtttcagagattcgttgctgatgccattgaaaggtatgatttttatagaattagtctatgtgtgctttgtcaaagtagccattgaagttgatgggttggtagaactgttattagcttagtcattttcatgaattatgatgtggtttttagacttagtgctactgtgttgtgtagtgttgtgatgtaatttggttaattgaagaaatgattttggaaccattttcttaggtctggtgagttggtgagctacatatcaggaatgccttcgtctccagagattattaaagccatggatgagatttcagacactgtaagttcttgctgcatttatgttactataactctattagtgttcttgttatactagctcttattcgtgcttgtagtgatgtttttctgaatgcgaatttttgtaggtttgttgtgttgttgactctgctgaactctgtagacaaactcatcctgacaggtctcttttctttttctagttctgagctttcaatacttggtttattatgttctgttgtaattttatttaaatttgtgtactttgctctataaatatgatagggaatttgttgaggaagcgaataaagcagcaattgaaatgaatgattatctacatgtgaggtgaccaacaatttgctcagctttgatttttctctcttatcatggaatgtctataatgacgacttgtatgggaattccttcatctttgaatttttttttttattgtttagacatgaatatgcagctgtacgaaaagatctgtaaacatagcatcttataaaatacctatctagactctcattcgtatcagtatcgtagacagagttgagtctatgtttattcttggcaatttcttaactttttctgggttgtttatgttcagcatcttaacacgaaccatactttgtatgctgcggtgaaaaaagcagagcaagattctaacttgcttaccaaagaagcaagtaggaccgcacatcaccttcgaatggactttgaacggggtggcattcatctagaccctggtttgttatttaccattgttatttctgtacccttttgacgaggctgatgtatcttaagttgaatgatttttttattagtttcttttattctttgcagagaagctagataaagtgaataacttaacaaccaacatatttcagttatgcagggagtgagtacccatgaatacacacgattgattctattaaaagtctgatattataacggggctttgtgttgtgagtgctaacttccttatgatctatattcaggttcagcgaaaatattgctgatgatccaggacatgttgatatatttccaggatcacgcatccctcgacatctgcatcatcttctcaaccctacctaccgatccacttcagggggctcaagagggtctacaagatcagcgcataagtcgaaacagaaagggtttcgaataaatactgatccacgaaccgtttcttccattttgcaatggacatcagacgaagaggtgcctacttgacctatttttctatttcctttttctgacacccgaacctcagggatagaggtgggagaataaacagtttttcattggtaacttacaagcgttttataaacaagtaccctagagtggtggtgtttcaaaaacagggaaatgtgctttgaagttgcatagattgtacacctaaatccattttctgctgactaatgtaattgaatatctctattttcaggttagaaaaatggtatacatccaagggaactctgttcctcatgcaaatcacggagttcttgagaagcttattgctgcacgccatgagctttcccaggtttgtacatattcatttatgatactctgtagtatattgcctgtcttaaaagatttctcttacttattgtaatagctttctattgttgctctcagatgatggggtgtaattcttatgctgacattatggtcgagccaaacctagcaaaatccccaaaggttgtgacatccttcctacaagaactgagcaagacagtcaaaccgaaggcggacgaagtaagctgaccttcacactattttcataaaagctgaactttctatgatgttctctttgtggctgtgtttgaaaattaaggctctaataaccagtttccatctctgtaggaattcatagccattagagactttaaaagagagaaatgtggtaatccatctgcagagttagagccatgggatgaaacttactacacttcaatgatgaaatcctccatcaatgatgtggacactgctgtaagttgcttttgttatttatttttctattgttgtgctgcaaaagcacttcggcttctctatcttcattttgtatacttatgggagctttttggttctttttacttctgttgctaagacttctcttgtcatgctctgttggaatattcttgtacaggttgtagcatcatattttcctctgccacagtgtattgaaggcctaaaagtgcttgttgaatcattatttggtgcaacatttcatactattcctctcgcgccaggtgaatcttggcacccaaatgtggttaaactgtctcttcatcacccggacgaggtatgttgttcacaaaactaagataatccttgcataagtcttgtagatataaacacaataatagttcattcctagatggccaattttttcgtagcatctttgttcccttgttctcacaaatcatgcgactgtctcttgcagggtgatctcgggtatctttaccttgacttatactcaagaaaaggcaagtaccctgggtgtgctagctttgcaatcagaggaggacgcaagatttctgagacagaataccaacttcctgtatgctggttcaaatttcatttattttccttcatatatgaaaactgcctagttggattaaaaaaatatcattttcttacactccgcctgttgatctaatcttattgtaggttatagctcttgtttgcaatttttcgcgagcttgtgattcgtcaattgtgaagcttaatcactctgaagttgaagttttgttccacgaattcggacatgctcttcactctctgctctcacgaacggtattgtacaaatttatcaattcaagaagtgaagaagctaagtacagtccccctctcaaatttctctcttactttgctgattgctatgttttctggattttgcaggattaccaacatttttctggtacccgggtggctcttgacttggcagaaatgccttcaaatctatttgagtgagtataattcccaacgttgtaactcttgtttcaatacgctttcaattttgagttgcaaaatcttcgattggtacataatgaatgtgaccatgcgtccctcaggtactatgcatgggactatcgcctcctgaagagatttgcccgtcattactcgaccggtgagacaatacccgagaagttggttaattcgttacaaggtgcgaggaacatgtttgcagcaacggaaatgcaacgccaggtctgattaattgattcacctctcaaatagattcaatgcagtaaaaacaactgtgttagagagatcaacttgaacttcggtttctatttggtttttggtaggtcttttatgcgctgatcgaccaaatgttgttcggggaacaaccagagacagcaagagatgtgagtcacctcgtggctgaactgaaacggcagcacactagctggaaccatgttgaaggaacacattggtatatccgattcagtcacctacttaactatggagcaggtatatatcagtctacatatataaatgcatacaagcgtttctctgcagatgtatcttgaactctgttgtgtatgtgcagggtactatagctacttatacgctaaatgctttgcatcgacgatatggcaatcaatatgtgaagaagatccgctttcgttgaacacaggaacattgctgagagagaagttcttcaaacatggaggagccaaagatccagctgagctacttaccgatctagcagggaaagagatcattagtgttcatggtgaaggcatagttcctgcaaccacgtatcttttaaacgagcttagactataggagaacaacggaacaaacaatacttttaacacaaaatgctctttataatagtttattgagaaacggcaagtagtttgggtttgagtaatgcgatgtcgttttcgagtgaaatataataatccatgactggataatggcatcaactaaaaatggcgctacaaatccactctccgtgttccttctccacgagaccctatcatctcttcttcactaccagaaaccctagattcgcaatcaaatgtcaaaattcccaaatcgaatccgatacaacagaggatccatctcgttcaaagaattcaagctcttccggcgtaggattcggttcaccggcgtcttcttcttcgccggctaagaaattgagtgcggctacatcgggaaacaagaaagggaaaggtaagagagaggtgaatcggcgtgctcctgtggagaaacctgtgttcatgagcgaagaaggagcggccaaggcagaggagcagagacaaaacgaaaacgcgtttcttcttacttggcttgggcttggtatcgtcatcctcatcgaaggcattattctcgctgcttcaggtattgaatctgggcatttgcataaaacttggtttggtttgttaacagtcgttagtgatatggatcaaattgcttaaatctgtgatttagctagagagataatgaatgatcagaagaggatacttctcattgcctcttcttagtagtctttgaatatacagttattgaaatctccaattcaattcaatagatgtgttgagaggataaacagttattgaaatctcctttgtgtgtttgtgttggcttctgcaggattcctcccagaagagttggataagttgtttgtgaagtatgtgtatccagtgttcactccatcggttgtgttattcgtagctgggacaactgcatatggagttctgaagtacatacagaatgagaaaatgaagggtcaagagtgatactatacaaccatggatatttgagctttctcgtgattgatgttaaattagtgtgttgcaagcggagtttgtgtaatggtcggaccttagtcattgtatatgcagagagagctggttatgtaaaagtaaaaatcagtttgaagttattcaagtgccattttcattttatcctaaacaaaaatgaagagtcaaggcatgtatgtagtaatgtcttgttgtcatgaacaccagagaaaaaagctcatgggctgacctggcccatccttgttagggacgtgccggtttttatatgcatttgtatattaagggcagatttggtctatttagtactaaaatgaatctgctagtcctggtacaagactggtttaatgtcaaaaccagtccattttcatttttatttggtacaagagtatgttatacgagtgcgcggactaaagaacacatgaccaaatgagcgagtccaggtctttttcatctctaaaagtaaacaacttttaggggaaataactaatatagataaacacaagactataatgagtcaccgaaattaggaggtgaaagtcaagtgttggggcccttgtaggaggcgccgctaagtccctcgctcccactaacaagacaccgtgctattgatttgctcatttgttatcattctcatgatgttgattatcatgatgttgattctcttctcatctttttctataaaaagtttcttttgttttgtttatattaactatgtatccgtagcttcttttcaaagtctcgtctaagtttgcggacttttagttgtagacttctaaacttcttcttctctctaacttaaattgacatccagctacactacactacactacactccctttgattgaccctttgtattacggcttgatttttattctagttttcgtttgaaattctttttgaattagaagaattcaattttgctatgaagtagattcaatgtaacgaacgtagcgtcgttgttcaaacaccatcaatgtatatgtcaaataagagtaacggcgttgaaatgcaataaacaacatgttgactacattacacgcgtatgcattcgtgatttcatgtactcaaaaacacattacttcaagtctacaacaacacacgtatcaaacaaataaattaatacaattctttggatcatgatgaaaaaactgtttcacgattttcttttacattttgtatttctctttcagtttttaaaaaaactttttcccttcttttctccattttcatacattacccttaaaattttctttgagttcagactgagaatggtagttgtttcagacaacttgtctgactctggtaaaagtttatttctttgagtttagactaagaatggtcattgtttcagacaacttgtctgactctggtaaaagtttatttattggtaagaatttcatatagtgctctactctgtacattgtaaaggatttttctttgtaccatttaaatgtttaaagaaaatgacccctctataacatgattacctcagtaaaaagaaaagtaaacaagattgcctcaaatcagggtaaataagttatgattgattgtctaaggaaaaaaaaaattccaaagaagaacattaaaaggacaattatgttaggtttggatctttcacctactctcctcactcctcaaaaaatatctccttacacttcatgatttatcctgttgtcttctgaattcgttttcctacttgatatcttgagaaaatatctcccaacaagttcgtactaagggtaaaattgaacctcaacaacacttaagatatcaacttatccacttaattacagataactatatgatttatcctccttataaacatacataggtaataagtaatttttttttttgtgcaccaggtaataagtaatttaactgtctatttttatttaaaatataactgcttaataacaaatattaaaatgtcaacttctaaagaaatatattatttttatggacagtgaaatattctgtttactatcacattatgaaaaataattggactccacaagaggttctttttgcaggaagatctacgaccacaaaaatttatataaaaacaaaaagtcttagggtacaaattaacttactgtctttatcaaaaacattttgaaaactctattcaaattcaataattggcatcaaatcaatgtttataattgcaaatttgcaatcattaggcaaaagctgaattttgaaatgattaacgaaagacaattaaaggataaattttgtcttttattaagataactcgtgtgcaaaattcagtctaattaaataatacgatcaatactctttgacaaccaagatatattatgcattaagattggctttgttttaacaagaagaagaaagataagcaacatacgtgactttcctcataactatcattaactaattttaattatgcatcgacacaacaaacccattcttgatcataataattccacaatgtcgagctcaaattccaaaagacaaaattacccttcccaaatttaaacacaaaccataccattcattcactaatcaagcgcattgggtccggtacagtaactaacaacgtggctccataaccactggatcaaataccgccgtcggatcccattaacattatacgtggcaccactatgatcgttcaacatctgtcctgtgtacgaaccaccacctcctgttccataaataccctcacaaagatccgctatctcaaccggagctaccgggtcgggtcctgcgtaccaagcattaaccaacggattcgtcgccagctcagcaatctcgtgagctatcacacttatcatcccatctactccaacatctccgttaggcgatttaaccggttttaatcccggtataaacgccggtacggcgaacggataagcacaaactccgggacaaagcttcgccgagtttccaacccaagcgtacggtaacgtgaatccaacaatcgacggaaacgtgaaatagtgaaatccacaaacctggccgcaaaaatcttgcacgtagacatcatcggcggtgaggagaagatataaaccgcttttgggattaaccggcaacgggcgagacctagaagtgacggcggattttatcacggattgaatcgataaccgggtaagtgatttaccatgagaataaaaccggtcgtttttctcttcaccgagacgaaccgtaccggtaatgttagatccagtttggtcagtgtaaagctgtacggttttccaccaaccggagactgaagggtgtttagatccaacggctgagattgagttaatgaactcacggatgattttcttctgggatttttgccacgtgccgtaccagattgggtgaacggtgatgttgttggttaagactggacccatgtggtaacggaggcggacgagattcgatgagccttcgaatttttttgaagcgtcgaagatttgatcggagccgttggtttttggtggatatggacggtatccgataacttgcgccggtgatgttaggaacaccgtaagtacggtgaggacgagattcaccggaagtgaatgcatggttttttttttattgggtgaaaaaagtaaataataattggaacgagagaatggagaaaatttgaattagtggaccgacttgtctgaagagtcatggagtgtgaagttggtgtatatataggattatttaattcgtactacatttgttttaaatatgaaattatataattttgttttggttcattaatcccaaaatagagcttttttaaaaataaacatttttcatttcagaatagttaaactatagagttttgttgttcactgaaaaggattatattgaagttttgaactgttactcaacctttacaacaaacaggttaaacttatgaatggtattcataatatattaccattcaccaaaaaaaatgaagattggccaaagaactacataatgtgaccagtgaatttgtaatatactctgatactcatttagttgtaaatggttagtgcatagagaattggattttttggggttatggaggacagatgggtgatgacttaaaagtgaggtggacaagtaggacccactacaagaacacaagcggcgtcgttaatagccgtccgattgttttcaatctgacgtcatcaaaccctcgttttttttttggttccccattgcgcgggaaatcttattcgttgttgctagggtaaatatgaaatatctttctcaactgtttctttttcctgggtatggacctcacttttcagaattatttcgttctttggttcttttttttttaataattagggaccaccacgagttttgaaaacactcttcttctaaatcttttattattattattgcagagaaaaagaaagttgtgtatttgttctttgtcgtttttgagccacttgagagttgagaggatagtaatgactaatgaaatataagaatatcgtcgtgaactagcagagacactaaactgtaatcacttagaattggtggtttgtttgtatacccaaaaagatgttttatgttttcaagattactattttttcatatacacaaataaggttttatttttttatctagctgtcatgtgaatatagcaaataccaaataccatccatcgttagtagaccttaattacctaatacatatttacgttagcacactaagttttgtgttctatttttagttatttttgtggtcaaaaaccttatatctgtataaaatatttgaatgccttaaaaaaatgtacatacaatagagatagaatatgtgtgtcagtgtgtatgttaaatacattctttctaaattagtgtgcctgaattttgaaatgctcaatctaagaaaaatcaaaacaagaatctgaaaaatactcttgttaagatatctaaccagttgtgtaaaagtagagatattgctgaattatatatatatagttgtgtcttgtattttttatttttatttttacatatttagttgtgtaatctacacctaactcgtaacatatgaaattagttaattcatttctatatattttgaaacgattattggtatacacacgtaaaaaaaaaaataacgtagatgtttctatgctaagccaaaaccaaccggttaagttaaccttatcacttaaattatactcgatgatatagtctccattaacccataatcattgccattaagaggaaaaaataaactcactaatcattgttaacctgaaaatcctgaacccaaatagcagaagcaccctattttagagtaataaatcaagcttggaatttgattgttttatcaaatctcaatagttacactatggtacgtaggggaaaatgtaggatcaattagctatacctaaccacgattctacatcatcaattccaatcatcaattccaatcatcaaagaaagtgttaaaatttcgatttttttttgaaatttctaatgtgactattgaaaagagaaaagaggtgaataaaatagggacacatgagcagtgatggtgtatacgaggtgctggtgtgtatcccataaaaactatttcccataattcgcatttgaaggttccaatgagaatatttagaatttcgttttatattttactcttcaccatacaaagtatcattcccaaaaaaaaacgataaaaagataaaatatcggataatagctgttcgtttgtcctcgtcagcatagttccactaaaccagttatcgaaaactaaatttagattttagatacattttataattatccaaaaacaaagagaaaaaaaatgagaagtaaacaaaacaaaacctgggaaggataaggaggatgggcccgtctcaatcgcggagcgaattgcgcggctctcttgtcaatgtatatattgatgtgaacactttttaaatatttttacaaaacacttataaaaaaaacgaaaatgttgttttgtaaaaatattacaaaacaaaatccaaataaaatttaattatatactagtcagcaagcagaatcgtacagctgagattgaaagctctctgctaaaatgggccactaaaagtttattttttggctattggtgggtctcacttgttacactgacgttacggtgacactgaaggacaaccactgacgccagacaggcaacacctggcatatatgtggatttatacgctgacctggcagtgttgactccttgttttaaatgacacgtcatctgagtgtgaaagagacagacgtcgcgtgaattttgcgggactttttttaactccctagaccgcgtgtgaagtgtacgctccggtgaatggtgaggcccatcgttagttttggtcgtgttgcatttaattcgtttcataatgttcttttgtagactttagtggtgaatttaattattttgtaaggtgcgatgactttcttgacagtggaaattttttcacgttttcacaaacatgcatgattgtttattttcagttcgatgattagtgacctgtattttaagtgacagtgaacaggaatctcgtttttcaccacagttaattgggatgcgattcttgttatctaagttagaatcgtggatgcgatgatgaagtttgtattttctattgatattgttttacccaaacccaagagtcgagaatgaatttttatgtcgttgctatttattctgaacttatgtcgtaaatgttgggatcaataatttaaggtgaccgagtcgtgacccacatgagtgtcgagtgattattacagcttcggtgaaaacgagtgaaaagtgaaaacgcaaacattatttttaggatcttctcttttgctcacgaagaattgtagtactattagataatctcataatcctgaatgagtgtttttagtgggatcacaatccgaaatgactatttaagcgttaagattcaaaacaacttcacatatatataaccttcaatgacttcaatttaatatatagtttgaaatttagtgtgaaaatcaaaataatcgaacctcgttaatatttttagtttcattcatgttaagtaattcaagccaattttccttttatagtttctctgcatgcaaatttatatttaaagtgcgtgcatgttgcatcacttcagtaatatggtagaatgcaaattcgttaaccgtctctatagttcatgacttcatgatagcataagagataaaatgaattcagggatttatgtgtaatcattaaggaatgagaaagtcacataaagcatgtaaaataatttttgggtcgttatttttttttactacgatgaatctctgctctcttttatatattttagtcatgactgaataatgacaggcaattttaataatttaagataagtatgcggtatgccatgatcggtagacggtagctcaatacaattccgacacagaaactagtttttttttgggtatttgataatgggccttttagcaattttctaaagcccaaatttattattcttgcttcacgcaatattgtttaaagcccaatttagagaacatgatttccattccgaattcgtcgcccagtcacttattagattaatagattgcattgcattgcttgtgctttcaatttacaaattgtctcccaactccatcgacacatctctttttgtgtatataagattcagacttgttatattttttttataaatatgttattagcatcttaagttaaattgattttttatatctgcattaaggattacacgactatatttgcgattgtgtgttggttaaaatataatttaggattgtctttaactacatttaggattatatgactatatttggttaaatataaaatctagctgtgattattagtattcaaaaataagtagcctaaccaattaaaacaacggctattggggcaaattagaacattttagtgtgtccaaaatataatggtcattaggtcatattcctcctagcttcatcgcagcataattgaatgattgccttatttagaagagcttttccactttcccaaaatctatgtgggatctttttgttttgaccttcatttttcttgtttaccatttttagctaaattatttacgattacaaaagatatcaaaagttggatcataatacaatttatagacttactgtagaaaattcgtatgtacaagtacaacaaattcttcataataaattttgaaaattctattacaaatgttgtaagaaatagaatttgaaatatatataaactaaggagaaaaaaaaagagaacatgcattgctctagtcagagtggaccaacatcaacgagataagataacataaaaaccaactcaccataactaaaaacatcccaagagatccaacgattcatatcaaacacaaaaacatcgaacgatcagatttaaaccatctctggtatctccaaaacacaaacacttttttttttcttttgtctgaatggaacaaaagcatgcgacatctctgtgtctttatcttctctctcctcttcttgaaaaactgaacctttaattctttcttcacatctcctttagctttctgaagctgctatcttcaagctcaaaaccaaaccctagaaataaaatgacggcgacacaaatgctgcttcatcttcttcttcttccacttctcttccttcacttcagcaaccaagtcatggcagaaatcaccgacgagttagcgacattgatggaggttaaaacagagcttgacccagaagacaaacacttagcttcatggagtgttaatggagatctgtgtaaagactttgaaggtgttggttgtgactggaaaggacgagtttctaacatatctctacaagggaaaggcttatctggtaaaatctctccgaacattggaaagcttaaacatttgacgggtttgttcttgcactacaatgctcttgttggagatattcctagagaacttggtaacttgtcggaacttacggatctttatctcaatgttaataatctctccggtgagattccttcaaacattgggaagatgcaaggcttgcaaggttagttcttttttactttaattttaatcttaatcattgattaaacttaaaacctaaatttagcattgttagatctttggtttctgcaaaattcttgtcccaagattaatcaatgttctgtggagatttgaaacctagaaatctgagctccttgtcttaggggttttagttacttcattactatctctggtagttgaaattatttgaattagatgattttggaatttaatgctttaatgatctgtctttaaaacgtccttttcatgtctttttgttaggatttttctttttgtaattttcctgtaaggaagaatagtcaagaactttttaagattcaaacttttaattggaaccataaatggcttactggtcccaaaatatggacttgaattgaagataacttgtacttctcttgattaattttgtttatttagataattgattcacttactttcaaaaggctttatatttgagctttaattagcaggaccaggtttctaaatctagaattagttctaagttaatgtaagtcaaagctaagcttcattccttttttggtctatgttgttgtgtagttttgcagctctgttacaacaatttgactggaagcattcctagggagcttagttcactgaggaagctgagtgttcttgctcttcaatctaacaaactcactggagctatacctgcgagtttaggagatttaagtgctctagagcggctagatttgagctacaatcatttgtttggttctgtaccaggcaagttagctagccctcctctgcttcgagttctcgacatccgcaacaactccctcactggcaatgtacctcctggttagaaaactgattcactatatgatctttgaaactaactttgcgtattttgtgaagtgtttctcattttggtttatatttctttctctgttgtaccgatttgacagtactgaagagattaaatgaaggtttttcgtttgaaaacaacttgggactatgtggagctgagttctcgccgttgaaatcttgcaatggcacagctcctgaggaacctaagccatacggtgcaaccgtgtttggttttccatcccgggatataccagaatcagctaatctacggtcaccttgtaatggaacaaactgtaatactcctccaaaatctcaccaaggtgcaatccttattggtttggttgtctcgactattgcattgtctgctattagcatcctcttgttcacgcattatcgcagacgcaaacagaagctttcaaccacttatgaaatgtcggacaaccgtctcaacaccgtaggaggaggttttaggaagaacaatggttctccattggccagtcttgaatatactaatggttgggatccactttcagacaataggaatctcagtgtctttgctcaagaagttatccagagctttcgattcaatcttgaagaggttgaaactgctacacagtatttctcagaagtgaatttgcttggaagaagcaacttctctgcgacttacaaaggaatcttgagagatggttctgctgtagcgatcaaacggtttagtaaaacaagttgcaaatctgaagaacctgagttcttgaaaggactcaacatgttggcgtctctgaaacatgaaaacttgtcaaaacttagaggcttctgctgttcaagaggccgtggagaatgttttctcatctatgattttgctcctaatggaaatttactgagctatcttgatctcaaagatggtgatgcgcatgttcttgattggtccacgagagtatccattgctaaaggcatcgcaaaaggtatgagttttatttatgccgaaccaattttgttagcgttcttgattcatttttgtttatgtgtttgatgttttgtgtttagggattgcttatctacattcatacaaaggaagcaagccagcattggttcaccaaaacatctcagcggagaaagttctaatcgaccagcgatacagtcctctactctcaaactcaggcctccacacacttctcacaaacgacattgtcttctctgcactcaaagacagtgcagcaatgggctacctcgctccagaatacaccacaaccggacgtttcaccgagaaaaccgatgtctacgctttcgggattcttgtgtttcagataatctccgggaaacagaaggttaggcatcttgttaagcttggaactgaagcttgtaggttcaatgattacatagatccaaatcttcaaggaagattctttgaatatgaagccacaaagctagctagaatcgcgtggctatgcactcatgaatctcccattgaaagaccatccgtggaagctgtagttcatgagctaggtaactgtagtagctgtctctgagaactctctcgaggcaaatgtgtaatgtgtaccttaggaatcaattaaggaagggtttgttagtcaccttttcctgtgtttagggttaagaaaaaggtgccttttcccttcccattaacgtttaaaaactgttcaacgtgttgtactttattggtttgtatgatttgtgtttatgttaagctcttcaaccttagaagaagacaagacaagtacattacttttaaaaaatttcggtagatggaaaatatttatggtactttgtcttcttttttttttataactttctgaaccaatttattgtcaataattcaatatagaaaaaaaataacgtataacatttttttttctgatattgatcaaatcaatatcaaaagaattgatttgttagatggttttgatttagatttggatatgagctttaacttttaagtctttattagtcatctagatctagatacaaatttataaatataaagtcaaaggttaactattagcattggccaccagattcgaataatttacatgatttttctagacttcaggattagattttggacctagtaaatttttagaattacttgagttatttgaaagaaataaattaaattattagttgtccacaaaagacagaaaaaaatatcaaattatacttttcattggtcaaaaaaggattataccaaatatctaaggaaggaagatattgttgatatagctaattaatcagtaactaatcctaaccgtccatttctcctcaaaccgcttgatctaacggtagcaaaaggcttcgatcacataacaccatttgtttccatagaaacgaacgagtcgtggagatttataagcgagacttcttcttcttcttcttcttcttcgaaagcttgagagtgctgcgtaaaaatgggtaatacgtattgtatcttaggaggttgtattgaacaagctagcgttggtgtggtcgaacgttggggtcgattcgagcatatagctgaaccgggatgtcatttcttcaaccctctcgccggtcaatggctcgccggagttctctccactaggatcaaatctcttgatgtcaaaattgaaaccaaaactaaggttcgtgatcacttattccttttgatcctttgcgaattttggttaatactgtatgtggtgagattcatgtaaattaggcttattgtcgttgttgtttgtaggataatgtgtttgtgcagctggtttgttcgattcagtatcgtgtagtgaaagctagtgctgatgatgcgttttatgagcttcaaaaccctaaagagcagatccaagcttatgtctttgatggtaatttttttgcttctctgttgatgttttttgtttctttgtttgaagaagctctgttttgattcttgatttgttcttgtatgtttgttttttgaatcatagtggttagggctttggtcccaatgatgacgcttgatgctctttttgaacaaaagggtgaagttgccaagtctgttcttgaggagcttgagaaggtataacatcttgttccttcactatctcattcatttgtatgtttagagactatttattcataataggatataagatatctgttttgagattcttgatgttttgtagtgatcctgcatttgttgagctaactaataggtggattatcaagtaggcatgtttggatttcataaagaaaagttacaacgttaagtatatgtttggttttgttcaagactatgttttcatttgtgagattcttgatgttctatcgtgatcctgcatttgagataactaatgggtgaatactgagtcttgtgaagtgttatcatagatatgtgtggattgcatagagaaaagtaataacatatattcgagggtagcctgctttcgagactggtgaagacttttgtaatggtcatgactcatgattggagttgtttgtttcttcaggtgatgggtgcttatggatacagcattgagcacattctaatggttgacattattcctgatccctctgtacgcaaggcaatgaacgaaatcaatgcaggtaacctttatttccgatactgagggaatcagtgtctgatacttttcaggtctctaatggttccctacacatcaaagcacagaaagatttatacattttatgattataggactcagttagatgtttcgttaagagtttatgcgaagttaatttacagtttgttgacttcatttcaattttgcttctcaaatccattctctacttaaatgcagcacaaaggctccagctcgcgagtgtttacaaaggagaagcagagaagattctccaagtgaagagagccgaagcagaagcggaagccaagtacttaggtggtgtcggtgtggctagacaaagacaagcaatcacagacggattgagggagaacatattgaacttttctgacaaagtagaaggcacatccgccaaagaagtgatggacttgatcatgatcacacagtactttgacactattagagaccttggaaactcgtcaaagaacacaacggtgtttctcccacacggtccgggacatgtgagggacatcagcgaccagatacgcaacggtatgatggaggcggccgctagtactcaggtcaacgacgtctagagagagattcacttcggcttgtgaattgaatttgctacttttgctttcacttgactatggtttaaattatgttttactagagtgaatttgttggattttgcctctatttttttttcttttctataatggttttcatggtgatattgttattatggtatagataataacccaaaatacttggaactcttatgaagaggaacatgagaaagttgagacatatctttgtgttcttttttgttgagtcatattctctttcttataccacaaaagcatgtaatagttggtgatttggggggtcgtaccttacaccaccatcgaaagattggatcaaagcttgtactcttaaagaaaccacaccgggaaacactcgttgatctctaaccatttttctggatgttagtgttagtgtttatatatttttaaggattagagtagattctttttcattaaatctcaaacctgttcttaaattttcaaatactagcatgttttagcttaaaccagctgcttcttttgaggtataatgaccttttgtttgccttagagtctctccaacacagccattttctcttgatcatgacaaccattttcaaatatctacgttacatcaaatagatcattaatattgtttataagttcacatcttattatagagggcctttagcaatgaattacttgatgtacttaggagtctttcttttttgtataggttaaatgttgataacccaatttttcatacaatattatgttttcaaattatatatatttttatataaaaaaaacccataagtttttgttaaacattttataaatgtagcatgtcaacaaaacatcattctataattaacaatcatcttgtgtaatgaacaattgtaaattcattgttgaaagttgaaacctatgaataaaaacaaaatttattcacaaatcacaaatgctttactattagagagatcctctgtccctgtcaaaaggtttcatagtccaagtatatatatatttacaatgtagagtaataaaatacttgaattaacaaagaccccatgtgtattaaaacacttagttgttagaaagacttattacaacttagctggcaaggagttaatactaatcacttgtttaaattttgtcattaaacaatcagattccaactactttattcagcagtctttgtcatcatcgaacttgtcttagaagtctctcatcctcaatttaaaggtctcacaaacccgtctctttcgcacaaactatctttcttctccttcttcttctttctcactttctctcttctctctatttctctatttttctgattaaagaagatgatgatagattctcttatggagcttgtcaacaagactacttccaattctttattcatgttccttttctgcaacttcatcatcatcttgatcctcatgggcaactctaaaccgggttcccaagacacgccaaatcctggtttgcagaaatccgtgatgttttctgactcggttctctcctctaaacccggttttgagaattccatgatgatatctgactctgttctccaatctaaacccggttttgagaataccgtgaggatttcagagtcgactatctcttccaaacccgattttgagaaatccctgttgacttctatgccggttctcttgtccaaacccggttttgagaaattgggtttgaaatcgaaaccggttctcttgtccaaacccggttttgagaaatctgttttgatctctaagtcgaagaatctcacatctaatccaggtttacaagaaccggggctgatatctaagtcgaatctcacatctaataccggtttacaagaaccagggctgatatctaagtctagtctctcctccaaacccgccggttcggagaaagcgttgacctccaaacccggtttggaacccggttcagacattgcaaagaatgatgagaaagggagcttggaagagaatgagagcgaaatggagtgtgtgcttcgtagacgagttgaagaatttattcgtaaagtaaatactcaatggaaatcagaaaacactaagagtaattatcgcttatactaatccaagttttgtttatacttatggaagaaatgctctaagtaaaaagtatgaatgagaagaaacacgagtccatattagtgactaagtgacgacataatagtaattctcttcttatgaattaaattaactaaatttgtatcgaaaccagattaaatcaaatcatagttaaatttgttattattaaaagagaattttaccttcaaattaagttcaaacaacgttactaacgaacaaatgcaaaacgacactgaaatcaacacataaaatcaagttagaaaacatatcatatattttctgatccgattcaacaaggatttcgtacatgtggataatttgcagccatactcctccaataaaatagaattaaaatacgcctaaacttctagcatccaaccaaaaagaaacgattcacgttaaaagttttaatactatatgcatgatcatgagttgcgtaatcttgtgtagatgcaatttagtttggttggtgaaaatttacaatttaatatatggtttgttcgacatagagaaaaaggcatctttctagttcatcaaatccataagtcaattaaaaaaacatagctaacatatgaataaatccgacaaggatgatatgatgtcttagaccaaattggatttatacagatgattttaaacacttgccaactaaggacgatatcctacattttttagttgtttacttgaaattgcaacttctctttatacaagtcattcttgatttggtaaaaactaattctgttatttattatgcgaatgccaaattttggaggtttgtagatttttttgtgatttttaaatattgttttatgaaccataatttagttttctcttcttttgtattgattctgacttatatcattgtcagccactatgtaaatgagctttcacgaaattcatagagtccaagaattagcaaaatagtagcctacacaatttttcattcacttgcttaacaaaccaaatttgagtacaacactctatttagagaaagaatattccatcaccagaagtctaatttaaattcagatatatagatcaaatgtctaaaagcttgcgatttgagaaaaaatgtgtcacgccaaataatttaaaacagagatgaccatgatggtttgaactattttaagtttttaatacaaattctatcactttttaaatgcaaagttatatagtttctatatacttaataggatattaatagaaaataaatacaacgaaattattccaaatcacatttttagtttgtttgctaaattttgattcaaaaatttcgtttgctgaaatatttacaagggtaggaaaatagtaaacataaactaacaaaaatacctggcaccataatgtatttataactagttgaatacaaccactagtgtatttaaaagtagcataatgttaatgtcagttcaatgaacactttgtaatgaatcggatagttgtcgaatgtagatagattctataaatacgaattaaaaaaaatcagttgggtttcaaaatgaagtcatttaaagagagagtttgaaaacacaccaaggacggtatccaaaccaacattattaattgttcaattaaaattgcaagttctctttaagaagtcattttctaattcataaaaataaaatttgtttatttatcatgcgaatgacaatttttgggaacctcataaacaaaatagatgcattttcttgggattttttgaatctattcgttatttattttttattttttaaaataaaataataattctgattcatatcatttacactactattactatgaagtttaattttgtttctgtctacagtattattaataaaacttcgaaggatacaacaattagtggaaatagttaatatctccggtaagataagtcgacggataataatgatatctctaaagataagagcccaaaagaaaataacatacagaaaaaaacaaaaatacaagacgataagataaaacttaaaaatcgaacacataaacctctactgagtgaattaactagaaaatcatgagaatccaaaaggggaaagtctttatgctaaatcagacaaattatatcgaccatattttatgtttatattgtttggtaaatttcgattaaagatttaagaatgtaattttaatattcattttctgaaatatttacaagtgaaaaaaagaaagtagaagctacatatattagtataaactacaaaactgttagatatggaaccatgatgtatttctaactacttgaatacaactactagtgcgtttaaactttagagtagcataattgcataataatgtaaatacgtcacttcaatgaacacatggttataaatcgagtagttgtaaaattctggatataaagacgattcaataaaatttagttgagtttttaaattgaagattggaagagttgattgaagaaaggagttagaacacactaaagttttgcacttcttcaacaaccacttgggatacaaaaaaaacaaacaagtgaaagaaccctaaagattacaccctataataaaccctaagattatagtgagagatctccgtttaagaaaacaacttaaatctgagaaaaacccattacagagatctcaacacatacataaataaattgtatgatctagtgaatgagtttttttaaaacgctactaactaacaataaacgatctttaacaacatattttctgtttatatagttttcgaaattcacaggtgttagttacaataggaaagacaacaaaatttaatcatgaatcctaaaatacattttttaccttttatggtcatataaattttgaaaactaaataaacgaaaaaatatgttgtttactattccaaacggaattgtcgttgacgaggtgagtatattccaatctagatttcttattcttaagatatccatatcaatcagatctaaatagaaacgttgaaaaagttaatccttcaaaaggaatatcatatagacgtatccttgtaaaatacatgtcttatatcggcgttgagatcaaagacggagtctgccaccccttaacttggagataaaagtatctggtaccattaggtatttataactgctcgaatacaactactgaactacctagttggtctaaagtaacgtagatacatgataaacgttaatatgtcaaattccatgaacacgtacttacgaatgtgatagttgtacaaatgtactatgtagatagatgctataaaagatgaatcaataaaattcagtcgaatttcaaaatgaagtcattggggagtttgattgaaggagagagtttgaacacacactaagattggctacaagcctacaacaaccatctgaggattaaaagaaagacacaagtcaaagaaccctaaagattacatcctctagtaaaccctaacttttagtgaaatatctctgtttaagactttaacaactaacaatctgaaagaaaaaaaataccattacgctctaaaaaaatctgaagacaccgaaataaaacaactcaagattcataacacatatatgtcggattctttccatcgatcatcagcttggaacctcggtgtcagattcgctatggcctccgaattcttcatcatcttcaccttctaaatcatcctcatcttcttccctatcttctccagggagggaagagaagagatccttgatatggttagctgtgttatttgcatagtaaccatggacggtgttagtacttggttcatgcgaaaaggacacaggtggtgcagacaccggtggtggctgaataacaacaggcttgttgagcccgtatctagccttaggatcttccgctgagccaccgaatgagatattagaagcttgtgttgttgtcgggatcccgagtctttcccttctttgcttctttatctgctgctgctgctgctgcgattcctcctgacccgctataaaactccctaccattacctgaacaatatacatatcgtattcaaaaccacaatgcttaaaacgatacaaaaacacgagtccattaaagagatcaacacaacacctcatggtctaagttattacctgaacaggaccagcggcaataaagagaccagcaagtccaccaccaaagacacgaccatcttgtcctgcaagagagacactcatcccaccagctctgcttcgggttcctccactctcgcttggtataaacgaacccgtcaaagaaagaatctcaaaatgaccctgaccacaaattgtagactaaatttagtaaaaaagaaaaaagattagaaagaatctaagagagagtgaagagagagagcaaacctcataagtgagagtaccaccagatgtcatagattgacgaagtgtaacattggatatgggaccgttcgctgaaagaatacaaatagcacgcgagccttgttgagagaatgtcattatcttcattgtcacatcctgttagattcagtgggccaaaaatagttagagatcttgtggacttagtcaagaataatgagcttggttaatcatagtatgttcctattaaggtcgctaaactgactttatactcacaaataattcagtaaataaatcacaagtagatagaattatcgaaaacatacctcaccggcatttactgtgagcacatgaggtgtaaaacttggactgacaatttcagcaggtcctcctccacctgcaaattaatcatcaaatgaatcaagcttaacagataaaacaaacgaaatctgatcaagaaaactaacaaattgctaaaaccaaaacagtaaagagttcaagttaaatccttaagtaataagaccaaagcctacagattcctcgatatatatactcttaatcacactgcttatgtcactatcatcaaagaatccgaactagtttccctaaattgccttcttcttctgggacttttcctttaaattcaactcttttttcacacagaatcctccagtttactggacagtaacattcactagctttataagacaaaacctttgtccttattccaaaatttttgcaagtcaaatagatctattaaaagctatctattgattcttatacagagaggccaatgtacacacacagagattcctaaattcgaacaggaaaggagaaaaagacattaccagaagtaggagtgttgttgttaaattcgaacatctgaggattcttgagccaattgttgtcgttgttgttgttattgggctctctgcttccttgtccttgtccacgtcctcgtcctcttcctctgcctcttcctcgacctcttcctcgtttccgagaaccaaactccgacgtcaacggaacggaggatgagataggcataggagagagagtcacagcgagtgagccgtcagggttatactttcttggtctccctctcttcttcttcaactcagaagaagaattctccaccggcattgttaagctaaaaggaggagcaacattctcagaaggtttcaccgcggcggcggcggaggaagtgctggattgacccaccggaaaaagattagggttttcagaccgtggtgggtaaccaggaggaggaagaggagtttcatgttgtttcagaccaaaactggttgggatgttgttgatgttagttccttctctctcctccatctgaaaagattctgattccgacaattaaggaagagaaactcaatagaagtagaagaaaaagactcaaaaagacagaacttgaatcttgatgatcacgacagattcaagcttcttcagacagacacttaaagtatagacaagagagagagagagagaagaaagatccagaggacgtaagattcagagaaaaggggcaaagagatttttttgtttttgttattgtgtgttgaaaattaagtaaaactagtgaagagaaagatcaaaagcttccatggcggaatcttaatttcagaagaatttctcctaaaacactcataattaccagggtttttttttttttctacaggagggttaagtttagggagaatttttctttacagatgtgagaaattagggttttgaggagaatgggaaagagaaaataaataaatatagaaaatataaaaaaaatcaaaggagcggattttattacattattacaatttgattttatagaaataaaataaaaggttgttttattaaaaggaaaaaatcaaaaaaaaaaaggagagagaaacgagaaaagtgtaattctaaaatattgtaataatggcttaattagaaaattcaaaaatttacactcctttcctaacaaaagtcttggagtttgggatacagctaaagtttttaagtaatttaataaaataagtagaggcaaatttttaattatatgcagttggacttgatttttgagatgttccacactattcaaaatgaaaaataagaaaaagatttaagatatttctgtcacctaatattatcactcttttctttttcagtctatccacgttgactataaccaaaacgttgaccaatttagcctcccaaagaccaagtacaaaatcttctttgtccctaatccctgacattaggagtggtggtaatgactccgtaccaaagttatccaaattttttcattaggatgtctaattcccgcaaataaagtctacaagtttgtttttagggtggattaggttatagatcttcaggatggacctatatatcacgattgttgttggggtgattaagtttttttttttaaacttgataccaaaaacatacaaatcgcacaaaatagttcagttgttttatcattgtctaaagtaagttatagtgggtcttctagatcacacgactatacataatatcaatttaaaaactctggttagggaatgtatctatttagagagttctgatttccattctagaagcaaaagattaattttacaaacaacatattaggtttcaaaatctcccatttgtgaattgtgacttgtgagcctataatattcaaatttcaaacaacactcttcgtcccgtacaaatctcctttccgactagtaattttgacttgtaacatcagaaaattttcaagagataaatctattataacctatagaaaactttttaaaaaagatttcttactctataaaacctaaagaattatatatttcctaaatttaaaatatttacattatatctataaaatattttctatactctataaaatatttcttaagatttctaactatatctacatttgaccgacccctttctattttattatgttgcatatgtcgtcaaataagacctcatagatctctgaaattaattcatgatggatacaaatcgatggaagttgattatccaaagtggtaaaatcattagtaaccccaagctattttgaagtcatacatggagacgaaaaagtggtcaatccaccagtaaattaaaatagaaaattgtgaaatattgacctcaactcacaagcaaataattttttgaatacacgaatatagccagaaacaagttatgacaagtcaggtaataatatgttgcggaattttcgaataataatgtgaagtggtcaatacagattaggttgactagtttcccactacagctactgagctacacttcacgaaatgtttttttttttcttgtcagtctcagaataaaccatacgtgtaaaaatgattactcaaaaaaaaaaaaaaaagccaatcatataattgaccttttacaaaccaaaccacattcaatttgagttttacaaataaaagaacttaagttgaatccaacggattgatgatcaaaccaaacgacattcagactgtagcatgaaggcgagtcttcgttcctcaaacgagtactcaacaacttcaggcttttcagacatcaatcttgcattgttggtgaatggtgttggtgcggtgtgcattgggacagagactgttgctggtgtcgacgggattggaatcattgcagcaacatttttcggtgtttgcatcatcatagtcatcatcttctcttcttccaagttcctgagaatgttgttgttcttgataggagttgcaaatgatgagatctcattcactgcgttgtttttcggaagttgttgtgttgttgttgttgctatgttggcctttgatgcaaccaccgtggtcgatatgggggaaaacggtttgcgaactaatggggattgcaacatttcagaaggattcattgattgtttccttgagggtagtcctgcaatgtcaagccctcttcttcctgcaggaataagattcatttgccaatgcaattaggaaatctattcatactatgatgataaccaatgatttacatttgattaagagacttagttaccatttgataaagctccatcattatgtcggtgatctgctttcttgttaggcttaggagtctgatgcattgctgctcctaaggaaagtcttctgttagatgcaccaccggtcgacattcttggagcctttttaccaccaaggggtttagatgggctgggtttggacccgtaaagtgcctcttgttctgctatgagctgtccttgaagctttttctgatcctttaatatgtagaaaaaagttgcatcacatagagttggattaggaagatgatattgggtcaaaagtttctggaaacaataaatagaggacttatacgtacccgttgccgacggtgttcttcttctctttcctgcctgagtatgttatactcctcaagcatagaaaggagacggatctagacacagaaaaaaaaatggtcagccatgaaataatagatactcaactaaaacggaaaaccaatagagatattgagaattcatacaccatcatagagaaattcaatcccgttttcttgttcccaaactattgtcttcgaggccagtgcttcaaccatacctgcatgaataaacatgaaaagaatactacctttataatctctattcagagcatcataaacacataatttattgataacaaagagcaacttacctgggagcttggtaacaagattacgagctttttcagcgcgcttgagagtaagatgagctccacgcccagcattgtatcggttatcatcctgaagagtgaaaaatctcagaatatgtaacaagcttatttaaatttaaaaagattttgtgattctgactctaaccctgttgtattcttcaagccaactttcttcatcgcaggcagataaccatttctcaaccctttcaagtatctcttttcggcttagtgcttcctctttgatcttagatatatgttgctcaagatgctccaggaccattgtagcatccacaataccagattctatcgccacgatagtctgatctatagcactgtctgacactggcaacaagtgggttttcctacatatctcctctagttctgaccttttcttcaacacaagttctttcattttgcttgcttttacctcgtccaatcggacaacttctgcctcaacctgtcatgttatgaaccataagttataagcatggtcatgtatagaacagtgtaaacatgaaaaatcgccacagcttacgtatttaatgaagtcttcagagagactattggcttcagttatttcatgttctgatgcagctatattgcaggtaatatgctgatactcttgctgctcttctatgggtgtatccatcaaattccagagctccaacatggttgttgctagatcttgaagctgcatcaaattcaataagcaacaatgagtaacaacagcaaagaaaattctacataactcgtcagagtaatatatcacttaccctctgcattctctgtatcttgacctccatcagcttctgaactgcagcccccaatttctcaattgtatgatcacttaaacttcttggtccttctggatcactcaatgtgggattcacttggccaacaacctcattaaaatccattccaagtactgaacaatgggaatacagagtacacaggtgcttccgaatcgtctccacacgatcaatctgagagaaacaacaccacaaaaggagtaaatacaatataatggtcggaataaccaaacaaaaacaaagaagcaaaatattcaagtacaaatcaaatttcaccttctccttctgaagtacttgcagctggcagtgtaactcttcaagctttctcatagacaagttagtctcatcgataagaggttcggaatgaacaagttctccttgacctttaatatcattagtaatactatctatttgctccatgacaacaatgaactggtttcttctttcaactttcctcttttgcatctcttccagttcaggaagaatcctcccaagctcttgcttcaagctcccaacgctttgatcagactaacacatacaaataaatatcttaagctcgaaaattgcataaccataagtccatatcaaattactcataatgaagaattacctgtctaatatgcacaggacgctctcccatagcagaacaaattgcagctaattgtgcttcagcatcagctattgcttgtctaagctgagctctacatcgattagcttgatcaacttttcttctataaacttccaaacattcacgttcaagctcaagcaacatttgatctctatcagtttctgtttctccaacttcatcccaaataatctaattttgcacaaaacaaaccaaagaagatctctaaacacttcacacacaaaaatagaaacagtatcatatatagaaagactcttaatctgccaataacctggagttcgaataaaagagatccacaagttgtctctacttgaagaatcggatctttttgaacacttgccatttcgaaatgcttaagcctgtaacagggaaaacgaaaccctaactatgtcattctcaaaattagaagctaaattcgaagcaattgattgaaagcctatatgattgattttgacattgcgaagcaacaaattgagagaaaacttgcctgaaacgggagatttctcgtaaattttccagaactgatgatgattttgaagtttgattgaatctgtcactgaaacttcgcgagattagatttaagaaaacgattcagagaaaactcttcgattagcgtttgagatagagaatccaattttagaaacctagatcgagatatttctgtgtgtggagagaagagagaagagaaatagagccgttacgaagaagtaaaaggttttgggtagagagagagatgatgatgatgagattgggaatttcgtccgttaccccaaccagctcaaactatttttgtatatttgggcttttactttttcgaacttttgaatttcaaaaatctgatttaaggctttagaatccagtgcatcgtgcttacagtagacgaatagatccctaccgttgagatattcttattccctatgaacggttcagatctcaaaaacgaaaatctagcataaattgtgttaagccgatctttggtctgaaccggtctaattttaattatttcggtgtagtagtcataccacgcctatccaaaccagactttctctgtttgtcaatgatcagtgtagtcaatctaacagagatcggtttaatatatgattaaatgttccttagaaatcctactctgatgaagaatatatgattaaggtaactaattggtttaatatatggaattcaaaatttagttttggtttgggcgtggtatgattatatattgaaccaaaataatcgaacatagacgggaaattacatgcatatactgatatacagtatgcgtctggcgagttacaaataatttgaaacatttaaagaatctcataatccgatgattcaataagcataaacatctctgtcgaatgaagaagtatttgatctcatcactacatcaggtttataaataatctgctttataattttacaaacgacatatgtgattgatttatactaaaaaaaaaaataatctgctttataatacatcactacatctgttaatcccaagtgtcgaacatttgagtaatcattttttctttttttgaggggaaagttatatgttgccgcggttttgtgtagggaagagtgtaactttttaaaaatttactgcaacaccgtcccatcaagttctgtctaatccaattcacccaggcaacaattactatgggcagtttggttttcctttggtcatatgtttaattactgtttttgaaaaactggaaaactgctatatcgtccaaattttctatttttgtatgagtaaattaaattacttttggaaagttacttattacaaaacaactcagtattctactttccccttcttgcttgtttcactgtgaatcaatggcgtcttcttctctatcacacctttgcagctgcacctcttctctgcatcatcctctctcacattctatttcggctaacttaacctccaaaacaaatctttcctttcagtttcttgcaaacagacagtccccacttctctcctcaaccccgagatctctcaccgttatcgccggcgccacggctccgtcgaaacttagaggcaaaaccaaaaaaggtaaaatcgtttctctgacgtccgtttccttataaaccttgttcgtgttactgagcgagtttgtgtgtattttcacagtggttggaattgtaaaaatgaatgtatgggccggaaaagcaactttggcgccgccggtaaatccggcgtttgcttcgaggggagacagtgaagacaaacaaatggctaagcgtttctgcaaggagtacaatgcccgaaccgcttgataaactcggtgatataattcctgtcgtaatcacaatctacgatgttgggtttttttttctaccctaatctttacactacttcaatctttatatccgatgtaaattcttaactagagaagagtaaatttgccatcagtggatgggtttttgtatagagccgcttttgaattttgttacgtactattcatatatatatataattgatgttttgttgtttcatacttcatagagttacatgtgtggtttcaggaccagagcttcacttttatcctcaagacccctcctacttcgtttttgttgcttaaggctgcaggtaactcttcttttgtccaaccctaattgtgtaccatgagtccatgacccaatgaatgtgtatttaatttaataatagaaattttcagctgcatacataatttgagttttgctagatcaatattacttgtgtcccttctaaaactatatgtataaagtgtggaacaaaaacaattgacaagaaaatcacgtgtgttttatttacattcattttcacttctttggagttttgtgatgtttgactttattgacttgtgaaaataggtgttaagaagggatcaaaagatccaaagcaaattaaagttgggatgataacaatagaccaagtgcgcaaaattgcagaagtaaagctgcctgagctgaattgcacaacaattgtatccactatgagaaccattgcaggaactgcgggtaacatggggatagacattgaccctcctattcttgaacctaaaaacaaagtagctttgttgtaaaagcctaacatggggttgtttttgataatatgattatgaaattgatacaatgtaattgacaaacccttaaccgtcttgttgccaaatccagcaagggtttttagtgggtttctatgttgggttttttttaaaaaatgggcccagatgaaaaaaaaacagaacaatccatttaggatcgttcataaaattgggtttttcgcgacccaatagaaactcatacgtgacttcattttattgggtaaacgttttgactaaacaaaaaaaaaatacgcgttttttttcttttctttttctctctgatttcttcgtggtcgccgacggagaccccaaatcgattctgcttcgaaccaaatcgaaaccctcatcatggttcgtatctcttcttctttgaatcgatttgattttatgagctttgaaattgaattttgaaagagattatgatctgattgcattggtatgtatattgaattacgaattctgggaatttttagttcgtgtactaagcttgagctgcatatgttgttattagcttgttcttagttttctatatgtttgcttcattctcagtgaagtcatattgttgtttctatattaacatagaaatttcagatctttatgtgtttgttctgtagctttgtttgtacctatatccttcaaagaaaaacttacggattcaggtatatgttttgttgtggtagatagaggagcattatgtggctcaaggtttaagtattgttggatactttcatgcaaacgagaggtttgatgatgttgagctctgtggtgtggctaaaaacattggtgatcacatttctcgctatttccctcaggcaccaattctcttggtaagtaaatgtcttatcctttgtttatggaatgctttggccaggcaggaagcaaaaggctgcgagtatccagtgttccgagcaagcttaagattaatgctaaggtcgccaaaaagtaagtgttcctctatttctcctgtgttttttttactctgtataattatcctgccctgttcttcttccatcatatctcatttgcgtctttatatcaattactatttcaggcttaaagaaaggcagtggtgcgactatctctggtttgcatcaatgtctgactccaatttgttatctatttgatagggaatatagttgtgcaatactcagcaggctttaggattaggaagtgggactcaaagcacttacttctcatagtcaagaaccatctcgaagctaaagaaaatctaaaatatggaagacatagatacaagcttacaagtgttgaaaagccgagcactaaaagtataaaaatgaaacaaaggtggaaagaaactgctttctctatctcatgtctgttttaaggtttcttcggtcacttaagagacaaaaggcattgttttgatcactctttgaatcactcttatttttgaattagagcaatacctaaagatccatcttcttataaccatcatacatgaccgccatatgattaacacaagccattgcaacttttaaccactcttcgaacatagttagtaaaaacaagaaaagaaaaaaacactatatttaattgaggttcaatcaagactaaaccaaatgatttacaccactcatagtctcagtgtggttgagagcacaatcgagacattattcttctcagaaagtgttggaacaaacttattgtttttgttcggtttatgtttgtcttatgtttcaatgttatgattcaatgttatgattgatctttttattacattatgctcaagtaaaatattaacaaattttctttttaatttttttttttttgttttagaaacccacttaaagattctaccaatgaaccataaaattttcaaaaactctaaaaaatctctaaactacaaaactatcaaaatttattaataaaaaatgtatagaaactttacttagaaactaatcactgtggttgctcttacattttaagatgagtagtaacttatttgattatgacatacgtagtttgatttctctaattgctaattttaaaattacttttgtagtatatgcaaagtattatactattatttaaacttgatttctattttttctaattcgaattcgtcaagctttactacatgaattgaaaaacctattcacatgcaccattttttactttccattttcaatttgacgtattcttttacaacaattctttattatttttgtagtgtttatgcatggaacataaaatgatttcacgtaatattggtgcaatattttaacacttaagttaatcaaatatattatataccatgtgattcggtcgtaaaacaagaaaaaatatatgaaaacacaaaggaaaataatttgcataacgtccagtataaaaaagatggttcgacaatatattttggttctaacgtttatttctcaaaactcaaaattcaaaaatcttaagatcgaaaaattcgaaccgagtatattaatgtatgagagtaattggtttacttaaaccagataattaagattgaattgatgtaaaccgaggtcaaagcctccatatatataagtgagagttactgagaagtgagaaataagcaaatcagttcttcatttctccttcttcatataaaatcctctcaggtatcagagcaatttgctccattgcgttgctgatttcttcaattgatcgtatgttttctccgatgacgaagaaacaatccaagctcaggatttacaatcagaaaatgtttcacctcgcgctagtagatctccttcaactcgagagattccgcgtcatgattcttccccgattgataccaatcgtgtttcttctggatctaacgattgtatctctgtcccgaccacccgagaattgctccgatttgctttagcgatgcaatttcgcttgtttggtatgtctgaagttcccgaactctctttcagtctctctaagcatttagcttctggatatctctatgttgatgatgtttgttgcaatatggagattttcgaaatgttaatgtattcgtagagagatggagatttggttagaaaaacttaaatttcaaagaagcttctagtgatgaactttctttagccatctaatttaatatacatcaataaataaacaatgtatgagtggaaaccacctggaaattttgtaagggcatgtaaagtttttggtcaaattttggagtcaatgatctctatttaattccctgcagtgatcaagagtttgatacaaatgattttattggtttcttcttttgatccacttccatggcttcttcttcttctcgcagctggacatacgatgttttcccgagtttcagtggggaagatgtccgtaaatcattcctcagccaccttctcaagaagcttcatcgcaaatcaatcaatacattcatagacaacaacatcgagagaagccacgcgatcgcccctgaccttttatccgcgataaataactcgatgatctcaatcgtggtattctctaagaagtatgcttcttccacctggtgcttgaatgaattggtggagatccacaagtgttataaggagttgactcaaattgtcattccgattttctacgaagttgatccttctgatgttagaaagcaaaccagagagtttggcgagttctttaaagtgacctgcgtggggaaaacagaagatgtgaagcaacaatggatagaagctcttgaagaggtagcaagtatagccggacatgattctaagaattggtatgtgtgtttggtttatttctttgcataggctctaattttggttttagtgatgttcattgttttcttatgagtatctattgactttaggcctaacgaagcaaacatgattgaacatatcgccaaagatgtgttaaataaacttattgcaacatcatcatcgaattgttttggagatcttgtcgggatcgaagctcatttaaaggcagtgaagtcaatcttgtgcttggaatctgaggaagcaagaatggtagggattttggggccttcaggcattggtaagactaccatagctagaattttatacagtaagctctctagccaattcgactatcacgtttttggttcttttaagagaaccaaccaggacaactatggcatgaagttgagttgggaagagcagtttctgtcagaaattctagatcaaaaggacctaaagataagccaattaggtgtggtgaaacagaggctaaagcataagaaagtacttatcgttcttgatgatgtggataatctagagctattaaagactttagtgggacaaaccgggtggtttggacctggaagcagaattatcgtgaccactcaagataggatccttctcaagtctcacaagattgatcatatttatgaggtggggtacccatcgagaaaattggctcttcggattttatgtcgatctgctttcgacagaaactccccacctgatggtttcatgcagcttgcaaatgaagttacagagcttgttggtaatcttcctttggctctcaatatcatgggttcgtctttgaaagggagggacaaggaagagtggatagagatgatgcctagtctccgaaatagtttggtggatggagaaattctgaaaacattaagagtcagctatgatcgattacatgggaattatcaagaaatattcctttatattgcgtgtttactaaattgctgtggagtcgaatacattataagcatgcttggagataatgctatcattgggttgaaaatactggctgagaagtccctcatacatatatcaccactggacaaaactgtagagatgcacagtttgctacaaaagttgggtagaaagattgttcgtgatgaatcctttggaaatcctggaaaacgccggttcttgttggatgctgaggatatttgtgatgtatttaccgataataccgtaagttcttacataatcttttcttcactgactctattgacatctaagcaagtcactattaaaaatttgttttgattgttaagagaatgattttatatagtggggattatatttcagggcacagaaactgtactaggtatatctcttaacacattggaaatcaacgggacattgtctgtagatgataaatcattccaaggtatgcataatctccaatttcttaaagttttcgagaattggcggcgggggagtggtgaaggcatattgtctttacctcaaggcctcaattctttgccccgaaaactcagactactacactggtataaattcccgttgaggtgtatgccttctaacttcaaggccgagtatctggttaacctagaaatggcgtatagccagcttgagaggttgtgggaaggaactcaggtaatactattaagtaagattttcttcattacttaactattgtccattttaaaagaaaatcttgctcttctttcttcacttcgattgataaatatggagtaaacaaaatgcttttacttattgaatatatgcattatttttttcatgttctgttttcagcaacttggaagtctcaagaagatggatctgtccaagtccgaaaatttgaaagaaattccagatctttcttacgccgtaaatctagaggaaatggatctttgcagttgtaaatctttggtaacacttccttcctcagttcgaaatcttgataaacttagggtgttaagaatgagtagctgctcaaatgtcgaagttcttccaactgatctcaacttggaatctctcgatctccttaatcttgaagattgctcacagttgagaagttttcctcagatttcaaggaacatttcaattcttaatctaagtggaactgcaatagacgaagaaagttctttatggatagagaatatgtctaggctcactcatctccgctgggacttttgtccactgaaaagtctgccttctaactttcgtcaagaacatctcgtttctttacatatgacacatagcaagcttgagaagttatgggaaggagcccaggtacttattccattttatattttggtcttccttcgctttgcttttacattttgttgatttagcttgcatacatgcatctctttgaagaagtttaattaacgtcatgctataagtataactgtataatttgatttgtcaatctattgtttaatccaaacagctctttttggtaataactaataagtcatcatttagataaaataaaacatcattttcttagataattatggctggctcattggactcatgggtgcctattttcttgtttattttatttgtatttcagccttttggaaatctcgtgaatattgatctttcgctatctgaaaagctgaaagaatttccaaatctttcaaaggtcaccaatctcgatacgttggatctttatggttgcaaaagtttggtgacagttccctcctcaattcagagtctcagtaagctgacggaattgaacatgagaagatgcacaggtctcgaggctcttcctacggatgtgaacttggaatctcttcatactctagatctcagtgggtgctcaaagttgacaacttttcctaagatttcaagaaacattgaacgtctccttctggacgacactgcgattgaagaagttccttcgtggattgatgatttctttgagctcactacactcagtatgaaaggttgcaagaggttaagaaacatctctacaagcatttgtgaattgaaatgtattgaggtggcaaacttctctgactgtgaaagactcacagaatttgatgatgcaagtatggtaagaagaatcttacgcaccattgatgatctgatagcactgtacgaggaggcttcatttcttcatgcaatatttgtactgtgcagaaaactcgtatcaatatgtgcaatggtttttaaatatccccaagctctctcttacttcttcaacagtccagaggctgatctcattttcgctaactgctccagtttggatcgagatgcggagacactcatcctagaatcaaatcacgggtgcgcggtcttaccaggtggaaaagtgcctaactgtttcatgaatcaagcttgtggaagttccgtatctattcctttacatgagagctattattctgaagaatttcttggctttaaggcttgcattgtgcttgaaactccgcctgacctgaattttaaacaatcgtggatttgggtacgctgctatttcagagacaaatgtgtcgagcatagtgtccagttttcctgggactcgaataagatggatcacctgcttatgatcaactttcggctccctacaaaagaaataattggatgtccatctcaattggacaccgatgacttgatgttttttttttaccaccatatgtattatgcttgtaattcctacgtaaatccttctccatgctcagtccaaaggataaaaggatgtggtataaaattttgggatgtctctcccagagttctatctcaaagtgagcttgatacttacttctcctggccaggtaacttctaacattttacaactgtaattttatcctaattcataatggactagaacatgactaagattagaccaagactaaagtgataaatgactatcaatttcatagtttttcatgccaaccagtttcttcttcttcttgcagttaaaggtgaaggtgaagctgaaggtgaaagtgaaggtgaaagcgaagacgaacaagaagaagacgaagatgaagatgcatatttggagattgaggatgactcgagcttgtcgtcgtttgtaggtattgagaacatcttacagctctagttttctactgatttaggatcaacttgggattagaccatgaatatagactatagtctctaacggtgacaccttcatgattttcacaggtggaggagaatattggtgaatcttttctaaatacaaacaccttagttcggtgactctttgagtttgatggtgaactttgaggctataattggctcaggcaagagttcttctactggattcaataaaaaccatcatcttttggatttaatagcttagcttctctatttttggtctcaaaaactaaagtacaataacgtgtatatacttaataatgaaccacacttaccgtattattgatttcgatcgatcagttacattcacagatgaaacatgttgcggtagattaccatttcataaatcatacaggatcaagttcaaaacagcaagttactgaatccacatcgtactcgtcacacgttgcactcttagtgctttcggcagaccacacgagctacaagagccaggcagtccttttatccataaccaaaacaaatatgtgaagaatttttgtaccatctctatccaatactatcttaaaaaacaatgtgtaaacaaacaaacaaaaattatgttagcgttcgtctagaagattataaacaaaaattatgattataaagattctttcatctaaaagagtaactaatctaatagaactcttatgtttgctttaagttacattgtacgtaaaaaaagagagacctacaagtgtgtgtattgtgtaatgaatatactttagaaatccttaaatcaactaatccgtggtatgaataaatgatcttgtacgtatatataaatatatcttttgctcctagatcaagatgatggtgaactttgtctgccttcaaaatctctcctaataatctccagaaccatctcgttccatgtgtccactggccctggcatgcaccaatgcaaacagtcttgtggaggaggctgaccgtctggtccacgttttgtgatctttttcgggtcaggactcctgtatggaccaggatgaccgtcgtggcgatacccgaaagcctcagtgatatccattagcttcagcttcttcgatctattcccgagcttatcatccgcgacagcacggtgaaaccctgttgcttgcttctcgtgcattatctctgtgaacccgtttgtaactaaattcccaggaggaagcggctctactttacctgtgcatgatccaccagtgttccacgcaccgccttcataatgatcaggcgaccaagtacgtaagatggtcagacccgtgtagtttgggtgtttagccattgcctttatgattgtttctacagagatcccaaatgcttcgacgttgttaatcttttcgggttttgatttgtctggccaccataactggcctcccacaatctggtcatttaaaatatagacagactgttttgcaaaccagtgacctgatgaaagtacaaccacatcgaaattcggaagagcttcaattatgcgctcatcgggttggtcaagcttgagtttagttacaccatctgtagcaaaaccaaacggttcattgaactgatggaccagccaagatgaccacatccgagctatcatcaccgatgatgacctgaaataccatctctgcatcttcctgttcccacggttaaccggagtttctacctgaaaacaacaacatcattcaaaagtttaatcatacagacaaaacaaactcttggaaaaagaaagaagctctatatagtgacacaaagtataagaaaacacttgcctgccaaagaagacacatcatggactccatctgattacgagctactgaatcgcctataaaagctagtgtcttgcctctcattagctcaagaaatttcttagcatcaaaacgcggaagatcacactgagacggtttccatctccagttttcataccccttgtcaggtcttccattgccctgacagttttgcatctgtgtcaaaagaggacaagagttgtttgtatacaacggtcccatcggatcataaaaccagttaccatgatataaatcacattctgcaaaatggtcaaagcaaatcagaaaagcttcagtaagaaaagtgataaacacaatttcaaaaaaatcctgagagaagacatgaaggagacataattgtcaaaaggtagttatattttaccaaatcagataactattagtataaaggaggtacctaactatatagtccaaaggtcattaagattccagattaaggacttaagagttaaatgcatcattaattagtagcattggttttttgtctcagtgatccttcaagagtaattaagtcaaatcatcattaaatagctacttaacttactccacataaatttgcacactaatctacaacaattagagaaacttaagcaatcacttaacagtacctgtttctacatgatcttgtgtagcttcttcatcaatggaaacatttgaagacttccctgagtttgtttcttcacctaatctaacatcattcgaatcatgagatcccttgggaagcactttatcatcactatcttgtgtcaatactggtggtgactctgagctagaaacaggagatgggttacgatcaggatcatggatactatggtgaaactggacgttttgagtggtctctgttctgtagaaatagtcagtaacagaggaaccaatgggatacgtgaaaagaagcagagaagcgaagatgacgaaagaagttaatccaccaatagcaaatgcaattgaagaaacttttcgaggaaacaacaacacagtcgtctttgaatttgaaactcgtggagaagccaaagtcatgatttttctgcacaaaacctataaaaaaaaacagagcaatcattcattgatggattacatatctaactgggttccgctaaatcacaataaagtttcgatttttacaatttgtttactaatctctattaggtgaaaaaaggaatcaataagagaaaaacttacatttagaattgaaaacgagacaaggacgatcgaagaagcttttgctttggagaggaataaataaatcgacaagatctgggagtttgagagagaagcgtggaaggaagaacaatgttatgaattgttaaagtcaaacttattttagtcaaaaaaaaaaaaaactaaacaatttaggagttttttatttttcttcttttgaagttatttttgatttggttattgtgtatgatattataattcatataattattacggttatatttcataattagtttaatcgtgtatgttcaacttttttaattgaactagattattagttaaactaaatcgaattacgattggttagactgttagatttttattaaatcaaatttaacttgaaaataaatcaaaatcttcactcttcattttgattaaactaaacaaaaaataaactaaacaatttaggagttttttcttttttcttttttgaagttttttattgatttggtcattttgcatgatattataattattacggttatatttcataattagtttaatcgtgtatgtccaacttttttaattgaactagattattagttaaactaaaccgaactacatttggttagactattagatttttattatatcaaacttaacttgaaaataaatcaaaatcctcactctcgattaacaataaacgttttccctttcttccccttcttgcgcttgttcttttcaagcttcttctccttcatcaacttttcaataaactcatcgttctttttctcaaactctctcagaagtttcttaagttgctgcttgtcgtttgccagtttccttaaatctgcagtagttagtttgattttacttccaaacttgattcacagagaaataagcttccttatgtcattctccacgtcatcctcctcctcctctttcttcttgtccttcttcttctccttgagatcccagataatgccaacttcttcttcaaggatttttgtatcaaagtagtcattttcgttaccaggtgcagaaacagtccacttggagtagttgataaggtcacgttcaaggttaaagtgatgaatggcatatgtgtatgcaacagacacagatccatccttttcccatgagacatgagcctcttctttctccttctccacaagaaccttttcaactccctcttctttcccttgagcttcaagtccctctttcctctcctgaaccacacgttgaactcctttggccactaaaggatgccaaaaatcctcgaaaaggaatcgaggctttggagcctaagagagtatctctttgtgaatagttttaacaagcacagtgtaaaaattttcttccttgacattttttcttctggtaatgagaaataagataaaaatttggagaaaaagaggatgaagcagaagaagaagtatgtaaaaagagtagttataggtggttaaacttaaagctatcattgttgtcgtcttgtatgggggaggaacactcaaaatcgtttcacagagacttgcaggaggtttcttattttatgaggacaagaggtgagaagtagaggaagcccaaagttggttattttccttttcaagatttttcaacaattaataagaaatattatatgaacgtatctttaaatcaattaattattagcatttgttttcataaaccttataaggcatccccttgttctccaaaacaattactgtcatcctctttctaagtgaaaattatatttttttttatcgtctctaagttgtttaaggggttaaaatactaattacaaaaacacaatctaaaacataaataataaatacgtttatctcttacatatttttgctgagatttttttattagaagtataaagatttttggggaaatttgatactaaggatcttttttagaactaaaaaggaaaacaaaaatattttacaaaatgatatatttcgatatataaagttttaatgcagtaatgaaactcaaaatgattgataacactttctaatacttttatgttgcaaaaacaaaatcatggtgcaaaatccactacttttatgttgtagtatatttctagaagaaatttggtttcatggtatatattgggtattaaataaagattggactatcttccctttggctttggtgtgtcatagatagtgataagaaatacctctttttttgggcattatttgttgacaaacgatatagaaaattataaacaaaataaagatcattggaaaaacatcatttgaccaaagatgtgtatatgtgtcccaatcagaaagttcataacaagttcctctcttctcttctcaattcttatgcatccacatcatcattgatttaatgcttttaaaaacagaacattacatttatttttttaaaaatgtattactttttggacaatacaagtttgatacatataacggatttcgcaaaatatttcatgttctttttgcaaacaaataatccccaaaaaaaactaaaggaaaagaaattcgtaaagaccaaactcgtaataaagagtatatactgtttccccttaaaaaaaaaaaccaacctaaaattaaaacccgtgggtttaaggatttgatcttttaatgttcacaaaatcgagaccctaaattgctctcacactcacttcccaatcttcttagttcaatttcaatttttagaattagaatctctgaatcccagattccggtagagaagatgagtttcgcggcctataagatgatgcattggcctaccggcgtcgagaactgtgcttccggctatatcacccactctctctccgattcaacgctacagattccgattgtttccgttcatgatgatattgaagctgagtggcctaatcctaaacgaggtattggtcctttgcccaacgtcgttataaccgccgcaaatatccttgaggtgtacatcgttagggctcaagaggaagggaatactcaggagctgaggaatccgaagcttgctaagcgtggtggagttatggatggtgtctatggtgtttctctcgagctcgtgtgccattataggtacgtgtttgttgacaattacctcctaaattactccaattttggtactttgactttgaagtgacgatgtgattggtattggattgtaggttgcacggtaatgttgagtcaattgcggttcttcctatgggaggtggtaattcttctaagggaagagattcgattatattgacatttcgcgacgccaaaatttcagttcttgagtttgatgattcaattcacagccttaggatgacgtaagagtgttttgcttttgttggttttggtaaataaataaatgaattcagctttagtttcagctctgtctcctctcaattgtttcttttgacctatatacgagatgttctgtgtccaactattgttttaactgttttatacttctcaaagttttggtctttacttacgcattgttattgtttctagcgatgcaagttacgtagtattggatcatatactgaagcgttctattgtctatgtctgattgtttcttctagttatctaatttatgtaccattgactcctatacatgacttcaacaaataataatggatatgtggttccttttcagttcgatgcattgttttgagggtccagattggcttcatctgaaaagaggaagagagtcttttccaagaggccctttggtaaaagtggatcctcaaggcagatgtggcggcgttcttgtttatggtttgcagatgatcatactcaagacttcccaggtttttgttttggcattattaatcaacttcatcttaactgtcgctttatctgctacaaatttccaaccttcattcttttcttttatgaactttattttgggttttaggttggttctggactagttggagatgatgatgcgttcagttctggagggacagtttctgctcgagttgaatcatcttacataattaacttgcgtgatctggaaatgaaacacgtcaaagattttgtttttctacatggtaggtttagcaagcaaggtttcttcataaacttatctctgaatcagtagttaatcataaatatattatgatgattgtttcttagctgctcaacttgcatcgaatcttgtgtccttgaatggatctagcttactaagttgttgtttgtagattcaatacgacaactgatgtattctggtcatgattacagtttgaaacaagaggaaatgtattgtttctttgatttttcaataactagctgtctgaaattttagatattctagttttcccagtaggcataaagaataaactaagtggtgcttcttttgattatgtgtttttgcatcctgtgtcttcttcaggttatattgagcctgtaattgtcatccttcaggaagaagagcatacttgggctgggcgagtttcatggaagcaccatacttgcgtgctttctgcccttagtatcaattcgacattaaaacaacacccagtcatctggtcagctattgtatgttcgtattttcctctttgtatcttataatagatctcttcccaagaaattaaatatttgagttgcactattaactatattgtaagctaagggtagaaattgaagtcatctaaaaggttattgaatatccactgttgttacatgactagactttccaatcagctatgacgatgctctattttttgtttagaatgctcaaagagttgatctttctttaggaaaaatttcctaaaataacaagctatttcatgactgaaatagttacttcggcaaacgttagtccctgatcatacttattcccattcttttggtattttccagaatctgccccatgatgcctacaaactacttgcagtaccatctccgatcggaggtgttcttgtgttgtgtgcaaatacaatccattatcatagtcaggtagttttatattacttagcttttggttgtttcttgtttaaaattcaacaattccagccactccacctcaaagttctacagttactcacacatctggataccatatatatttgtagtcagcctcctgtgctctggcactgaacaattatgcctcctcagctgatagcaggtacagttttctcgcacctccccactcttcaaaacctgcttcatgcttatggatataatcttgttacctcagtcttagtttagaatcctaaagctt

SEQ ID NO: 878 - DNA, 13379 bp, Arabidopsis thaliana
agaatcaactttcaacatttgtaaaactctgtttatactgttaaccacatttctatctctgtgtgcgtctgatttctttcagtcaagaactgcctgcatcaaatttcagtgtggagcttgatgctgcccatggaacctggatatcgaacgatgtggccctattgtcgacaaaatctggggaattgttgctgctgactcttatatatgatgggcggtagtattttgatcttctttaaaaaaaaatcttctgacgcttgtaaagctggctgcaacttattttgtttaaaatatgtgaaactgactgctactttcttttttgaagtgctgtacagagacttgatctttccaaatcaaaagcctctgtgcttgcttcggttagtcaatatgttctttcagcatatttgtacttcaatttggatcctgttcgattagagattccctatgatgatataccaaatttcttgcaggacattactagtgttggaaattcccttttctttttaggtagccggttgggagacagtttactggtgcaattttcctgtagatctgggcctgcagcatcattacctggcttgagagatgaggtgatagtttaatctttcttaggctggtcagagtaacttctttttaaaattgttaatccagaacttgaaaatttcctaaatttatgcaggatgaagacattgaaggtgagggtcatcaagcaaaacgtttgaggatgacttctgatactttccaagatacaattggaaatgaggagctttcattgtttggttcaactccaaataactctgattcagcacaggtaacaagttctgtcttggttagagtttcgtagaattttctgttgaggttcaatcttggaaaaattagatggctctactatatgaattggggttccgttgcagaacattctccatcttcctatctatgtgtgctttcaattgcaaacattcagtctaaaaaaattaatgttgaacggaaaatgacttcattagtttaactaccgaagaaagacttttcctttgtgcaacatgtattgtatcaataagagttaggtagcttatgttctcctttccatgaagtttctcatattttcttttccaataaatgcagaaatcgttttcatttgcagtgagagattcactagttaatgttggcccagtgaaagattttgcgtatggcttaaggattaatgctgatgcaaacgccactggggtttccaaacagagcaactatgaattggtgagccgtttgggtagaagttcttatattatactagccatggaactgttttatacaaaatataacttgcttagggttgttatttagtaatgtctagttttgaagtattcttttacgtaacaatgaaatcctttgttccacaactttatttgttgacatgcttgcctcatatttgtctaaaaactgtagcccccaaactaaaaatctgaattttggcgtttaggtgtgctgttctggtcatgggaagaatggtgctttatgtgttcttcggcagtcaattagaccggaaatgattactgaggtatgcgtatatctcaaattgtgtctggtatatgagaagattgggaatcgtccatttgttgatcttttagtttaaaacccttactcccattactatggcatggagaggatttcatttaaaattcattagtttgtagtgagctctgaacagaaggcattgttacgacactctcgcgggtttatatctttcacaattactatccaccactggggtatttatctgtttagtattgatatagacagaaaagtggaaattgttatgtgaaaagtacaagttagaacttagagggggagctcactgtagaaaaatggggatgtatccgatctttcctagtaatgctctgtatgtgacctagtctctttaatccttaagcacctctattccggatgttcttgtgggtaggttgaacttccagggtgcaaaggaatatggacagtttatcacaagagctcccgtggtcataatgctgattcttctaaaatggctgctgatgaagatgaatatcatgcctatttgattatcagtttggaggctcgcacaatggtatattttgcttctgtgtgttggttgtttttcattagatccttttattatccatagaaatacctacaatgtttgccttttcaggtacttgaaactgctgaccttctcacagaagtcactgagagtgttgactattatgttcagggaagaacaattgctgctggaaatctatttggaaggtaattagctgccatattatgtcttttgagatatgcttttcatagaagtatttttttcctttacacccatctatcttattataatccccatgtaagctctatccatggcttcttttcagtcattgagctgtttctactacatgcagctgtaagatataccaatattgtgtaatattaacttccatctttctttttcaggcgtcgggtaatccaggtgtttgagcatggtgcccgtattctggatggttcttttatgaatcaagaattaagctttggagcctctaattcagaatccaattccggttctgaaagttccactgtgtcatctgtttcaatcgctgatccatatgttttacttagaatgacagatgacagtattcgtctgcttgttggaggtatgttatggaaagatgaacatcttattgcaatagttgatcgttgtaatctattatgaacttgagcatcttgaaatgttttactcaatctactatgaactttgaattgcagatccttccacttgcacagtttccataagtagcccatctgtacttgaaggctctaaaagaaagatatcagcctgtactttgtaccatgataaaggaccagaaccatggctaaggaaagctagcactgatgcgtggctttcgtcaggagttggagaggctgttgatagtgttgatggtggacctcaagatcagggtgacatatactgtgtggtctgttacgaaagtggtgcccttgagatatttgatgtgcctagtttcaattgtgttttctctgttgataaatttgcctctggaagacgccacctctctgatatgcctattcatgagctagagtatgaactcaacaaaaattccgaggataatacttcgtcaaaagagataaagaatacaagggttgttgagttagctatgcaaagatggtctgggcatcatacacgcccatttctctttgcagtattggctgatgggacaattctttgttaccatgcttacctatttgatggtgttgatagtaccaaagcagagaatagtttatcttcagaaaatcctgctgctttaaattcctctggtagttctaagcttaggaatctgaaatttctacgtatccccttggacacgtctacgagagaggggacttcagatggagttgcatctcaaagaattaccatgttcaagaatattagtggccaccagggattttttctttctggctcaaggccggggtggtgtatgttgttcagagagcgactacgatttcattcacaggtatgatattctctcgtagagatgattttgtgttcttgtgttttaaagaactgaagcactgattagtatgaattcaatctgttaaaatttttggtttttctgaatcaatttcgttcatttcatgctatcacttttcagctgtgcgacggatcaattgcggcctttactgttcttcacaatgtgaattgcaatcacgggttcatatatgtcacagcacaggtttaataatttttctacacgtcatttctgttgttgcttttgctattcttattattgtagcatcttgactatcaatttcgttgacaagatggttcatattcatttatatcagggagttttgaagatttgccaattaccttcagcatcaatctatgataattattggccagtgcagaaggtaaattccagtttttttaatcatctttgcttactgttgattagatggaaaataataagtgtacaaggactgatcacgttgatacctatatttttgtctagattcctctaaaggccacacctcaccaagttacttactacgcggagaagaacttgtacccgctgatagtatcatatccggtgagtgcattagcatgataatatactctaaattggtctacctgatccgaattgcatctctttggttgccttcaataaatttggaactcttttgtggttgagatggcaactgtgttgccccagctccccgttttcctttttagctatcgtgatttttatccttaattcatattatcaaatttaccctttgcaaatttattcaactggatgcctctctgaatttctttcatgaatatcacagattcctgattttgttttttttggctgcagcaatattaatagatcatacttgtttgttttgtttcatagataaacacctaaactaatgcaatgtttgcatgcttatttagccattttctttttgttgagaagaaagaaagttttgtgccagttatgtaatacctgtctatatatttgatccgcatcatttgatatttgattattctatcttactaacacaagcaatgtcatttctttctccttttgaaggtcagcaagccgttaaatcaagttctttcttcactagttgatcaagaagctggccagcagcttgacaaccacaatatgagctcagatgatctccaacggacatacaccgtagaggaatttgaaattcaaattttggaaccagaaagatctggtggcccctgggaaactaaagccaaaatcccaatgcagacctcagaacatgcactgactgtgcgagttgtcacgcttctggtaagttagctactaacccgcctaatgtcatatttggatcagatctctctgttttaattgcaataaccaagccacattctcttactccctggggtgtttcagaatgcaagcacaggggagaatgaaacacttcttgctgttgggactgcgtatgtccaaggggaggatgttgctgcaaggggccgtgtgcttcttttctcttttggaaaaaatggcgacaattctcaaaacgtggtatgtttaattgggttctacaacctggggaatctttttctttcttttcattttcaccttggatgttcgatttattgtgaagccacttttctataggttactgaagtctactcaagggagctaaaaggtgctatatcagctgtagcctccattcagggtcatcttctaatatcatctggtcctaaaatcatcttgcacaaatggaatggcaccgaattaaatggtgttgccttctttgatgctccgccgctctatgtagtcagcatgaatgttgtacgttttacttccttggccagattgcctagtgctgtgttggttttatgagctaactttactaaactgacctgtcttggctctgaggacagttttcttttacgtgatctggctttgtaaattcttctttacttgcaggttaagagtttcatccttcttggtgatgttcacaaaagcatatactttcttagctggaaggaacaagggtcccaacttagcttactagccaaagattttgaatcccttgattgttttgctacagagttcttgattgatggaagtacgcttagcctggctgtctccgatgaacaaaagaatatccaggttagcatcctcttatcgcctttagtgtgtacttgatggggtcaggccttacttatatgtaccgatccccaacagatattatattatattcccaaaaaggatgtcgaagttagcaacttagcacttctcttatcgcatatagtgtttacgtggtgagatcaggccttacttatacagttatatgtagaagatggattattgtgaaaatacctcaactcttaaattgacttggtactgatccccaacaggtattttattatgcaccaaagatgattgagagctggaagggtctgaaacttctttcaagggcggaatttcacgttggtgcccatgtgtcaaagttcctacgtctgcagatggtttcttctggagcagataaaataaatcgatttgctttgttatttggtactctagacggcagttttggttgcattgctccactggatgaggtcacattccggaggttacagtctctccagaaaaagctagtggatgctgttcctcatgttgcgggtctgaacccactcgctttccgtcaatttcgctcaagtgggaaggctcgacgatctgggcctgacagcatagttgactgcgagttactatgccagtaagttttcttccgcattctatatgttcaaacggtagtaacagacatatgacaaaatggacctcaaagtagagagagcacataggataataaactcgaaaatcacacgatagaaggatcatagatgcatatcctcatggttttgaaaacattttgcagttacgagatgcttccattggaggaacagcttgaacttgctcaccagattgggacaacccgatattcgattctcaaggatttagttgatctctctgtcggaaccagcttcttgtgaaagatcaaagaaaaaggcagatcgtaatgcgttgttcacccgccgacaaaaataggcagagtcgcttaatatgttgtaaaaaatgctgtaacagtagacaatcgtatgaactttgatgtttagtggcatttagattatgttaagattcttctccactctctatttgtttcatgtctacattgaatctgaatcctcataaaatttggacagttaatgtcaacttttgtttaatttttgagtattttttaatctatcatatgttaatttctaattgcaaattgggtttagagaaattgtgagaaaatgagattacaaaatgtggtaaaaagcagaagggcaggcttgataagatggtgataatggtgtccatgacacaaagagcatacacgtgcacatactcaccactccacacacaaaatagataaaccaaatggtacaaaaaagtaaattagaaaagtcttaagttcaaataacaaaacacaatcatagtaacatgttgtctctttccaccaccaatcttgttttcactttcgaatgtctaccaaagtaacatcattttacttacaacttttttctgttctttttgctcctttctctcttttcgaatctattccgttattgaaatttgatttgggaaattatggatcgattatgaaaacccacttctccggtgggaatttgtaaacttgtcacgttactacgcacccaaaaaatggtacattctcctttattcacatcctattatcagatattctttaaacggcctataattgaacatttgctgatccttttaaggggttattaactaacagtcgttgatttagatataccatttacacacaaaaaaagatcacataaaattagcaaactagaaaaagttgaggaagaagaatgaaagaagaaatgattggagtcagaaggagaatgttggtgatatgcttagcagcgtgactgcgtctgtactgttgcaagtcagcgatttctccttttgcctccttcctttctctttagatcactttctgattggattgaatctatttttccttcttttacgttttttcacttcttattttttcatacattttcttttctcataatgacatcaacaaaaaataaattcttgttttttaaaataataacatattagttagatgaaaaaatgggttataaccaaatggataaacaaccctcaattgaatacagtaaagtaaaaatggttgactaaaagagtcgatagtatttgtcgattaattgtttactttaacctagctagtaattattggtgaatctaaagtagtgctaattaatttacatcctaaaattcttccattaattttgtttaccttacttatgtcagttatgtgtcatgccgtcatggcaatcatctctaaattaaatctcacgattatttgtgatattgctctagaacatctttatagtcatgtcttgtagttttttttccccattctattctatggacgaaatataaatataactttcgtaatgcaatattttacgacatatgattgaacaaatttatagtttactagtttctattagaaaacgttgtgttgcatgcattagttaaataattggtaaatgttactagcattgctagaatcattcacattttatgcatgtaaagactaaaaagatgttctagagcaatatcacaaatattagaaaagactattaaaactttgtgaaatcgatgagcatagtggactcatttgtaaaatctaagtttatttggtccatattatatatcgtatacaaaatttgcggcgtgtgaagactgttttggatgaaacacgttttaagacatcaattgttttttttttcttctaaaatttcacttatatctacaaaaataaatgtataggacagacagacaaaattacttgagatgataaaagaagattaaggcttcagtaatcgtgaatcgggtcaaagctaacaaaaatgccaccatttagggatgcgtcctcaaatctcataacccaatcactcccacgaagcttccttctcattcaacatttcaactccgcaaattccaagtatgaaagtattcaattaaccatttatgagtacatttgtaaagattttaattaagcaagtgggatatctaaagatatgcaaatacacacatattaatgtaatgtgtaatgtgtgtaccatacgggggttttcatgctaatttgacgggatgtccctttctccaatcactacaaatcccggtgcatcagctggattaatcctattttatttgatttttgttaaaaaataattagttcatgtaaatattactataaaaaaaagtcccgaacaattaatgtttattgatggaatatatatcaccaactgttatatactgacgttttttctattgtcagtaaataacataacccacacaattaatattagtgatttatctgtccatcggtatcacttgtagtataagactgatgaactgactaacatctgatggaatttttttagtggttcttaattatgtagcaagatatgatgcatgcatcgtggtttcaaagtgttaactttatataatggatttatgaaatgaaatagacataattgttgattgaggccaattattaaaatatgaacatgcatgcatctatatctatcgtttgtccgcaaatgcatgttacgcaaatttagataaatcttcacagcatatccatgagaaatataaaaaaatgttactttttttttaacgtctagtaaaaaaaagtaatcatctttaacatatttcaatttatatgacgaagctgaaatcagcattagaaagaagaaaaacgtgaagttgaacaacaacaaaaaagaacacatgttgatttgtcacttagaaaacaaatcgaagttagagattaatctagaaagtaatcagaagaaatttcaaaaacttgacattctttaggagaaggaatggatctagctgaatctttactacaagagtcaaaaatttattgatatataatacagttatacacttgactaagcttataaggtttagaattttattattttcttattttggtaatctatgtaacgtttgtgatttttgaacaaaacaggtcatgaaaagcacatataagtttttacgaggcaatattacaccaaagtttatcacaaataattagtttgttaaatggtactaataagatttaattctttgttgtttaatgaactgaagtgttctaacttaagatccctatattttccatttgaaatttcgctccaccaataatcgaattaaggaaaacgtaaaaagcgattagtttattcgtcgattatgattaaacgaacaagttccaaaaatgcatatttagaatttctagtctattatggctttgggctataaccttacggaaattatcaatgtaagtttcgtcgaaataaaaatttcacttctctatatatcgtaaatacataaatctccaaacacatgtcttggatttttttaataatgtatatatatatatatagagaaaaaaacacttagaagatttttttgaattttataaagagaaatatatattaagaataagagagaggaaggcatgtaggcatgggattgtgcctcttcattgaacgacaatacttctcatcctcacaaatggttgccttaccattggttggcattcgcatgcatcctccaacttattttaattattattgtcgttaatatattaaactacatagaatcttcattatgtttatcgtaatgccttcgttacgcctttatttgctccccatgtgtttactcttacctcattttcgaactccaaacttagttccatagttttggaagattggtgtaaatggtcaaacgtttttagaatatatatgatcatagttacgtcaagatcttcaagaaacaaatctggtatacaaaaaaaattggtcacaaaatcacaatcaagaaaatgtatgtgttacattttatggatagtgaagaataataaaatagtaataagaattgctgaagaggactctctagttgacatacacatcttacattcattccaaccatttaaataatgtaaacgaataacaaaacgcattatttcaataaataatattattctgatactaaaatttaaaaatctaaagtgtaatgatgaataaaacaccccacgagccattcacacatctcaactttttattctcctagaagaaactatagattatatctctcattatctcactatcttctccatatacttgttcaattcaatcattcctttgctttgctcctaaaccacaacaaatggctctcgaaacttttctaataaaactcaaaaacgctatttcctccaaaccaacttctcgtcgaccacaccgatcatctcctccgatatcaaccaccacttcctccgtcggagtattatcgttcgaagtagcacgtgtcatgaccaaactcctacatctcactcactctctcaccgattccaatctcctcactcctcgagaccactctctttccttagaaggtctaaccaaaatcgtcaacggcgacgaaacattccacctcagcctcgtttgtgctgagctcgcagatagtctcgcccacgcagctaactctgtttcaagactgagcaaccgctgcaccacggccagcctccgttctttccaccgcttattccatgaatttgccgacatgggtcgtgaccctcatggatgggtcatgaactgtaaagacacagaagctaaaaacaagaaaatcgaaaggtaaaccaaatttctctatatttaacacacaaaaaacagagtaaaaacagagcaagaaaacagagtacaacacagagattgattttgttttttctttggttaatggaaacagatacgtgagcgtgacgacagctttgtatagagagatggaagaaatggcgatattagagaactctctacgaaaacaaagtttacagattgggatcgaattcgaagaagaagaagactacgagaacaagaaagatgttatgaaagtgatagatctacagaacaagattgagagacagaaacaacatgtcaagtatctaaaagacagatctctctggaacaaaagcttcgacactgtcgtgttgattctcgccagatcggtattcacagcactcgctagactcaaatccgtcttctcctccgccgcagccactgggtacatggttccgaccgtcgtgtcttctctccctcgttctctctcttcttcttcttcctctatgaatcttgttcaccctagcccaaacgacgaagagagagacaagacgacgacgtcttctgcgtttcttgaagaaagctcaagactattgaaaccaccggagacaactctcggcggagctggcgtggcgcttcactacgcgaatctgatagtagtaatggagaagatgataaagcaacctcagcttgtaggtcttgacgcgagagacgatctgtattcaatgttaccggcaagtgtgagatcgtcacttaggtcaaggctaaaaggagttggtttcacggcgacggacggtggtttagcgacggagtggaaggcggctttaggtcggatcttacggtggttgttaccattggcgcagaatatgattaggtggcagagtgagagaagctttgagcagcaacacatggcgacggcaacgaatagtcagaacagagtgatgttagttcaaacactagtgtttgcagataaagttaagacagaagcagccataacagagcttcttgttgggttgaattacatctggagattcgaaagagagatgactgcgaaagctctgtttaatctacagtgtcctcctactaattacagctaattttgtgtagagttttttgtcttcttctttttttttttgtttgatgggttaatgttgatttcttgtttttttttggtttagtttgataatacgaattatgaaagtgatttgggtggggtatgatgtgatgtgtaacaatgtagatattggaatgaatttgagtgattgttttctttctatttagaatgtaattgacgaagaatgaatacatgctagtgatttgtattaagtttagactcaaaaagtcaaaagtatgtgtatgcgtaatcaaatctttgaacaatcttttgtttttttacagcgtttctcacatatcttatttacatttgtcataacaaaactaattaacaatacgtttatgtttaattaaactgattttattttatttcttcaccgttttctcttgattctttttcttttgttgaagtcttgatttttttttatttttttttcgtattgttgaagacttgattttttctctttttttttttccgatttaagttgggaaaaattaactttgttctgtaaaacaaaatagtaaaatcgtatgcaaaaattgtctctaggtcctaggatgctagaaccataaatgggagtatttactatttagtggttaagggttatacttatagatggatctcataggtaaagttgtttgctttactgactcctttagttggaaggagccgaaattagaaaagaatagtttcagaaaaagttctacatatgaatattgatgatatgaatcgagagaataaaattagatgtcgaatatatcaagtgcacctataatgctttaaaattcgttttgactttacaaagaaaagtactaatcaatagttagacttggatgggtccagctcatgctagagatcaagagtcaactaaccaaagttttgtgtttgcataattctttgatggattaggtttagggaaattgagctgtttagccattaaaaatattgataatgatgtgaaatgatttttcaaatcatgttact

SEQ ID NO: 879 - DNA, 86212 bp, Arabidopsis thaliana
gatctctcttctttaaaaattaggagagggaactcaaggacgagagagtcaggctttctctaaaggtatgtaccatatggtccagtttctatacccatatgtgtgttatatagtcataaatgcgtacaaatggaactaaacattgtaacttgaacccatttcattaaaaaaatagtttaacctatgtatggaggaacttggaatatggcggattatgcttcaaccaaaatgtcttgttttgtggttatatacttttttttttttttttgtggttatataattaagtggttatatacttaattatgattgttttatgtttccctaattatttatgcaaattaagaaaacaatttatactcacttatgccaggttggagaaagaccaatggggatgccgtcgggaagcaaagagaaagaggatgttgaaactgatctatttattggatttctgaagaaccgaccataaaatcgtccttggtcattaaacgtcatttctagctatctatctcaattaatgttatgtatatgagtaatagtgtttcaaaatttcaatcacttgtcttttcgtataaactcagaataatgtaatgtgtaagagttctaactatgcttttgtttgtggatgtaatgtaatgtaaactcttaagtttctgttttctattcttcattaagtaaaatcgatttttatttattctactatattcaaaacttgttctttttctgcggttttttaatccatcttctttttttttggttttgaggaaaatgtttttatacaaataacacaaatgtgggaattacagaaataatacaaatggcccaataaagaaactattctaatagtacataatgattcaactttccgtccgacgtcgttttgtttgatctcttgttaagacttaattcggacaaagtttctcgcacaagcgcgtctatgatctcccgctcaatctctacgatgatctcttctccttcctcttcaagcttcttcttcttctctagaagacgtttcacgtctactaaagcaatctcttcaggaactggataacacttagtactatatctcgctacagcggaacagagctcgctgattagctccgatccctgatagtttccgcgtcgtttcgccacggtttcaatcagaatctcgttcactagatcgaacaatagcctacgattgcatcctagagccaatgttcctgatggataatctccaaaatgctctagtttgcggaaaatcgaaagatcgagcattgcttgtgagtcactcttgattcccgcaagattcattattcttatgatatagtcttgttcagaattgatttcagtggctgcatcgtcgaatttgtgattcctcgctacttgtggactattcttctcggttttgtgcatcgaactagagcgtatcgatgctgcttcattcgatattagtcgctctctttcgttaatcttgaaaaaaccacgaaaagggatttatcaaaggttgaaaatttagtgtgtgtgagagttagagagaaacttgaaatagattgtacctgttgatgaggaggtcttgtggcagagatgttttcaagatcatttgactttggtatcttcttaaacttcttgatcttgtgtaaaggcttggctttcacgtctctagaatcagacaagaaagtctctcgcttcctgtttcgaatatctgatgttggagaaggctttatgggacgtcttgtttcagtctctgccttcttgcacaggttgatgggttttagttgcctttgttttactctgttctggctctgtttctctccaagaatcactggtgttggctttggcttctgaatgatcggttctggtctggaagaagatgatgaattaggtttatgactggtgctttgtttgttctctttctctgaaaacctagttcttggtgaacaagaaactgttgtgtctcttctaagctcgtgtgatggtcttgcttctctgtttttcaccgagtttgttatatccataccgacgactcttcttgtgacgactctctctttgatttgtttaactatctgcctcgcgtaatctcttggactgtgactctcctcttggtcttctttcagccttgaacgcccaaactctttttctctgttcagctgaagagagaggcgatgaatgtcgaaatcagatttccgagcagaggagattctagggctaaccggtaaagatcgtgtgcctttcttggaaagtctatggcttgtgatatgatgacttgacatggtatgaagatctgacagtgaatggttaaggtcagttttatcaggaagaagatcaagacccattagtctagccaccaagtttggtgttttgcttcctggtgagttacagatttcagatgaagaagtggaactatcagtcacaagagctctgagtcttgaactctttgtccctgtatctgttttcactctcatgcctacctacaatttcaagatcattatcagaaaattacctcaaccaataaaatcagacaaattagtaatccattttaagtttttttacttactggaatgttcgaaatttctttgtctttgtaggttgttgatggtagagactcttccatcaacttcaagcctgcaaatttcacaatgacaacaagaacaacaacacttacgtatttctcaaaaaccaacacaaatatatgcttatgaaattcaacttaagctttgtgagaagaaagagtatataccttttgaccttgaaggagaatcaatggtgagatgatgatgagaatcaaataagtggtaaaaagcagccatgcatccatttgctgttttctttgaccttgaggaagagaaggctccaccgcggccaccaccttcactgccatggccgtcatcgaacatgccgcagtctcttcccattttgagtaagaaaaagtcttacaactttttttgttaagcttaaacgttgtacagtaaatatgggactgacaggaaaaaattgtaagaagaatggtggatggatcaaaaacccaagcaagtggctaagttgaatctaaacttgggttactttttgtgtctgtttttggttcttgagttttaaattaccagacaagagatgttggaagcagctatcttctctgcaattctctcttctctctcttacattgggaatcgaacatgaggatggtgaagaatatttaatgtgacagaaaatgtgttgcaaagaagaagataataattacgaaattttatgaaactgtaaaatagttagtaagtaggagttattagataacgatggccacacatctctctctatgaagtagacagcttgagtgtttttacaatatcatttcaagaccattcacacttcatgtctctctctcctttttctacttaattttgtgtgttcaagtttaaaaaataaaattaaaaaacttgtttttttctttctttttttggggattttcaaactcgtgaaccattttgtttagcttacgtaacagaatattctcaatatatgcaagcagtttgtttcatggtaccgagatggttagttaggttaatgtacaatacatcaccacaattttcaactattgtgtagaccttcgatgtctttgtattttctaggatttatgtcttttgaggttttttgggctggtccttttgttttctttggggcacaattttttttacacgtatcttttttttactatattgtatatttgtatgtattgaaaaggataaaagaacaatatcttttgcatgacattatgatgtaattctattctattgtattaatgacgagttttgagaccgttgacaataattaaagttgtgtctatatcgcttttaagttttaagtaaagtttgaattctctttccacgcaaaaagaaatcgcattatgttactaaaatttgttcaagcttatcttacactttctattaggattggaagttgaacttttctttatgcatataaagttttgttttattttatagtcgttttacacaaagtcacatgttttctagatcatttgtttcttacacacttaatactccattatccaagtttgtattttacacattttcaagtagagcagccccacaatgcctctactttaagagagtctatgttttaatgatatattttggtataaaaaaatggagatcagtttcatttttgtaattactaaattgtagtaggaaaagaaaaattgtcgagaagtttggttcaaaataaaaattgaactgtggaaagcatgtttcttagtatattataatatactcttaaagtagaatcatatctaagactttatttttattttagaatgtataaaatgtttgaaacggtccaacgtaaccatcgtagtagttacaaggacatgacaaatagtgtttttggtggttgatttaatttgtgcaaaggaaaacacaaattcaaatgtcagattcagtttgtggaacgaccaaagtatgtgcatgggacgtttcacatgatagattcttgtacatgtagaagaaaagtataaaaattacctatcaacagttgtgcaaatccataatatttagtttttatctatactatttgatagactgtttacatcaataaaaacatgtttctttaatttaaattttaagcaaatcaaaacattcttatataatagtcatacagtcattcaaagttttattttatattctgtctaattcatattcgatttgcatacatactgagacatgtgatgtgaaaataataatacattgggtgattatttagatgatataatattttatttcaaaccttgaacatattgtcaatcatatttagttgcagatttttagagacaacaacatacacggccttggagtcccataggttgacacaaagcagctctagaaggtggtttcaatccacacctttcgtaacaatctgacctcctttgacatggtcctttgaatacacaatcgcttgaatcatccataatccctgttaaatcaatcaaattataaatatattagttacatataattgttatgctttttgggtgattatattataaacactgatgatacctatatatactggaaaatatgcaatttttaggataaggaaaaaaaaacttacgagtagattgaacattaacaatgagaaaaatgatcaagagaagagcaacaaaatgagacttcgaagacatcatcttttgatataagttcctacaatataaattactatgaaaattttggtaaatccacttagaataaaacgagaattgttggttcttttgtagatgaatgtaataaggctctaataccatacagagaatgaagaacaagatattacagggtgattaatgagtatatataactgtacataaatagatccttgacacaagcaatcatgcatattaagatatccttcatagttaataccatctatattttgcatcaaatttaatataccataacattttatttgatttaagattttgtttactcatataaataaatagagttaatttcaaatctcattagcattttcaaatctcttatacatggtaatatattaagaatctttttgctttgttttcttaaactattataaatttttcatatttattaatttaaatttatatgtaataactatacataagataaacaatgtgaattaagtacaatattattattttttgaccatacaaaattacaaaactataaataggtctaacatatagttaaacacaacaattttttctttctgaaatctaaaatttatatatcaacattttgaagtggaatgagcgctatttaagatgttatataagactgaatttaaaagcattttagtaattatttttttgtttatcttcatcgcctgttacatcactattagagtaatgaatctatcatattacaaatgatgatcttatcattcatgattagtgattgtgttttaataaattcggcctaaaaatgatttgcctcatcaaatcgacgacaaattctcacctagttattgtaacaccatatgtatgtcccagctgttaacgaaattgcaacatcactaaaacatcaatatttaccataatctagggtaagtaggtactaaaaatagatgaaacgtaagggccctatgttaataaattaggattttttttgaggatcaatcaaatctatcgacctcaagaaaagatcgaaacatcaagaggtttttgaaagcgatagtgatagaagctgcttaaattcaaaaattagaaagaaaaaaaaacaatcccacttggaagagaaagggatatgtgtatcagagtccttctcatagtgaagtcattacacaaccacagtggaaatcgagttattgggaccacattttacctaaataattcattgtttcattatataacataaagttttggaggatcgtggggcaaagcatgatttgtcttgttgcttataaacaacagtgtcccaatagtagaatggttgttttataggcaagtcagtgtttagagtattgtcgacggcaaatcaagataaaagtttcattactgtactgcagggttttcacgacattttggtcctactaatcccgccatattcgcgttttcgataacttttgaatatctattataccaattccttatgtttatgtttcgcagtattatcatgagacatcattattgttatgagtttttgtatcgtggcaagtatttaattgatgggatgcatatttggaaccatatgattcattactcgtcagaaaagaaaatggtgtattatgagggaacgcaatcatatgtttaattcaatgcgtttatttttgaaacaaagtagaagtaagttttttgttttatgggatttttcaaattgatgaatgtatataagtaaagacaaaaaacaaagatattaaacagaatgcaatggaatcaaaagggtagttagaggaagatcagacattataaatgtaaccattactgccacatgaaatgaagcacgagtaggaaattaaaggcgaaaatgacacttttgatgtttaactataagaaaaaaaaacttgttaatactacaaatttgaagacttccaaaaacttcaggatatacggtccacaatcttaaaaataatatctaaaataatcaaaactattttttgtttgtctactaatcaaaactataatatacagttttaaattttttaaatattatatcaaaaatttgaaattggaaaaaaataacatacatcacctaagctttttagatcacaaatattgaaagcatttaaaaaatatatttccaacctttttaaaaatgatctatttttatattgcttgaggtttctttctattataatatatatctttttacatatactgtatgttctaaattatatatgaaaatccagacatgatcttttatttctgatataaatcaaatttacacataccaaatccagacagaagcttttatattctgagttaaaccaaattacacatcctagaaattataaatatccaattttcgaattggattaaatctccaaatatttttcccaagtatacatttcaagatttactacaaaacaaaaactttgttaatacaacaaattttgagtgacgtcaaaaactgggttccacttgtggactcccctgacacagatcggtcacaggttcacttttagctcgaaaacagtattttgatatgttataccagagcaagagaagaagcattaagatttactgtcactcttttgaccttaatctaccaccagttccagttagttaattcaggagatcccaatttttcgttttgaccaagttagagagcccaaatttgcgattcatatctttataactttcgagtattaaagatcgaatagtatgattactaatcatatgaaacttgctctccataccataacgaatcatgcctcactctaacctcttagacaatcaaacttaactgttctcagattattacatcaaacccaattgcacaaaattggagacatacacaagagatgatcaatgaacagtccaaatatgattggatggatttcttttcagtaacacaagtgtatgagaaaatgagaagtctttgtggctacgtactggtccatcgatgttaaaagatgatagaacatacctggtaacaatatatttgacatacttctgattcgaaatgacgctttcggtatatggattatctagatatatgtatctcaatttctaccatcgacatcgaatccagcacctgtccaacctcctctgcctttgttcattattccaattcctcttcccctcccttgattctgtggtttctttttcgcttttgattctccttcagctgttgctggtctctgtccatgttctttaccaccttcctcgttcccgtggttattttcaggttttcccgggtgagtttggttcgcattggctgctggtgcgctgtctactacagatttagtctccggttcttgcacctaaatatgaatgaaaaaatgtaagatgttaaaagcatctttcgtgcatcactgattgtcaagcaaatagatttgattgttcatgtaacattttgcaaagtattagctgtggttatcaacatactcatgcaggaattatctggtgtctctacagttagaataagttgccttactacaaacagatgtaatgttaactagaagaagagattgtttacttgctgaatagaagtagatgatcgatttggattcaacgcttctagtcttcttttcaattcctcaagtctggcgtactgcgtattgctgctttgttgtacctacatttataattttacaaaagatagtgatttgaatgtcgctcaatgggaaaaaatcaattcccattatcagtttcagaaaagatatttaccagactgtttaaatcttcgcaaagactctgttttgttgcttcttcatccttcacaacttttgatgctgcttcaaatgcctaaaaagaaagaagttaatttacaatctctagacttcagaggtaggggttaaacaatctgaagaatagctaaatgcctataggtcacagcacaacatgaaacttggtactccgtcattggaaagtaaaactaacagcatcgttgaacttgaaaaggaaagttaagcaaaacattcgtttactcagtcatgtttgaaagtaattacaagaccgtgagaccatgatatttgaaatatccattgataggagtcatctgacttattctgctatgcggcattaacaggtatagatatcagcatcacatccacctaatactagtctaagtctacaagccatgtaaggtcagacagaacataacaatagaaaacgttgagatatattaatcaaagagagacaaagaaacctttcgcgcttcttcttctttcaacttagcagcatggatcctttcagttgagacttcgattttctttctcaagtgttccattgctttaggatttgacaacagaacaaaataaaaattttaatcaataaggctgttccatgtaacaaaactaataaaccatgtcacattgagtggaaaaaagaagtaaacttgcccaacctgctttcttaggtccagcagtgagtttcaattccattgaaaggtttccaaattccctttcaacatccctaatttttgtatagttctcctcaatgtatctagaatatgatgacatatagaatctcattaaaagaaagttacacagaagacgagctaaagaaacaactacattcacattcttagagcaacagcgttccaaatgattcggtaataactaaggaccagttcttcagtaactttaagtgtttcctccataaaatttatccacgtctaagaaacaggaagaaaaagcactcgtaaagcaagtaaacactagctgagacttatgattaagctagctggagagaagctaagatcgtaaaatgtacactacattcctttaaaaattgaacaaagcgatcaaatataatcccagatttagatacattacttacttcctcagctgaacttgctcttcctcgattatctgatccatacaaaatcatcaaatacgcgttcaggtaaaagagcatcacaccaacacttgttctgataatacatgaagattcaagtttaccttctctgtgtaagcaataacaggagcttctcttgcaagaccatcggctccgatctcagccttcagttttggatccgacgccatcatttccttctcctaaaaacttcaaaactcaatccaataatgctccgatttcgtcttcttcctcgatttcaaaattcacattccatttatgattcgattcgcgtgtagttcccactctggttttggatcgagggaaagtgatggagaacgtgtgcgagaattatcgtcccggattttgattttgacggtgataacgaaatgtttaatgttcgttaagtttccactgaagaacttaacgttcccttcttaacgccgttaacattataaaaattgtcgtttttacccccagctctattcacaatttcactaatcccaatcaagtttgacttgtcacgtgagcatcacgttcagctcaacataattatcgatgaggaatctgtgggaaactcctcgtaaaccgtaaaccggtttaactaaacaattaatggttttgcgttaaagagtgtgtgtcgttctcgttacataaaacggcaagtagtttttacaaagcatgaatttgttctttgtagaaaacctaacttgataatagtaaaaccaaaccaccccaatactaaaactccgggagatcaacaacaaactaaaaaaacacacacaacattcttgagttcctacaaattggggaaaaatatttaaaaaaacaaaaacactgtaaaaggtaatgaattgatacactcaaaagagacttttgaagcattttaggagcgagtagaagaaagaagatcttgaacagcatccatgcttggcatcgccggtatcgctcctctctctgttactgtaatggctccacatgcgtttgcaaatagaagcgcctctcttagtttcttctcatcctgcaaattttcacataatgtcattgattcatagtcttagttacaaaaagccagagaaggtaaaacttaagagataagtaaagtaccttgagaagagtaagatcagaagctaagctgttcaataacccgctcacgaatgcatctcctgcaccggttgtatcaactggcttcacttttactccaccaactctacctttaaactcctacatgatcatatagcaacaagaataagcaatctgatatagaattgatattaaagaagattagagaaagaaaaaagacaagcaaacctgagtgtagtatctacagccattaggtccttctgaaacaacaagaagcttaagattgggatgaaagagcttttgcaacaccacatcatcatcataaggatcatcaccaccggtcaggaatgttatctcgtcttcgctaatctgaaaaccactcaacaagacttgtgtcatttttaagtactaagaatgatctgatctttcactctagcgtaaaagattatacctttataacatcagctaaattccagatactcattatctctttcctagcagcttcttctgatggccacaacggcaatctcaaattcgggtcataagataaaagactccctgcagccttagcgattttcatagctacaagctgagtagaacggcaaggttcctcaatcaaactgatagatccgtagtgaaagatcttggcctgtaattaaacaaaatcaaaccattggacttagtctcattccaaatgtggatcaaaagatgaaaaaaatctaccttttggatgaggttcttgtcaagctcagattccaaaagaagcatatcagcactcggatgcctgaagaacaaaaactccctctctccatcacctcttagcgtaacaaaggccaaagcagtccgtgcattatggtcgaatctcatcccagagttgtcaacattgttcagccttagaatatcagctaacattcttccaaactcatcatcaccaacctgagttcataaacaaaacttaaaactaagattggattcaaaacaagagcccttagattgatcatcaatggtaaatcaaaatcagacctttccaatgaaagcagaggagccaccaagtctagagacaccaacagctacattagcaggagctcctccaggagctttcttgaaagctggtgcttcagccaatgaaacacctcccaccgtaggaacaaaatcaatcaacatttcaccgaaacataccacaagagtttctgaatctcttgtgtcgatcgttagattcttgagattacctattaccaaaagagatgaaaaatcaaaactcgaaatctaacaacttcaaagttcctcgattcaaacacttgtcgcatgtacagatttcgttcttcagcagaaacaaacagagatctatctatagaacaaaaccccaagatgatatatgatcaaagaacaaaactttaagccaaaacaataaaaacagatacttaattccatgaaaacgaaaaacccaactcgaatccagctttataaagatcattcgacagcgacagatcaagaacaaaagaaagaaagattttaaaacgaacctgagattgcatcctcacccatttgagatcttcggaattcgaaaagacgaaaacggaaacagaggggatctacgaggaacagagagaagaattcgagagagcgagagaagagaaagatttgaaaattcgtgtgcttttattttgttgctaattgttagtagagatgaagagacgaagttggttatgtattagtaaggaatttatgctgacgtcatcaaatatgtggatttttccggtctactatgttacactcgtgtgactacaaaaaaaaaaaaaaaaaaaaaaaaacgttagatcttttgatgtcataaagaaaaaaataaaatttatttttcgtatatggaaagaaacaaatgtcaaatagtttgcaacgtgttacttaccaaaaatataaaaaaaattgcaacgtcttctccaagagaaaactttaaaacccttctgaattttatttttttccggtcaacactgtagcttttaatgttttttgaatcgtaaattaaaacaagaattagtaagctaagatttgtatagtggaaaaattgcgtgcttaatgtgtctggcatgaaacatgatttggatgttatttattttcccgtaaactacgattagaaaaagaaggagaatcgtcgttctttgagtgacaagaaagaaacatccgtttttgattctagttgttatgtctttgtttatttttcttttacatttttatgagataataataaactacaagttgatggttctttattgaaagaaatagtaacgaaagcagaattttagacttggaaacgaagtatggacttgctactagagttgacttgctgctaagtgagaatgaagaggtggggttggtattttgaggattgtgtctaaaagtcatgacgaaggaatgcatgaattttgtcgatagattacatgttttgagtattagatattattatatcgttttaaagtcggttgtttattgttatgtctttaatattggagtgtgagttgtctaactagatttattttctctactaatctcggtatggtttcggttaactcgtggacaaattggttgttggcaggagaggaatttgggcttcaataagtttgaggaggcccaagatagtagtcgaaactggttgttgagcccatgaaaatttgtgaagctaccaaaattaatattccacaagctaccaaaatcacaagaattttagtgagatattttagtgtcgccatttgcaccattcaacttcttgtcttagcaacacaaaaagattcgcgatattttagtgtcgcgattttttcttgatatggagatgaagaaatcattaagcatatgcgaaacggatgcttaataactttcatatcaaaactgttactacgttcccactcaatttcactgataaaatgagtatatgtatatatagaagtagtttaaaatcacatttattttgcggaagatcatgccattccacgagctaccaaaattatcagatcttttgttcttattggagtttaacgcattagacatttaatttgcagaagaccatatggccatgctacaagtaccaacgtttttattgcgacagaccaaagaatatactaatcgaatcagtgacgtgtaataaaccgaggaggaggaaaaagaaagtgtaaagataagcgaagcaagtacatgtggcagtcctaggcttccgagcaactcaatatctcttccccagatcctcctctctcttcttcactcttttaacggacacttttcactgatctattcactcactcaaatcgccgccggagctaaatcaatcaacaatgacgtcgacctacacgagattcgataccgtatttctcttttctaggttcgccggcgctaagtattcgccgttattgccgtctccgtcgtttactttatctacttccggcattcatatcagaaccaaaccgaattctcgttttcactcgattatagcatcctcctcatcttcatctgtagtcgccggaactgatagcattgaggttattttctttctctccctgcgtttctgaattttgaattttccatgatcgttgttgattcgtttttttatgcctttttgtgttttagattaaatcgttgccgacgaagcctattgaaggacaaaagactggaactagcggactccggaagaaggtactaatttactgtttctttgttgttgaatttttgaattttctcaagtattggagtaacttgattgatatctattgaatccaggtgaaagttttcatggaagataattatttagccaactggattcaggttccgattcgtaaactcctatttgattgcaaatattagaatggatgatttttttgtaattgtaattgtttatgtggtataggcattgtttaattcattgccacttgaggattataagaatgcaacgttggttttaggaggtgatggtcgttactttaacaaagaagcttcacaggttattttctcgtcgctttgtatgtcttaaagttatctttactcaaatcttcatttttttgaagctgtttgcttttttttttaacagatcattatcaaaattgctgctgggaatggagttggacaaattttagttggaaagtaagtttctttagtcatttaaagtttcttggatgatttacaatgctgaaagattagttttcctagcttttggtttatgtatggagctgtagagctagtctgtcagttcctctttgggtttgtgtttttaatgtcattgggattctccactttgttgacatatcgagctgaaaatccaaatatttgtagggaaggcattttgtcaaccccagcggtttccgctgtaatcaggaaaagaaaggcaagctttttaatttatatcttcttacaaagttcaagatcgtttttttcattactcttgttgataattattctcacaggcaaatggaggattcattatgagtgcaagccataatcctggtggacctgaatatgactggggtatcaaggtgaagtatcagtaacgtgcccttacttactttttgtcctaggaactgtagtatctttgaaaaatcaagcttacttttgattatggttcatcatgtgtggagatttgggtcttgaatgacaatagtatatgctttgtaagcagcttttctgtaaatttgtagaggttttataataattatctgatctttgttaaatttacagttcaattacagcagtggtcagcctgctcctgaaaccattactgacaaaatatatggaaatacactttcagtaagtatctggtcaagtttgattgacttcactagctaagtttttccttcgtgatcactgaaaattgtggcgttctgtcaatgtttttgtataatggtctcgtctctggtacacattttcagatctctgagattaaggtggcagagattcctgatattgatctttctcaagttggagtgaccaaatatgggaatttcagtgtagaagttatagatcctgtttccgactatttggagctcatggaggtaagaattttctcacatgattcttctgtttttgtcttatgatattgggtatgttagacattagatatgttcatggtattctatgcaggatgttttcgactttgatctcatcagaggtcttctttcaagatcagattttgggtatgttcttacatctagagccaaataggctagaagcttttgtcttttttggggttttgatggtcctattatttgcgccttctgtctggttgcagagtcgctcaacatgctaagaaccgaaactagcctatgatttgatgatattttttgttgttcattttccttgcctttaggttcatgtttgatgccatgcatgctgttactggtgcttatgcgaaaccaatttttgtcgacaatcttggagccaaaccggtatgtattggacattatgatatatattagatttaactttgaacttctagacatttcagatgattgatgttaggcatgttttgtaggattcaatttccaacggagttcccctggaagattttgggcatggccatcctgatcctaatttgacgtaagaaataaactgaagagaagtttcaacatacccacttagtatataacttctataaactttcttacatatagatatgcaaaggatttggttgatgtcatgtatcgtgacaatggaccggatttcggagcagcaagtgatggtatgaccgtggagagatatctttcaaatgttcttgttcttttaggctaagaaacattgaccatgaatttagtcactataatagtgcaattttctggcaggtgatggtgacagaaatatggttttaggaaacaaattctttgtcactccttcagactctgtagctatcatcgcagccaatgcacaagaagcaattccatatttccgtgctggtcctaaggtgggattgctttggataaaatgaagttcactatttaattttagatatagtgccgtttaaacttactggatgcaatcttgttctcaggggctggcacgttctatgccgacaagtggtgctcttgatcgtgttgccgagaagttgaagcttcctttcttcgaggttcaccctttttagtcaacagatgtattttctaggtttgcaaccagataaaattaggaggataaactttttgacaaagcaacttgtatgttttaggttcccactggatggaaattttttggaaatcttatggatgctggaaaattgtcaatctgtggagaagagagctttggcacaggttctgatcacatccgtgagaaggatggaatatggtaatcttccttaaatctaatgctcactaataactggatacttatgcgatatgcaacgtttccgtctaatgggattgtatcatcacacataagtttgcgaatggtgtttagatctattatgcattgtctcacagcatttcaagaaattttacgacaccttgatctctggtaatctagtcaatgaaactcccattaacattgacctgaatcaagttttgatattctatggcagaaatctctcattagttataatttacctataaactcatagctaagattaagatgtcatttgaatagttcccgactcaatctttgtcaatttacttctttttcacttaagttgttttcaagaagaattcttcatatatggattcttcaatcccagtccatagccttaaaaatgctactctgcttttacgctgtagaatgactctaaccttacatgacagggctgtgttggcgtggctttcgatccttgctcatcgcaacaaggacacgaaaccaggggacaagttggtgtctgttgcagatgttgtgaaagagtattgggcgacatacggaaggaactttttttcaagatacgactatgaagtaagattgtgtatgaattttgttacagatcgcttgggaactaattttaatgtgaaaaccccctcaattttttacgactgtgtgatcaggaatgtgaatctgaaggagccaataaaatgatcgagtatcttagagaaatcttgtctaagagcaaggccggtgacgtttatggttaggttcatcccaatatattcatttttctgtacgtaataacttattttcactgttcataacaactttcatctcacaggaaactatgtcctccagtttgcagatgacttctcatacacagaccctgtaagtctgataataataaaaagttgatattcaagtatgcatgtactttcgatatactgagcaagtttatatatttctgtttaggttgatggaagtgttgcatccaagcaaggtgttcggtttgtgttcacggatggatccagaatcatatttcgtttatccgtatgttgtagattctttctttttttctttaatcaaattccatgttttatatgtatagagacacattggcccctatcacagtgaactaacttagaattctttgttccagggaactggctcagctggagctacagtgcgaatatacattgaacaatttgagccagacgtttcaaaacatgatgtggatgcacaaatagctcttaaacctttaatcggttcgttcttggttttgtttcgggagagttaaagatgtcccagttttgactttagtaatgattcatctcattgtcatgctacagatcttgcattgtctgtatcaaagctgaaggacttcacagggagggagaagcccactgtcattacatgaagagaagtgtcacatggtcctttcgataaggcaatttgggttcctgacttcagttttgtctgccatgtttatttgaaaattccagagcaatgaaatgcttatccttgtaacatatataacttatatacgtctttctatataaataaaagcatttcttttacttagcttgtggagtcatgttttccgatgagataaactacgtattagaaaagaaatgtttagtgcaagatatctggtatggcaatccaagtcatttgctattgcccggatcacctcacacgtggtcatgatgagcacagtcgtctcttatgctgcttgtgattggactcttgaactcaattattatagatctcttgtgcattcttcattggtgtgtctttttcattggaggagaccaagtgaatattcagttgcagggacacaggtagataagaaagcagagaagttgtacttgttttttttcatctatgtatttgacaggctcctttggctgacaagtttcaatgatagagaccatctcccaatggccattcaaagaccattccatttgctgttcaagtaagacttccactataacacacacacaccccaatatcatttttcttggatattttgtttagaatctagaaagaaaaagaaaattgaaggaagatatctagaactattctgtttcaatattcactgtgatgggttttactgtccaggtttgtgaacacatgtgttttgcaagtagtctgttgttttgttcataggatgatgatatacatatgtacaaatgaaaatatgcctaggttttttccccacaaatattttacacaggttcttggtaactaaatatcttgtttttgatcctgtctatatcatttttgttatgtgcacaaacgcctggtcacatcctaatatcctaaacagtgagagacatactttggcgttattagtgataaagttatgtctttttcttggggaatcaagaaacaaagatcaattggagatcatatctgctccctgatgtctagtgtcatcagttaagtactctcaatctatttctctctctctctccactcaataatgccacaggaaagaaaaagaaggtaatcttttcaaagtggataaacaagagaatggaaggggaactgtgttgtgtgtcctagctgtgagtgacaaatccgatgtcgaaacgtcgtctattcctagggtccagcatttgttgattagtctctactctttttgaaattagaaagaaactctcgattaagcacatatctcccttgttccccaccttctttttgtccttttggtaatcaccacttttaattgtatcctcacctgaaaactccttgacctgatcactcccgggttttaccattcgggtttggtgcatgtcttgcaaggtctggtatatagttcatagaacatgagtcctgatcattcactctctggtttgaaccattcgggtttggtgccatgtcttgtaaggtctgatcatagttcatagaaatttgtacggagcactagagaagagagtataggagaggaccctccttttgtttgtttgttatctcttttggagatatcaacacttacctgcaatttcctattgtgtgtgataagaataggagaagttatagtttgatagtgagattgtcatgtcaaaagcaggtttttttcatcgtttagtgaaattggtagggactttatttagtggttttataaagtagaaacgctaagtgacaagacaacaatacttttgagatttctcttgtgtgtggtttggtttttagtgtgtttttgttactcgaatttttcttttcttcaggtattaatttggttcgtgcatggaaagtaaaataactggtcgcttttgacctctctttttcttctcgctttacatcattttgttctttgtttcggtgctatttctttcctatttatgtcaattctttataatcattttcgtttgaattccaaaaatagaaaatgtacacatctctccaccctaaaaaagactaaattttgaacgtaacaagtattgcaaatacatcactaacgtacacctgcctcactgagtcaccgtacctaaccaaaatcgtaacacaacgttttttcctaattttattttaaaaattgataatattttttccgatatttcttaatatgacttttcttgagttctctaataaaatctatggacccaaaaaactttggacgtctttatttggcaacactagcgaatccatgaatttttcttcattgaataatatgcttcaatctcaaaatttgattttccctacgtacaatataatgtgtcataatactacaactggatttgattataacattttatattagaagtctgactactctataacattaggttttgacgattctctttggtattttctattcattacacctgaaaatcattttacaaattgaagacgtggttgaatatttactctagcggcaagtgatcaggatttgaatcttgacactatgattttaatcatggttgatcttagataacttttaacggtgtagcgaaagttgttacttaatcgtcttgtttcttttctataggacattccgctttacttgccactgttcatgtcgtctttgtgattgccattttgatggttgaaaacaagctagtcaaacttttgactctatttttttttatttgttagtcaataaatttttaatgaaatttcgggtttattgtcttgattatactattctaaataaaggaagttgcaaagatcaaaatattttattaaaaaaaacaaaaagttggaaagatttctttatatatatctctatatacaaagatcaaacagttttagtgatggctctagaatgagaaagtgaccttgttgaagaggtgtcaagagataacgaattgagacaagtaccactagaacctttgtaaccaacgtgcatcttgtcttagtgtcgcactatggagagttgacactattggtggtagaatcgttattgcatgcttatcattatccatattctacagttacttgaaggattttcttttcgatatgagaaagaaattcatcatttcactacttatgggaactaatttctcattatcaaaagaaactagtgtctttgtcaaaagtataactctgtttaaaattatgtgttgttttaaaacctaaattttgtttcataataagtatagttctttattttcaataaagattttttgataaaaaaaaaatagttttatccccactgatataatatattgaccaaaaaaaaaaaaaaaatcatttgttttcttaatatgtatgttaaaatttcaaatgaaacttatttataaacagagagagtaagtaccaaattacaaacatctttataataaaatggatgtagtaatatttagttttcgatccattaattgggtggacaaagccatgtgccatggatgttgcgactgaactttctttcttttttttttgagcaaatgactgaactttctattttgagattcaaccaacaaatatcttgtgtatgttactttatataatggaaacttctttatacccatacatatctgtttggacacaaagaaaaagaaattcctttttttactaaaacaaaattcatatatctgtcactttttgttgttgttttcttatgttttacttttaagtcatttacaaatttatatgcatgttacaaacatggatttgaatggtatacaacttttttacgttttgaaaatgtgattccgctgaatgtaaaaaataacaagtgattagtgatttgttaattaaccccacacattttaaattattactaaatttgagaaagttcattcatctactatatcgtagattttggcattttttaaagtcatctatacttagcttaaaattgttatcgtcctactaaatccgctatttcataattcagctattttgctattcgattaccagtgaacaaacagttaggttcctagtctaagtgttaaatcagttgaccacacaaaattttgattttatagataagagtatttctaatcaaaatattttgaattttctggactggcatctttatttctaatcataattcatctttaatcaaaacatctttattttattttttttagatttttattctgtacatggggttgttttttaatcctacaaaaaaatatgaaggcatgactgaaacctaaatattatttcctctgcttttaattcttgatatttaagatttttgcatacaaattaagaaattaatgacccgaccaaaaaaaaaagttaagaaattaatgaatttttgtttattattaagctaaaacgtaatttattatctatctaaacaagatttaatattgtatatttgtgatgagatagtaataatttaattagcttattgggtaaaaggcaatggaatcggacctaataaattaagaacattgttttctaaaaatatttgtatatatatactaagaacattcttttaacgatattttaaaaaatgtgaaatgtcgtatacccttagttgaagaaagaaatgtgaaatcaatggatcaattcatatttgttttgatcttgatcgtctattccaaagtcccttaaaccaacttatacttctttttttggttcaacaccttaaacaaactttcggatgtacaataacaaactaaatccctaattggtgaagtagatgtatgcactctctaagcagcgaaacattttagaaggaaatatagacatttttatgcactagttttccatatcatgattcatattttgaggaatgctttaagagaaaagagtgagaggaataaggaagtggccaatggggagcattgaatcttgggctatttggattccgataacagttgaaagcaaagagaactctcttgaccaaacacttcttctcctctcttctcttctgtttggggcctttgtagctattggccctacctctcttcaccaaacatttcttctcctctttgtccttttccatgtcctattagtttcgagtttggacaaataaacacacgtgggaagaaaatagttaacttatcctgcctagaacacaagtactctacatcaaattttcttcttggagaagtttaatattaacaaatataaagcaaataaacacacttcctcgattcatatcgattttcgtttcggattcaatttagtttttttttttttaagtttaaacaaaaaagaaaatcaatttttatgttcatccattaaatagtaattcaaaaacaaaatgcatatagtttaaaaacaaatatcacatatcattcgtgggtgccctataagatcagtaatttcatcttcgagtagaaggtaactaatatgaagaaaagcttaaaagatggtctttactatttgtatcataaattgaagaaaaaataaactaggtgtattatcataaggtgtttgttttaccctaataaatttccaatttgaagacaatgttaggaattagttacaaaaataaatgcgagtaatgataaagtgtaattatatcgacgaatctacgaatttttcaaagtcttaactcttaactggtcgaaccaaccatgaatgatttgggcataattacaaaagatcctgcaggttgtggggtttgcaaaatcgaccccatatcttaccattaaagtgtaataagagcagcccaaagttattaattgtgtttggatccaaactcagttaatatttactgaaatactaatgctttctcttatttcattttctttgcgatccaatagaaaatcgacaaacaactaagaaaaattattttaaaaagaattcaaactatgtaagacgagaaagtaaataagtaaatggaaccaacacttctcctaatacagccaaaacacaacctcgggaacctcttcctcctgccaactataaaaacagacaccaacaaaaggatccattgattttataaattttgtttgcttaaaacaatatatgttttgatgtgattttaatacccaattagtccctacccccatggcaatttgtttgttggaccgaagccaaaattgattctagaggatgtatctatcttgtgaagttttgtagtgaacaaatatgaatttattctatagagtatgcatctatcttgtataattaaatgtgtgatcatcaaaaatattttagtatacaatatagtatgtacataacttaaaggaatttaatgtgttatagataataaatcttattttattggaaaacataaagaattttaagatgttggccaaaaaacaaattcataataagtaatggatcaaaaaaaaatctttttagggtcatacattctaaaacttttgtggtatagtcaatctacttaacatttttacaattttcacaatatatacatgaaatgattgcaagattccgataagaatgtattttataagatcaagattgaatccaacatgcatgtataccaagcacatgaacaaatacgcatttaatttagggattaattgtcgtttagtttttcttgtcctttagattgagaccaaagattttgttcaatatacacaattttgacactattatattcaccttataaagagattagtatgaaatcccatgtggcaaaaaaaagaagaaattattataagaaagattaaaaaaccaaacaaatgtacactaacatgacttgaagcttgcttatataaagacttaaaggaccctttgttcccccatctcctcaacaacactcactcagaacaagacaaaacaaaaaccccaaaactctcaagaaaaaaaaaagaaaagaaatggcgatactatgcacaacaacatctccggcagagaaagaacacgaaccaaaacaagatcttgaaaaagaccaaacttctccactaatctttaacccttctcttcttaacctccaatcccaaatcccaaaccaattcatttggccagacgaagagaaaccttccattgacattccagagctcaacgtcccgttcatcgatctctcaagccaagactcgactcttgaagctcctagagtcatcgcagaagcttgcaccaaacacggcttcttcctcgtcgtcaatcatggcgtcagcgagtcactaatagcggatgctcaccgtttgatggaaagtttcttcgacatgcctctcgccggcaaacagaaagctcagagaaaacccggtgagagttgtggctatgcaagtagcttcaccggcagattctccactaagctcccatggaaggagactctctcttttcagttttccaacgataatagtggctcgagaaccgttcaagattacttttccgatacattaggacaagagttcgagcagtttgggtacgtgtctttttaaaacagaaccacaaaacagagcaaaaccttattttctctgttttctagtctgacctaaataaaccggcttgttataccggaaataatttgaccggtttacctaatgattttcccggtcttctttacaggaaggtgtatcaagactattgtgaagcaatgagttctctatcactcaagatcatggagcttctgggcttaagtttaggcgtaaaccgagactatttccgaggatttttcgaagagaacgattcgataatgaggctcaatcattatcctccatgccaaacaccagatctcacgttaggtacaggacctcattgtgatccaagttctttgaccatccttcatcaagaccatgtcaatggccttcaagtctttgtcgacaatcaatggcaatccattcgtcccaatcccaaggctttcgttgtcaatattggtgacactttcatggtaattgaaaacattctaagaaagtaaacacattttggttactcatacagaaatggttaatcaactttggttttgtaggctctatcgaacgggatattcaagagctgtttgcatagagcggttgtgaatagagagagcgcgagaaaatcgatggcgtttttcttgtgtccgaagaaagacaaagtggtgaaaccaccaagtgatattttggagaagatgaaaacaagaaaataccctgacttcacttggtctatgttccttgagttcactcaaaaacattaccgagcagatgtgaatactctcgattccttttcgaattgggttattaccaacaacaatcccatctaagaaacaaaattatttactatctcaatcttttgtttttctttggttactttgtgtcctttgttctcatggtgaaatgcattaaattgcatttcaaagttttaaacgtttgtatattgattgttccaagctttagaccaatccctaccgtatgagctcgttcaatgaataatttgaatgaaaaattcaaagaaatttttcttcatctttgttatatccatttgaaatttggaacgaacatttgcacacctaaatatcatgttccgaatgtgtttgagtttcaatccatgttcagaaggtgtttgtgttcagaatattttaacaatatatagataataactaacataatcattcaataactttattttaaacgagataccgtgaaatccgtcccgtttgaagagaagattttgagtgaaacatattgtcacatacaaaaaaaaaaacaaaaacaaaaaacataatgtcatatactcacatacaacgtaaattgtggaaccaaatcggacggaacgggactggacttttgttaagtactatctacgtgtcatgtttttggaatggatttgattggagcaaattgacaaaaagggggtaagaaaaatccaagaacaaagtacacatcaaatgtcatcaaccagtgagtccaacttaagattaaagacataaatttgtgcatcatatacatcgacatgtagtgtaacaagagtcatcataaaaaccaaaacacatgggccaccaaaacctacccaagaatgttctctttcttacaaacataaaaaccaaaaccctaataatgctcattatcctttgaatcttacctgtttggcacgctatgtatacatatgcagacactttaatatagtgtttgcacaatttacaactcataattgaatatgtgtttcctatttcattttattctcatttaattattgatgttttcgaacatttttttaattatgagaaattttcgaaacgttgaaggaacatcgacttgtgtccgaccttgggaatcaaaagactaatataattgaaacgagatttgtgaaacacaaagtgtttataatttagctttggtaaaactaatatatatcctgaattttacccaaggaaatttatatcttgataaaaaaaaaaattgacaattaagatattagtctacaaaaattaaaaaattggtctgcaattattacgcataatatatataattcataatatattagatgtcaaattaaatgtttttatttgtgcagattaaattatgcgtgtgtgtatttccagttatgtttggagggtttagcataaaatatgtataactttgttacaattaccaaaaaagaaaaaggattagatcttgttgacagtctgacatctagataattatattaggacataccattgcaacataaagttgtgatgagcttataaatcccatgcatacattttataatgaaattaaatctatctaactaacgtccaaatttatgatgcaaacaaaacttgtaaaattataacatggccgaattaaattacatgtaaatacagatacaaaatgatttaaaaggcttatagcttacataaatttgataaatgaaagatttaaataactgttgataataaagacgaatagaagtctggaagcaacaagacaaaagaacagctctaatcagaatccaaaacaacaccctcaccatcacgtgtatctcttttgttctctttctcttcatcactcttaattattattttcctcttaattgtttttagtttaagaaaaaaacaaaggaacatatctctctctcttccaagcaaaacgacaacgtttgggatattgcatcatatgcacatttgtccaattgctctctgattcttcttcttctccctaataaatcttaattgttaatttgttttctttcaagatttcatgtttctttcacatatattcaaatctatttgtaatattatctctgattgatgccatctgtcttactagtttctaaagcccttcatgcatgaatcgtaatatctgtaatgacacatcaactgaactctgtaggtacgtatagcgtgacactttttcacattaaaaaacgaattaattcatttgtttagagatttagaaaatgatttgcttttgtaatctctttaggtgttatggcaataagagacattgtggagaaatttagtttgctattaaatctctataactaaattttgatttcataatttaggaagattagataaatgattgattcactttgtttggcgcaagaatgaagtccgcgcgctttactatggttgtcacaagagtaattaaggccagctttttcctgaaagtattacgtgaatgaaggttagacactatgcctccctcaccagatgtaattagtgaatcactttgagatgccatggacggtcgtggagcaaatatgtttcgtagtaattaaccaaaaacatgttcaggaacccctgggggtgcctaggaaaggcttgtaataaggaatgctcgtcacgaggtggaaaatagctctggtaatcattgagacacctcataaaacgcatcacgaggctgaatatatatgagatacagatacaaaattttgaggtggtaaaagaaaacattataaatagtgatagtacgaaaaaataacagtagaaatgaaggtggtacgagatgacactacaaacatgagtttaaattgataacgttgtagcagtgaaaataactaactgtaataaaacatttagtaagaaaaaaaatatccaaaattaatttaaataagatattcaattgtaaattgtactattacttttgtagcattacacttgtaaattgttatgctcttgattttgtaatattcacttttaatccatcaaaaatataccatctctttgattggttacaaagtaaacattaaaatttgtactataaaaatctcacattgagaaaaaaaaaccagagcagaaaaatttgtggagaagaaaaatatagaggtcaaatgtggcacaggtgatttgagagagagagatatatgagctgcctttagaagatacagccgccaatgtctgtttctctcgacacaactatcacttctcatttctcatttctcatttctcatcagtcaacaacttcaaaaaaaataaaatatatttcgcggttaattcgttccgttcttttttaatcatataaaataccccaaaagaaagctgtataatataagctacaatttcttcttcattttttatatcatgaataaactgtgtcgaacgaaaacattagctattatatatatatatatatatatatgctgctcactaccactcactataactctctaaatattcgaaacaaatgttgctacataagctaaattaaatttgccaaattattaaaacggacaaaagttgactagtaggctgacggtcaaacccctctatatcaccttcacatgtgacaaaactaaaagtatggttttaaaaccactagactaatacgacgatgtactggctgattgaacctggagaaggtggtggaagcaatcagctgcagtcggtcggttctcttggtttggttccaaacacttcccctgaaggtctctcaacatctttggtacattactcaatccacacgtctttatcatataacccactccccaaacatctactttcaccgcatgcaagcctctctccatctccggcgcgtatctcccacgttcatcctccctctcctcattgtctaccactttgtccgcggggcggtgcgggttaagctgtggggcctcgaccgcagcgtcaaacccacaaacaaaccaatccgtgtcagttgttgttgtggtcgtcgccgtgcttctcattacattatcccatcccatgtcacgatgcatgaaagaaaggtcgtgaagtgcaaggagcgctttagtcacacacatcagcgagtcgatgagctggtcaatgtttcgaggtttgactctgattccacgtggcttaaaactcaacgagagatccttctcgcttgccatatccaaatgctccgcgtgtggaactctttggtcgagaaaatcgtagattcctttaacacccagccattttcttttgcttgagtaataccttgtcaccgtatgaggcgttaactcggtcacataatctccacgatctattctctcgaagtcattgtagcatgaaggcctcgtagtgcaccgatctgcaagcaaaggtaaaagggaagcgagacggtaacaaggaaccaaggccttgattctatccgacggtgacgagacgttgaatgaataaagatcggtgcagatcactcgatcttgtgatgatagactcaaagcgcagaatgttacggtgaaccctattgcgtgatatccaagaatatatggaagatcgttgtacgaccaaagaatcttctcggccaatagagaagaaggatcagcagcaccttctcgtaccttgtcagcttcttctcctctccataagccaaatcctttaacatatccgattacgtttggccactgatgttgtacattttctatgcaagaagacgaatccggtttacgcaaaatcgccatttcacaaaactttgaaaccatccggttaatgcagtcgtcccaaagcgggatcagcgagtctttactcgagataacgaagccattattagagtttaagcgggacattatggggccaatgatgtcgtatgtgattgctctacaatctagtagctcagtggaggagatggagaagaagagctcttttccttgcggcaagtctttgtagacgtctggccggagaggaaaccggagattttccggcggtggttcttgaagataccgtgcgagctcaaataaactgggaagatttccggctggcactcgcaatttacttaagcaatgctccgatgggtcttggaactccaatgttgatattgctgtagtagcattagatcacatgttaacaatataaaagaataatgcaaatttgaaggtataagattcggaaaaacttacatttataaatgggttctgaaagttgaagctgaggtcgatcaaacacaccagccacatttactgaaaaggttaaacaaacatattatgagttgcattgattttcctctttactttagttatcaccaaacgattattgatcaaccaaacttgccacattaattgaaacaaaatatgggattagagagttgccttgttcttcctttttaattttgtatatctatcactaaaggcttttttttttttcttgctctataagatcagaaactttcatagatacattaagatcaatgaaaaaataataaatatcttgctgattagagaggttcattgaacttatatatgtgtgtagccataatttcatttgtagccataatttattactaaacgaatttatgtatgtgtgttacctgaaggtgagggagcagatgatgaagttgacctttgtctcccaaagactttaagatgttgaccagaaataaatttatccaaagaaaatcccttgagaggtccatcttggaaggattccattgtacaagccaccatggaatcatccaagtatgtgagctcatccgcattcaagaaactcgacccactaaccctaattctcccataatcaacctctccttcagcccacaagttaaccgattcctcccaagttagccgtatttttccaatacggcgaagatctctcagcgaggaagacgaagaagaagaagaaggaatcatctcaaaaaagggattgtataatgatttattagagaataaacctgatcctctagcaatgttgtgtgcatacggatattgaggatggtgatcatctccaactagtgataatgccaaacgcttccctcttcctacaaagtacacaattttattttgctaaaacatatttaagtattaaaaaaaaaaactataaaacaatttcaagttctttcaattctaatcaataagaccaataaacgaacgtactaagcatagtctacaagtccaaataacgcagtatggcacaatgtgactattaaataataatggactttagacaagtcaatggataataaataaacaaaaatggttatagaagtaaaatataaaaatttaccaatggaagggatagggttgttttcaatatcatattcgtctcttgaagtcatcaatgctggataaagaggaggaggaagcgcctcaacagacggaggcgttgaggcaacagttaccgtagctccgccaccgccaccacggttaatagtcggagctctgacacgtggacccatgaaaagagctagttcttgatagacttcttcgtcaaaagacgcgggaagtcgatgttgctttctctcgtaaggagagagcctgaagtaactcttaccgtatttgtcctgatctccacatttttcccattcatacactttcctaaactcaccaagcatgttgtcccatttcgtaccggcgattttagagtcccggtttataccgtgtcggtttagatactcagctacttccctgtctttttcagcacgggttttgcctcttccttcgaccgacccggatccggacccggttccttgggtttggtactgggctctccaggctcttgctagccatagcatctcgtttggtttccacactgggctaacgtacttgccctttctgaatttatgttgaaacgactccgtctttggttgttgttgtttttcactgttggtcgcttcttgacccggtggtgaagatccggcggtttcggtggaagaagctgttaccacggcggtggaaggtgtcggtgatgaagagattgtggaagccgttgggacggtggaaggagacggcaaggctttccattgaggaggagagagaccactggaagtgctgaaacgtggtcttttggggatgaccggagctccgggagaagatacggtgggtatgaagatcggagtagggaggaaagattggtggtgatgatggtgatgatggaggagtgatgggtttggtgcttggtgatcgagtgaagaatctttaggtgaggagatttgattcggtggtggttttgtagcatctccttttgttgtctcacccatttcaagaagcacttaaattaaagaggaaattaaaaataacccaaaatgagtttttattattaaaaagacaaaaaccaaaagggagaagggaacaagaagaaccagggagattatttgtttgatcttttgagactcaagctagttagcttctctggtttttgggggtttatgaagagtgaagactattagggtttttagcttttcgggtcttgctttttgcagaaaattgaaaacgatgtaaaaaaagtaatatgtttccaagttttaatcaaatatatataatagatttaagcccgttaattgggactcgttgtaaatgtaatatatgccctttgtaacgtagattcttttttctgtcaaagctaaccaatcggattagtgatacaaactacaaagcagcaaaaaaaattagcgcagagagaataagaaacgatagtaaaatagttagaaaaaataatagagaaagataacaatcaaaacggtatacattttcaccactagggaaataattgccaattcaatccggtatatttagtatttttgtccaaaattacaacacctaatacgtcaattagcacagaagaatttcggtcagtagtcaaccctctcaaatatttcatttcagtcaacgttttcaaataattcattttagtcactagtcatcgctctcaaatgacttaacattttttaggaaatacaatgcaatatatatagaaatcaacacattccttttcttctcaaaaccatattgaacttctgtctccgaaaattaaaattcgaattaggtcgaaacggtcctaaatctactgaaaatagacacattatatttgctatagaaataaaatataaaagctattgtcatatttcaggcttaagcatatgacaatagcttaggcttacatatattaatgactttgctagtagtgttttttattggctcttcacactgtttcaagaattataaaacattttgatgaacacatatattgtatgatgattcacattattaacggcggaaaaaaaaagatttacattattaacaattttttctatacatatataaaggttgatctaaatataggttttctaacaatttgaatattgtatggtgatttacagtcattaatcaagaaagcatattatttttgttttgaataaaaagagatgtctgtggaacctggcaatgaataaagcgcatcagtttagctaatataactacacatatatatatttaattttgatgtctgattttgacaactagaaaaaggtaagagagtccatcattgtccttcttaagactgcaaacgcggcgtaagaattattaatttcactgctttgttatttttcttttgacgttttactatttaagcatttttcagtattgccccattttctcttttcttgagttagattttggataatttgtttgttttcatgaattttaaccaggaagaagaagttttaaaaattaaaattaaaaaaaagaataataaatagccgaggaaaaaagggactgagagtgtgtgtttgtgcgataaaagggagagatgaagagatgtggacacatcggttccatgcttctgctccattgactctcatgccagttttgccttttccgagctcttttaaaatatttcttatcaaaattctagtataggcttatagcattactaaatatacttgaagcattcaatatattttatactagaagtagttaaaacatgtatttcttttaccttatattgtgttgtccagctcaaccccacttacccaaaccaagcaaagctagctcaacttactgcttaatgtacaaactttttaattcatatatatatatatatatatatatatatatatatatatatatatattttaatgacaatacaaaatactctctaaattattgtacaatatgaaaataaaataacaaaacagaaaatctttcatattatacatttttggtttttaattttgtgtcatgtatatagagcatttgttgaagatccaaaattcttaatgttgttttgatgtctttactggaaaacctaagattatatgaatcttgtataaatagcatctcatgtatttgaatatctaattaatttaattatcccatacaaaatttaaatatagtaaacttataagaaatgaagtaaaatgttttttttttcgttaaacataaaaatatgtaacttctctcaaattagagtacatttgtttacattaattttaaaaagatagatgaacattgaactcgaaaaatatttatcgatccacaagatacataataagtcattgagcttactttagtggtggtctatcaacgcaagagagcgatcacagagcgaatctaactagcatgttaaaatcgaagtcaatcgagtcaaatcatgagttaatatcccatttttaaatccttctctgttggtgatagattgttacaacttgacatgtacataatgcataaattatttgcaagatcacggctgaagtctactgtacccaaattttgaaactggttaatccaagaactgatgttttcatatggtttggtaattgcaactagaggacggcaacaaaaacagctattcgtctttaaagatcctacaagcaggtattaaaggtatataagtataacacatagtcacattataatctctttgatgcgatctatgtgactatgcccggacttgatttcgatctatgttggacttcaattaagttggaagtaagcttataaataatttagtaacttgcagataataatgccttgagtaaattgtaatggaggataataaatagagtagggtgacttaaatttcatgaaaccgttaaaaacacagaaagacaagtgaaaaatgatgggcacgatcaccaaaccattaactcacatctcttttgcaatttctcctaatttaaaatttaaaccctagtttctctctctttctccctatatatgcttttctctctctaggtcggctgctgctcacctaattaacagaccatacataaacactctctctcatcactttcttgtcatgagatttttgatttgttgtatgcatgaaattaattaattgttgccctaaaagggcacatacacatgctcatgcctcatcaatggaggtaaagtttgcttttcttgttctaacatttatagaaataatgtgtctttgtttccacaactatttatagggaggcatcactttcttagttctatcctctcaaacctcgatagttgatatcatatcaacaatattttgttttggatttacttttgaatttatttgggtttagataaattgacaaaaaaaagaagaagataaatttcggctttaaatcttatacacatattgtaatcggtatcttaggaaagtagcaaagggtgtcaaaaaagaagaaaaagtgggggagaaaatctatatggctgctttatggagaatatttaatcatgagtatattatatgcatgcttataatgtgataacattaatagctagagtttgctttggctagcgcttatgggcatatgaattttcactatctatataggcattttgggattccgtaatttacccgaaagctgttttttattagtgtgttattctacaaagccttcgtaatcatttgtcttgacatgagatagatttaatgatgctagttctaccatggatgaaaatgccttacgagtccttatctagctttaacacattaatgaaatcggcggagatgtatcggtttccatatcaaaatgtggggtatgtgcaagaaaccaagcctgaaccttaagctcgataaattatatcgagaattcaggaaccaacatgttggcgttggtaacaatagcttgatagctttattttgtcattcctttgcttcagtttagatgagagagtaatattatagtcctcgctagtttcatgatccctaaaaattcggtcatttaaaagaggaaaacgctcccaaagaaaataaaaagaagtcaaaacttaaaaagtaaattatggtacgaatgcagaatactagagaatggcccaacaataatcatatagcccaatatatatctaaatcttaggcccagtaccgtatgggctttaattagtgggccttattcaccataacaatgtttgttatgagttcctcttcaatccctaatggaatcttcatcatcgatgggcaagaacgatatgttaaccccgaaggcgatgtcgaatcgaataaaagcgaaaggacttcaaaagcttcgatggtatttcagatgtgtgagaaacaatgccgagacgagaatggattcaagtgtcattgtatgagcgaatctcaccagcgtcagatgcaagttttgggtcagaatccgactcgtgttgttaatggttactctcaagagttcgagcagacgtttctcgatctgatgcggcggagccaccgattctctcgtgtcgccgccactgttgtctacaatgagtatattaacgatagacttcatgttcatatgaattcgacaaagtgggcaactttgactgagtttataaagtatctagggaaaactggtaagtgtaaggttgaagaagagagttaagagtggtttagctgaggaggagaagcaagagagggagattcagaaacagattgagagagcttctgctggttgtgaaggtaaagacgttgtggttgatgatgatgataatgatgatgatgagaagaagaaagatgaagactttaggttgaagaaggttgggtttgctcttggtttaggtgttaaagagagaggggaaagctcgaaacttgtgtttggggatgaagagaatgacaaggttgagagaggggataagaggaagagatcagctttggatgagttgatgaaggaggaagagaagaagaaggagaggatgaataggaaagactactggttgtttgaaggaatcattgtgaaggtgatgagtaaggctttggcagagaaagggtgttgtgaagagagtgattgataagtatgttggggagatcgagatgcttgaatctaagcatgtgttgagagttgatcaggtggagctaaagactgtgcttccacaaataggagggatggtgaagatagtgaacggggcatatcgtggttcgaatacaaggttgttggatttggatacggagaagttttgtgctaaagtgcagatcgagaaaggtgtctatgatggaagagtcatcaagtccattgagtacgaggacatttgcaaacttgcttagttttatatctttagaccaaattaggttttatgatgtccattgagttaactaacatcagcaaatttttgtattggttttaccctaccatgtttcattctcacaatccagcacatgtacgaagaatttagagaagatttcaatttggttatcttctggattatgttctgttttggctccaaatgaacttctgaactttgctggttgattctcatcacttacaacatgtccatataaggactgtgtttactttgattctatttatgcgagttgataagccagagatacatgttactaactctattcagttcactttctttgaacaacgtatcactagaagttttaccattggactagttcaaaaataaaaagccatgatgggttctaaacttttggttataaatatggttaagagccacacaaaaattgactaaaaattctaaaaatagatggttcagaacctagtctctttgagaatattagaagttaaaatatttctaacaacttaacttatgggatcgtttatgcatttctcgccatagttgttgtagacccaaaattttcgataaatcattcaaaaagtttatagaatttgaaaaatctataagaaaccaatgataaaatgagtgaaggaacaaaaatatgttttttttccttccaaaattcacgggatagctagaaacttatttctacaatgttatttactgctaattctgtagaaccttgactacttctaaagtcaaataatcgttgactaatattcgccaagtggattttattctcaaggatatttggtaaaatcgtacaccaccataaatattcgaaagctgaccatagtacaagcggatattttttggtagtacatgcggataatgatatgtatgccaactaatcagcatcagaaacgggccaaacctcacactcacacaacactcaactagataactttaggttaattaactcttctaaagccagaaactcatacatacgtaagattagagcttttttcttccactatttatgattaggtgagctgtcttaaatcgtgccctcgataattggatttcagattcataaaagggtacttctcgaactaaaaatcggaatatatgtgaccaatttattattaataaataaatagtttaccaaattttttgttataaataaattcgaaatttagggatcgggcatagacattttcttttaagctttacggtcatccacttgaattatagatagaactagtcaattcggatatgctaaactttttcttataactttttttcttctggaaaagggacttttaaaaaataaaattatgtttttttgtcatcagaatattatttaaccacgcatcaccaacaattgatttaagtattggtctaattaggctgtctttattagaacataatccaatttgaagatcatgaattcgttggacagcatctttgtacttaaccattaactaacaataattaaatcaaaagtatattagggagatctcaaccactcaatcgtatctttattgctttaacattcgactgccatcctcgctaatttttatataattaagatgtatttaagccataattttacataaatctaagaaaaattattcaacggcaaaatatatatgaccgaagttatgcgatactgtttatgtgcttcagtgcttcagtgcttctggttgaggccgaagaggcaaaagaaacctagagttatatatacgtcactataaaatatagatgaatatttgaatgtactttcttcttcttcttaacccaaaaaaacgttttcagtattcctttccatatatttcagtaatgtcatgtaatttcatttatgaacaaaatatggcatgattagaaaacttgaaaaccgtgagtcaaatcaaattatgtgcatgccatattatctactaatatatatgcgggttaatcaaatgaaagtttcttttgatcagtgtttgttcctagctataggtcaatgtcgtacgaatttagtcagtaaaactcacaagatatctactaatgttgaatggcagctgctccattatttaacctgcattaccatgctcctctcataaaatatcttcattggtaagtctcagagaagtgtatgtatgctatgttcaaaatatctatcaactatggttcatgcatatgaagtataaaaagacaccgatgagactctagtctttatcatcgattgatgaatatatatattcaaaaatgtataaagaaatcaggcgcatcactatatttttgttttgttggtgatcaaaagattctcctatataaagaagcatgcatgaaagtttagaatttgctaattcaatctaatcaaccagatcatttttacaaaaaaaaaaaaaaaaatcactccaagtagtgaaggaccaaaagaacacacccttacggacactaaaacaaagagattgggacaaaagcatcattcaatgaacatattcttatgacaaatgttagttttttcagtgcctagtcgtggaaagtactaactgctcaattagcttctgctgcaaccaagctaagtcgaagcaatcaaagctatttacctgtggatatatcatatatatggatacataagaataagcatatttacacaatagataagcttacactaaaaaactctacaataactccaaatatgtaaccgtacctcgacttgtatagtgtacatgagcctctcgttgactcgtgctgttaaagagctgatgacttcaagtccttgcccgtgaagaacttcaagaactcttgagagtggccaagcctcgagacctgatgctaagctgctcacaaccacctcgaagccgctcacacacggttgcaccatgacactagctggttccgatctacttgatccagatccggatccggatccagttagactagtagggtcaccaatctctcgctttagctcgtctcttcttgcggagagatcttttatccttgtttgcgtgtctttgatgaaacttactgctccgtttacatgatctgacatggctctctttccctgcgaagaaagagcctgagaaaactaaaaccctagagaacaaaaatctcccatcaatgaacttgataggaagattgggacttcaatgagactattggagtaaaatatatgtaccttgatgtattttagaggtagctgactacgaagagaggcgaaaaggatcgccatttcttgtcttctttgtcgttcgatgttgcggtggagaagcttcttctccttcttcgtttcatctctttcttgaggcatatgactctggtgccttgtctttttaggattgttagaaggattcatgggttgaggtttagaaatggtagatctcagcagtaatcgtttttttttctctcttgttttttccaatgaactagttaggtttataggagagactgcccttacataattgggtctgtcttctttaatcttggaagaaagaaaaaaacaaagaagacttactaaataatgcagcctcgggagaggtgttgttttcatctttagtcaaatagtttggtttgctgtaatgtttcacaagctcttttacacgtgacagaactttatgctttgtatgtatataactagcgagtgtgtgcaaatcatttctctggctttttaatgttgggagtgtcttgtagaagattttctgacgcgctttataatttcagatatccaagaaatatgaatggtaaaatcttgattagtctaaaacggatcccaatatgatcttgatcgatataaatcttgatatatttatatggatcaagatctggaatttacattccaattttcttttatatgatgtgtttcatatataaaaaaatacatagaacattttaattaactttagaaaatatataatattactagtaagatcaatgtgaatatctatacattttatcacatttggatttatttatttttgcttgaacattatgatctatcatgcaaattgttttcagttttcttccaaatttttgcatgtgatttgaagatgactaatgaagcatttttttcttatggtacactggtatctgcttcgagatagaacaaaaaaatcaaatgatatttgatcaaaatatctggatttgtcaattgtgataatggatgaatagtcatgagtcgactaatcggtagaattctccatagaaactttcaaggagataaagaggttgctcaaattagaaagtttgtcgttgaattatgtgtgatttgtttgacaaaaacacaaaacaacgaaatgattatgtgtggtttctattagttttggcccaataaaactttatggtggcaacaaagaacattcggcaaataagaacgtgtacatgtactcaaataatataatctcatgcaagagaagagattatttatcaatatgtttgtgaagatgttcgcagtatcaatgaacacacaaatgttgtcagtattataaccgaactttctaacgcagtctaagcatgaaaatcatattgttatagtatacattagaattgcggaaaattacgtacatatcccataacagttaaatgaaaaaaaaaagagaacaagaatacaaacatcatttaaaaatattgggaattcactctcattcacttggacagagaaaatatcttatcagtttcttttgttgttttggcaatttcgattgtcatcgggtaaaacttctagaaactaacctcacgatatttttcaatcaaaatatgataaagataaatagtaaaaccaagggagacacatttaataatggggataagctaagtggataggatgagtgaagtggagtggacatagttaaaagataggcctaggacagctcatgcaacttcaagacaaggtggaagaggagacaagaaagatcctggttattaatagatggaaaccagctgtttcatttgtcctaaaatatcccagcctcattagcatctcatggatcccactctcccaaattatttcgagcatgcattatgccacatgtgagtttatgtagttattcattataacctcaagtttgatttttgttctgtgtgtaagccgtgttcagttacaaaccaaccacttataataatctaacagtattttctaatcaaattgttagaaaggtaaacagtagaactgccgtcaaggaagacgaatttgatgtagtaagggactacttttttttttttttttttttttttagtatgggactacttaaagtcttaaaacaatagttttgatcggaaacagaaaatctagtcgattcgtttttgggagatttactcgataaatctttgattttgatgatcctagtgatagtttctaataggttgagagaaaagaaaataataacgataactagagcttccgagttgtataaatacaagattcttatttataaatcgaatttgaatttaatttcataatattttaaaataattaaaaacaattatcggaaaattccaaaacatttccaacagattttgatttccaatgttgtatattcgacggtcgaattccgtcaaaaatctcgaaaatccatttctaacggttttccccgtaggatcttgcatgtttaatgttttcttgttgtatatgtttaatacatagtatttgttttcttttcataaaaagttcacttaaccgaatttgttttgaaattattaatgagactttaataatatattgtctggcaataattttatgctttttcagttaggtttgttttgtaaaagttcatcatcatgaacatatcgttgtatatgtcgcccaaaaaaataaaacttttaagatattttagttttgtgaaaccaaaatgctaactaaccgcaagcatttttttatataaaaaattcacaaatgtattatattggaatttcaataaaactttcacttgcgttgctagtacaacgtaactcactgtactatacattttgataaaatatagtatcagttttataatatccaaatattgacctttaaaaagatggaaaatacttagctgttcataataagaaactcatatttttatcctacaaattaagattaaagcagattgaagctacaaaaatctttataatactatatagtttgtttgcttaattttgtatatactttaatagctgtttcatatatgcttcatttttttgtttgtaaacagattcttatacgagcactaatatgtgcaacttaatgagtttaatatattatagtcttgtcttacaattataaattcttattttgtaaattttcgttggtttttcttatatataaatcagcagaatactaccaactcttttttttttttaataaacgaatgctaccagcttcaaacactgcctagacaccactaaaaactttaatttctttttgaaattgatcaaataaaatcccaatcatagcatataaccataaaatattaaaaaaaacatataaccatgaagtactaactcagcttatgggaaacataattttccgatctataaacaactaaatgagctaatgacaatcagatggaataaacataatatacatacagatagatgtgaacacgacacaacaatcacaggtacgaataaagtacgtacttaactatatatgtcgtttacttgacaagttaagagcaacctactcaacaagaatttacttcattctgattaatctcttttcaagttctgctaagtcaatcatcaaagccatatcgttgacctgcaaaacaaaagaaattttcaatatatatactcaaatgtaccaaactcttatgtatagtagtatatatacgaagtatacatctcttcatacgagtaagatttttgctttgaagaaaattcgaagacaaaatcaaacaacaggcacagttaattgatcattttgttctataattggatattccatgccaccctctaacctgggacagaattattgaaataccttgataatgcacatgcaccctctaacctccagaaatataatagttttcaaaattcaatacatacaccatgaggtgatatatatatttaaatgcatgagggatataaattttaattaccacatgtgagaacattttcttgtatatatggacagttgcaattatgatttcttcttttcaaatatttgatgcttaagatagaaagatatataaggttcctactaacgtccacaatctgatggattcaaatgtcgatagtatatacatatattagcaaagacctcaattcttttctttttttttgaatctaaattgagatgttatgaaattgtgtgtatgtgtatcttacaacgcaaccacacaaattcttgtttttaccaaccatttttataaactacaaacatgaaaaccaaacaaaacgaaaggtttatggagaactttgatttgcattttgttaaagaatttaatgaaaagttcgaaatagaaagtatttttagaaaaaaataaaaatattttggagcaattgatgtctatatcgcagctgaaataagtaactaagattatgagggtaggataggtttacctcggcctgtatggtgtaaactagcctatcatcaacaatagaggagatggagttaagaaggcagagaccatattcactaagcacttgaagaacactcgaaaaccgcggttggccaccgcagcagcggctactcaacatgatttccacaccaaccaaacactgacgaaccaccacatgatttttcccacttatcatctccacatcttccttaaaatcaccattactactacccaataaacttcctctagacagtaccatgagatcatctctcctcacacttagctccttgatcttcctctgtagatactttatgtagttcaccgcctcgttgacttgatctgacgtcgaacgcttaccctagagagagcaaaagaatccgccaagaaacaaaacaaaccaagaaagcaatagatctatttaggaaccttttaagaaaaacactatagttaagtaacatcacaaagtcaaaacacttgttactatatccctttttcattttcttacatggaagactaaataaaaggacaaagattaagtagatctaagaagtcatgaagaaccgaaatcaggattagggtttttaggggagtgtgagaccttgatgaagtgaagagggagaagagaacgaagagaggcataaagagaagccatttcttgtctcctttgcctctcagtttctctgtgcatcatcttctccatgtcgttattatcagtaccacatgtcagcttcgtacaccgtcttcttctcttgtcccgacaatcatccatctggtggtcttaaattaataaaagtaaatattcctttaaaagattctctacttctgatgatgaagatgagacagcaagatctgatcttatgcggattttgtgatcttagtctttagaagaacagctcagggctttgttgtaaagttgaaaaattattgcagtcttgaagattgagcaaattaatttaaaaaaagatattttgataatattatttaatagagagaagaagatacgttggttagtcgtatcggaaaaagaattaaaaatacgtttgatagggtacgcacgcagtgatggtcttcatcagctcttcttctatagttaataatataatcaaatatgtgatgttctattccgatcgagatcacatgcttactcttttcttattaccattctacattttaagacatcctccaaattctcaagataaactttgcacatgcaattcactaaaaaacaaagattttagcgaccaaattatccggttggttagatgttatgtaacaagtattcgttttgttgaaattgttttaaatattatcgtctttttaattaatgcattaaaattttaacaaaatatactcaaaatgatatataatcaacgtattgttgatgtcaacaaaattcgtttgaaaggcatcaatattcaatgatataccgttttaaacagtacgactgtaattattaagccatttcttacaaggtgaggtggtggtaattttcgtcaattagactttggttttacaaatctttggcaaaaggtagtcggtatttcgcatgaaccacacctatgagcccaaaacaggaaattaacgctatagagcttatatataactaaaacttccacgaaaatcacttcttgaaaaagaataaacaaacatacaacctaaaataaaatacttgaaaagtgattgttcgtggtaaattatgcgataattgacactttctttttagtatttgtatggttggtagttgtgggacagtaaaggtttataccagcacgacattgatatgttatttatagatggtaaatgtcagctaattttaaccatacaactaaaatcgttatgaaaaactatacgaacgaaagatatgtaaacatggccaaaagttatttcatatgattttatttctaccaatatggttaaatcgtgtttttgaagctttttgaaaataatcaccttacccctcccaccattatatcctttttctctcttcaaaactcactaatgtacatgttttttttttttcttttaacttggaggctttttttttttttttttgtcgtaaaaaaattatatcttcaagaccggctttgcccaaaagttagtggtttcatgaatttataatgttagaaaaaaattagaaatataacgttctccaaagcccaatagaccaattgtattttgatattcaacaaagggccagtcctaaccaagtgtataagacgtaatgactagattagggccactataatttcctaataggcccaataacgaggatcctgtacaaacatatgacttttagagatttcaacagatttttttatatcaaatctcagaatactcttcatatgctgcatcctttatgcaaattcagcataaatctacgagaaaaactagcaaaaattgatgttgagttttacaagaaaatgatcactaaactacaataattaatcataatcagatatacgaagctaaaacaccgttgtgcaaacaaatataagtggctcaaacactaaaacatcactaacaaagacagtgttgtaggacaaatgctataaaccaacacacatctaccaccaaagaaaccgctctatcgattctgcttccttcgtgccttgaacgggaaccgagtctgcggtgatggtgagaattctgtaggcaaatccggtgggcttatcgctcctgtaagcatttctaaaacatctttcattgaaggtcgtgaaaccggtgatttttgcagacattgcaaagccaccttaatgcacaaaaccgcttgttcttggtctaacaactgcagcttttcatccaccagatcaccgagtctccctcttctcgccagcttcctcgcccacgacatgagatttgcacgcagcatgatctcagacgcgggtccagttacttccagcggccgccgtcctgaaaccaggactaacaacaaaactccatagctatacacatcagatttttcagacacatcatctatgttattaccacaacactcaggagcaacatagcacatcgtccctctcatgctcggcgtgctactgactccgcaactcttaactgaatcttgactgtttctacgccgtgctctccattgttcaccgcttagcccatctaaccaccagtctatgctactacctatactgttactactaacacctcttcttttcttcctatacacttctccatccccgtgccgcctttgatccacacttccactcacatcatcactataaaactcagactccaaagttttcttcttcttcttcttcttcattctcttagcaagctctttcctatactcatctttccaccactctctcaccattctccgcttcttcttcttccccttctccttctcttcatccaacgaaagccaccattctaatctcttactactcttcttcttctcaactttcttaccgccttccgccgtctcagcaatccaatcactactctgtctctcttccttcacctcagaaccaatccattgcatcacatactccttccctttccctcttccaacattcccttcttgcttccaccaccaatctttactcctcaccacattaccaacctccaacacacttcctttctcccccatctccggagaaaccgatacaactgtctccggtgacgtcataggcacctgctccaccatctccggcgatgaaagaggcaccggagactgatcagtgaatccaaagttagattcatcacaaccagtagtattagtaacaacactctcaacttcttcaactacagaaccataatcttccactacatcactctcagacactactttaacttcaacatgttcagatttcaacctagctaaaccaaaatcagagatcttagcagagaagaatcgatccaacaatacattactaggtttcaaatctccatgaatcacacaaggattcaagctatgtaaatgttcaatccctttagctatatcaatcgcaacgagaaatcttcgattccatatcataagctcaggagatctacgatgaagaagagcatcttgaagatttccaatatccataagctcgtatacaagaatcaaacggcttcgtcgtcgtcgagagaagccaataacggaaactacatgaggagaatcaagcttaccagcgaagaaaagctcgttttgaaactctctttctccttgaagagaacctgaatccattactttaacggcgacattaccaccaccggaggaaggagataaagttccacggaatacagagccgaatccgccttgacctagtcgattctccggtgagaaagaagcggtggctttacggagagatgagtaggagaactcgtgtaacggttgtttctgcggcggtgtagaggaggaggctacggcggcgggagatcggcgtttgcggttgaatttgcagaaacagatggagagagttatgaagagagagaaacctacagctgcaagaggagggaagatgcgtgtggtggttgtttcatggtgaggtgtgacggaggaagagaacggtgaatttaccggtgccggcgacgggagtgttcgtgacggcataggaaaaaaaaaaacctctgaagtgaaaataaaaaattgtgttatgttattattacactttgaagatgagctgttacaagattgttgtggtcacacacagtagttaatgacttttcatacatttaatgacttttttaattttttgacagacatttaatgattttttttttattacatcacgcaaagactataattaaagtttgacagttttgttatcacttatcaacatactatagtttagtgatttatgtattattgatatgctatgtaatgagattatgagagcgtataattaaagagtataatttcacatgggtcattaggatagaagttattaagaatattaatttggagttttcttattaaatagctaaacaatgatgtgttatgctaaacttttatagaatttgatcaaatgaagagtattttttaaaaaaagaaatgcattataggactgacaaacctgcgaaaattttggttcggttaaagaatgtagtgactagtgagtgaacacaaacatatggttttggggattatttggattgcatacactttgttcaaaacatctaacaaatttaaaaggaaaatgtgagagtatctatctaaaatcacaaatcaagaggtaaagtatcaaagtgtgtgggagatgagagaagaactacatgggaagaattagattttggtattagattacacccttagaaagttagaatatctagcctgaatgtgttggtttaactatatcacgttaggtagggaattagaccacaaaagagattggttagattttcttttgacaatttataactttagttgttaatttagattgacatttaagcaaaggcacttactaatatccagcatccgagtccattaataataataaacaaaaatagagggtaaagataaattcccaagtcttcaaattcatttaaaatttgtggcaaaagaaacttttctgatttagtaaaaatttattagaagaaggttaagaaagggagggaaatgtagtagattttctggtttggtagtttaaacaaaatacaaagaatatatacacaaaagaaaaaagtggagaaaaaaaaaaagattcttgattctcactctcttttgtggtccaaacttgaaactaaacaagacgtagagagaagctaaaaggcccacaaacacaattatgattcaaagaaaagtgcgacacaaacactgagacgataatgacccaaaaagaaaagaacaaaaagtaatgtaagaattattcatgagaacattctccatctcacgctttttgttttacttcaaagacaattcttgattcttgatctcccttttatttaggaccaaaactctgtattcgtcaaacctgttcgaattgttccatttccatcgaactataagagttgtctttttgtctctctttcttgaattgttctctttgattcttttgcacatctcttttttttttcctttaaagcctaaagagtaaagacaatctggtaattggcccaaaagcctatatagcattgttgaaccaaatataaaactgcacggttgagtagggttagggctggttcaaaatctcagccttaaattcacttcattcaggttgtaccaaaatgtaagtatttgtagacagagatgactttaaccattggaaatgatcagtccatcaaaaaaatataaaagaccaagaccggcgtctaatgaactacaacgaacaaaaccaaagcagtactacgtttttattttatctatttatttcacacataccacctaaatagctaaacgatcaataacttcaaaatgatcacacacatacaacaaacaaaattagagaacaaattctctcaagttaacttttattttattgtttaaaccactaaatacccttaatagcccatggccaaaccactaaataaccttgtagcccatatccaaacaactctcttttcctttcacattcgccggtgttaatgtgtattggtaaccccaattcataacaaaacaaagacgggcgctaaaccctaaaactaattaaggctcatcgctatatcaacatcttattctttggtttaaccacttaattgcacaaccaccaaaaaaaggatccaaaactagttttactgagagctattcttgagatcaatgacgaccacacttatattatcactgctttgtctacccaaagccaaccgcgttagcaacgttgcagccaatacactccttgaaggattttgttctccgtcattgtcgtcttcttgagccattctatttaaatcaaggctcgagggagtttcttcgcggagacaaaacctagctatgtcacaagctagctgactcgagagtacatcccaaagcccatcgcttgctaatactaagcattcatctccagattcccttctcatgaatgttacttctggttcccatgctaccattggttttagatacctgtcccctgctccatgaattgtaacacaacattaggaacaatttccatactaaaacttcatgtttagtctaataaattgtataaccgaaataaattttaagttggttaaatgatcaaacaatgaaagatacaaagataagacacatttaaatacttttgaagttaagaaaaatacttctcccgttctaatccatgagatggtttgtatgaatgcccacattttttattttcgtaaaatgattcaattatttttgttttctagttaatgctgcaaatataattttttttgtttttttttttttttgtcaaatgttaaactattaggaccaatgtaaaatttctagttaacattttgacaaaaaaaagagagtaaaatttacatattttttttttaaaggaacaattataaaacatctttgaaaatagaattagaattaatcaacaaaagaactcgcaccaaatgaaaccaatccatagtaccttagttagtaaacttaaaaccctaaaccccaaatccgaaatgattattattgcccttataggctctagttccttgccatcttcaacactatcaactaaaatcatcttttactacaatatgagaattgagaaaggtatacctatggctctggacgtggctagaattccttcaactctagctccatccactactaaaactcgaccaccagctgcttcaatcctcgcacgctcgtctggtctatccggctgcaaaaaactcaacaacttcaaaatagaaactccaatattctcaaacctttacaagaacaccaccttgtgatcgttactcagaggaatagccattccatttcgacacaacaccgcacgtgagtcaccagtattggctacaataatatgatcgtgcgtcaaaaccgcagtgaccgccgttgaacccgaaatcgcagcctccctcggatcacagttacacaacggcacactagtcccacacacgcatgtactcgttgccatctcatccatcctcttgaaactccgtttcatcacgccccgccatttcctctccacgacatcgttttcgcttccttcttcctcctcttcgaggttttgctctagctcctccttgacaaacgtgtgcatagtcgtgctgcacaatgttgacacctgtccacgcatcacatcagcatctttatattaaatgaccaaaccacccctggttaattttcttacctgagaaccgccgtggccatcgtataccgcaaagaaatgaaccggtctttgccggttaacttccggtttgcacaaattcggtttaacagtaaccgaatcctccatcttacgagatcttcccataaccgaaactataccgtacaacggctcatcctccgtttcttctcccttccacaccggcgcttccgatttttggcaagaagatgccgccggaggtgccaaaaagcccccgatatccgccggaagaccaccgatctctgacctccgagcttgtttcctcaatggaacgtcaaaacttgagtaaacttccatgtccgtccgatcacgattcctagacgaactaggttcgccgaaaaccgccgcttgtctccgcatctcaattctccgacgacgacgttcacggcatttagtcggagaaacgtcgtctccacgtccggttgaaattgttctgtagatttcagtcatcttttcaaaattcgtttcggtggatcaagagagcaccgctttatatacatggggccgagagaaagagagaacactttgaacataaagaagcttacgaggaagacagaacacgtgtcggtgtttcgatgtattcgcgtgttaggctcaggtgttaagttgttgtccacgtggagacgccttcggtttttgttaaaccgcatccggttttgggttcatgacgatagtcgtttagctaggctcttgtgtcttaactcctttcttcttctccttgcttgaatttgaacccatgagccggagctgatctctcaaaccatgtgaactacaaggatcaggctggttctggactaattcatcaaatattatagaaaatgaaaaactcatgatatacgaaatattgcatcttgtttccttttgctttcaatatgaaaacattaatgtcaaaacaatgactataaatgtaacaatattgaaaaggtttatatcaattttcttatttttaaaaagaattaaattttgaaaaccatctttttgaaaagtgaaaacaaacaatttctactatattaaatctggaataacatttactgatcgttccaaatctcgagtagtattttctataaaacctgaacggtaagtatacttaaaccaaatcatgggattaaccataacgttggagatatcttcggagaaaaaggttgacgaatcgtcaatcgtcactagtcactctttttcggtgcaacacatgtcacatagtgatcatctacaacttctcgattcctcaggttgagcgacttgtaccaattaaacacgtagcatagttatgccagtttagtccatcagtgccatatgccttttattctttatttggtttcctacaaatgaagaaaaacggcgatatatgtatattttatgctaacagatttgatttgtaattaatgtctactcaaataagcaactgtacaagatacaaagaatcatatcattatttattcaaatactcaagatctacgaaaaccgtaataaatgtttacaaactgtctttgaaatatattaaagtgggtgaactgaaatatgtggatcgatcaatcctaatattttgctatattgatgagaattaatacgagtcgaatagatcataacagttagggtggttctctctacatgaatgatatggtttagctaaaaactaaaacaaacaaaatattaagctaatataaatgtgtaagttatctaaaaggaagataataatgaaaaagcttgtctaaaattcttaaaaaatgattcaaacacactttaccttaaatttgtgattagttgggactgggatatagttttaatcattggtgggttgggtggttagttttaggttttaatgattgaaaacttaacttgccgatatagtgattttgtttttttttttatgtgaagaaaataaaaactagtgagcttaatttcaatccctggctgttttagtaggttattatatataaaccatatatgatagaaatgttatcttcgtacatcaatgtttgtttaaattgtttattcagttttttatgatcttcttgcggaaatttggtttaataattttgcgtgtggttagaattactatatgaagggaagttgcttaccaaaaatcctatgatcaattcagaaaaagttggaaaataatgagaaagaatagtgtttgtagtgaaaatactttgtgtggggtccaaatctcctgcaaaaagaaactaatgtgtagaagcatgcatggaaacaccaataaatttttctgaagactctatggcactaaagtcagttaatttgatcaccaaatatgactgaaaactataaagaatcggagaacaacaaagaaaataggtttcatttcatggcatggagtcaagggaaatattcatgacattgtcaatgattttaggctatatatgtttcgaagaaaaataagaaaattggtatttttgatgaaaaaggaaagtgaggaaaaattgagtcgaacaaaaagaaaagcatcaactttgatgagatagaatcaaattattgaaagaagagttgttttaatataaaaaaaaaaaaaatttccagactaatagaagatttttgttgaccgggtaagtacggagaactcaactgatgtcacctaatattttgccatttgtagccgagaaacgaatctccaaatgtagagttatgtagttttatgtcattttagttgactcgttgtaatatttagttaaataattaacagtttacaaaacatttaaaaatattatttttagaattagatttaaaaataatatagaaagatcataaataaatttataacgcgaatgtttcaattgaacataaatcattccaaatgtttactaattaaattttggcacagtgattagaaaaggattgattatatgtttttgttagcacaagataattggttcccaaaagacgattgctataatacggtagtacttataccaactaacccatccaaatttaaacataaacaaatgttttaaagtttaccaacattttgttctccgaaaacaatgtttacaaactaattaactaataactaaactgtaaattgccaatgtttacaatgtttaaaaacataaatttattcttcttaatataactctgagcacggaacattgccaacaattatagttttgtattagtctatatttacagaagctaaataaatttctatttttcttgataaatcgtgatttttatgttcactcatttcggatagtatcaacaatttcataaagaaaataagtaaattgtggtggggaaatgagaaacttatcttaaaaacatgtaatccacgtggtcgtatgggagctttctaagctgcaaacccaccgtccaagacctaaatggaaaccaaggggcaagagatcacaagccttattccaataacttgccgcttttgcatcacacatctccttgtttctgttttggattttccaaaatagaagctactcgaagctccctttgctttattctcatcttcacgatcgacttactatttttttttgtaatatttgttctatggaattttgtttctaggacaagtatataaattgagatatttgtcgtttctcaaaacaacctgaaactttggtaaaccaatttcatgtcaaagtatatcgatctagctctaaaacttatcgtttcaaaccgtattagatatcaaatttaaacttttgattttacaaaatttttaaaactggtctggccggtattttaatttgtaagtattatatatctactctgcaatttaaataaaataaaatgttttggcatgttctcttaaactactggtaagtacacagttttgattcatggtattgaaatgtaaccgactttcttattcctgagagtccatatcttgaaaggacaacttgaaatggaacatgtacggcatacaataaactataggttgttttactcgtacgctaagatttttttttttttttttttttgtaaaggctaagttagtacaaaaatctagatattaattaagtagtataatttcgtgacaatatttccatgctacttaaaatagttggtgggaatttagttaaaatatgtatacgtaagggaactaatttgaaatctcacatatataggaaacgaagttgacaaaaaaaatgttttataggaaacgattttaattagaaagatagtagcaaataacatatgtttaagaaatcattttatttgttactaaaatttgaaaacatatatgcatacatctatcaacttatgactataattataagtctcgagacctttttgtttaatttgcacaataagggaattctctgttccgagaatgtaggaataaataacccttacccatctcgacactaacatacgttgtacaaaaaccaaagaagacgcatactacgttatatcgagagggatatcgatatctccaccgtgacgaactcgtcgtgttggcgatggtgtggtaacttctcgtcttctcttcatcgcctctgttttgttgaaaccctagagatcatcacgtcgtatacatagtgtaaggtttagttgacttaattgggcttactaataaaaataagcccaagtttgttttaaagcaacagaagaattatcattggttttgacaaattcaattgtcttctgttaagcgttatcattgtgacaaaagaagaacatatggttgttttataaatgccaaagcattgatctagagaatagctcccattacataaggaatttttatttgtggaactaaaaacattaggattgctcaaacattggttgttgttctacagaggaggcaaccatgtgatgataaccgggctacgaactttatgtgtagtgctcttccacactagaccaccaaactcaggcctcttcatccggaaccttgtcctgaaagtaaccgtgtaggaaagcttctggtgcttcgaagtgaagttgagtgttttgggctggacagttacggatgcgcctttgaatggcgagacagaaaccttgtagcttgaaatgtgaggaccaacattggtcactgttcttctaagtgtcatagctttaacatgtgtgttctctgggaacaaagctgatatcgccgggtagttcaagtttcccggattcttggcaagagtgtgtttgcaggttctgtttgaatgttttgtgaataccttaagctgtgatggacttaaatcttgagtgcagaggaattcaaaatactcttgaggtccaatgtcgtagaccaaaccaggatctgtagctcttaaaggatctatatgtcctgcaccgtgatcataaggcgatgaaggagctgctcctgatgcatccgtaagaggcttaaacatgttgtcatgaacataagcagttgtcatgagagctgatttgattgctgcaggactccaatctggatgccttgatttgatcaaagcagctacaccacttacatgaggacatgacattgaagttccagacagtatattgaacttaaccctccttggatcagatgataaactcgatggtgccatgtctccagtccaagctgcaagaatattcactcctggagccaacaagtctggtttcaagatctccaaagacagaaaatttggtcctcttgaagagaacgctgctacaactggtgaaggtttgataccaattcttgttccaagaatctctaaactcgctgtcgcttttttactcgtcatcgcgtactgtttgattagtttaccttctttctctccaactgcaacagctggaagcatatgagaatctgcaacaagctcttcaccatttgttgcagtgttagttaaaaccatcccaattccaccagctcttttcacaacctgacccttttgcacacgtggagtaacaccgcggtcgcatatcacgatctttcccgctacatggcgccgatccaaagctccatctagacagaacgaggttggatcaggactacttgcattccttcctaagtaaaccagaggatactgtttattcttaggcaaaactgttctgcctttgtaaagtgacactcctttgaatgttctcatagttcctatcttcactgttgctggaaaatctctatccatagtacttgcaccaactgttgtgatccatggagaaacattagtgagactaatcggatcaggacctccattaccggcagaacacgaaacgaaaactcccatctccattgctccaaatgttgctatagacaaactgtctctagaataagtagagaccccaccacctaatgatatagagagtacttgaactccatcagcaacagcttgatcaacagccgacaaaatgtctgaactgaaacaccctccgacccaacagactttataagcagcaactctagccttttgagccatccctcgagctgtcccataagcaaatccaaaaagattagctcctttaacaggtgagccagctacagtagctgcagtgtgtgtcccgtgaccatctctgtctctcggtgacttatattcaagctcttcatcgatctttcccgttgcagcttcatagcctctatagaaaactctagcaccaacgatctttctattgcagttacgtttcaagaatctttttccagtttcacaagctcctctccaagtagcaggaacaggggacatacctgtatcgttgaagctctcactctcaggccagataccagtgtctaaaacaccaactaccacatcatggtcggtgactctctcagcccaaactctctcactttcttgtctttctaacccaagaaacgttggacttcttgtagtgtgaagctcgtatcttgtctcaggtatcacagctacaacaccatcttcttcctcaagcctctctgcttcttcttgagtaagctgagctgctaaaccgtggaaagcagtctggtaagtgtagagtatcctgttgttattaccttcttcttcttgagatttatgttgcgttacagagtttatctttgaagagtaccattgtaggtgattagtgtaaggtaaaggcatggcagatttatccatgtggataacataagtcttcttggtagagatttgagtagttgtttctgcttgaagaaagatgagattgattgataagattatgaaaagaaagggtttttgaagtgggtttttgttagccattgttggagctagagtataggagatgattcttctctctatctctatggagaagaagagataaagagagtgttgttgttactttggcggaagtaataaaggtgaagtaagaggtggttttcatagatgttctgtgtgcacaattactaacaagttggttggtaatggcagagaagagtaattaatgtgctcatggttccttctcctacttctatgtaagtattagtaccgttaggtttgagaatttatgactcatctcgagcttcaatgtttattgcttagtttaagcaatgagattatgaggcatgagattcatttaagcaggtcttgaagtctacgagcatattcttgatttatcactttctcatttttcgttttacgtagataacaaaataagtcacatcaagctttgtttattgctttggatttttgtgaggagaggaatataaacaagtattcagaaaaaaacataaagtatgtaggattctctttggtagagactgaatcattcgtacctcttgaaatgaaatcttaatgcattgatacaaaaggtggatccgtgttgccgtatttaaatgttaaaacaacctaaacttgtgtttttcaccaaaaattgaaagcttgatgtgaaattgaatttgtctgaaaacatcattagtaagaactcgtgttttgattactagctagattaactagtttttaaaatgtttataaatgatattttcattggtcaaaagtgttttttttttctgtctctccatactaaaaaggtatgtaaacaaaaaatctaaaaaccacaataatattgggtctctgtcaatggaattgaatttactgagaagagcagtggtcagctcaccggtctatcacaacatttataaaaacacatttaaagcttaaactccatatgacccactttctctctccctctatctctcaagctactactatatcctaaaagaaccaagatggcttcatcaagatatttcacattttcaccattgattggttccagtggatcaatttgattcattgaattgatagatatcgtgaattcaatacttataactattctatttcaggttcctattttcaccatttgcatgttctatgtctaaaatgtttatttagaccaaaatatccaactatacgtctcaatcggaatcattctattgcaccaatcaatttaacgacataaacatactaacataacattccacatgattaatggaggtggaggagaaataatgtacagaagcagacgagatgaatggtgaagagctaaagaaagccttcaacgccagtacgacctgcttggacttctctatatatcattagtgcttcttccatcacattggcttgagccaaaagttttgatctcttttttcccgacggatgggtcgatagataatctccgagtgcgtctccaccgagctttcccagcttctcatacactgtgggagctactcgtgggtcatagcccgcagatgcaagtaacagcaaaccgatgtagtctgcttctatctccatcctgtgatgcaacaccaaacacatacacaaggggagtttgaatgcatcagaacttcttcttatacacacatacatatttcatttctcctaccaataccctaaccacaacaacagcttctactggtttgcaacgttttgtagccaaatggttcactagatgattaaaagatgtgaaacataaacctacaaagctttcttgttaacttctcttatcatgcctaactataccaacagcttctaatggttcacaaggtgattagtttcttacaaatttacttgaactaaatgaatttttgttcctgtaattttgcaaacctcatgagttattcgagaacgaaagaactattgcagattcacagtaaaagagactagatggtgttgatggtaagagaggaagaagaattactttctggagaaaggaagcctcaagaaaagggcggacatagtgttcacaagatcaggcatgacaaactgatataggaccagttgaaggatagcaaaccacaagttcttagttattccctcagctacatgtcgggccaccgcatgaccaacctgaaccaatatacagaacaatcaggaaaaaaaaaccatgctttcgttccaatagctactctcctaatcatttccacattaacaagcagcctaacagaaagatagtacattcacaaatcaaaacaatcaaaactttttatatacctcatgcccaatcacagtggcaacttcagcatctgacttgaaatgattaagcagcccagtgaacaccacaatcttcccagcaggcaaacaaaacgcgttaacaataggctcattaaccacaagaacctcccaactaataccttcaagatgactagtcgctgcatgagcctttgaatctttcttcctactcttttgaatccattgatcatcaagaacctgatcttctttagaccatttcatatcagtcatagtatcttcaccactcatagccatttccatttccttaactcctttatcactaccacctcccaaactactctcagtagaagcataccccaaatcactccatacacgctcattactcaaacctctctgtaacgcatcaataacctctttagctatcaatctaaccctgatactctcaggatgagtcgcaggaagaattttcccttggtaagttttcttaatctgctcaaattgagtttcaccaagaagcttctccataggtttcgataagagaatgaaatgtgttctctttgtgtacggaatcgtttctgtattcccaacaatcaaagtgatcagaccaacggaaccaacgagcaccaccgtaaacacagttctagggttttgaaaccaccgtcctggtcctcgtggcttgaaatgacgaacttggtatcgatcaacgtagtaatatctcttgggttgactcagaaacggattatacgcgattctgttcgtgtttcggccgagagatgtccatgatcttaatcctacttctcgcgaagagattgaagagaacttagctgagggattagaagacccaattggattgttgattctcgaagtaacatgagatcgaggtagaatcttcgggtttatgttgcgtcgcagggaatcgaatacgagttttgttcttctgtaccatgacattgctgggaacggagcttgaaggagaaattcgtgagaagaaaaggaagattggcgaagaagttttcggatcgaagctttggcgaattttcgagaaagaagaagaagacgtcgtttaagggagggcttcattcggttatttccggtacaatttgataaataaccggccaaagattcggtttttcagtttaaaattcggtttattgtcgctcccgagaacaattaaccggccggtttgagggttaattcaactattcctgacagatcatacaacaaacaaaaaataatttttcaaatcgatttctggagctgctgtgttaaaaaattataaccgtaacatcagcattcgataggcgaaaacctgcgatgataatttaggcggtgatggaggtgtgtgaagtttcgatgcagctttcagaggcttccacgtttgtacacgtgttgttttggtttatttctcttctttgtctataatcaaacagttagtgggccttttgggctgttgatattgtcgcgttatatgccctttgggtttaatgaataatctacatatacatttttgcagccattttgtaaaataaatccttgagtttagacttatttataatggctgttactggattttaattatttgaattttttctaattatagtttgaatatttttaaaacaaataattgtataataaaccaaaaagattcgaaatatatggcaatcccatatgtcacgcaaaacacaataaattatattctccttatctcacctacaatattcactaaatcttaaaacaaccaaaatttgaactatttgaattatttcaattaaatttgggcaaacaattaaagcaaatattgtgaaacaaaccaaaatacatttacaatcccgtaaaatgagcaaacccaattatatgtgcacctaaaaacattccttatcttggtttaaatattttatgaaattaaaagtccataactttttcgacataaaatcacaatcacaactaattcaacaactaatatttaaacttatacaaaactaaaaaatcatgagacaaaaaatataacgggacggatttagattgatatgaatagcagaacgggtttggattgatataacacatgttaaatatttattttattattttatcatcaccaatttttttagttacaacattaatataaaattatataactttaataataaacgaaaaccgtaaaatttatattattatatatataaataaaatatttgccccgtagtgtaccacaggttaaatcataatagtttagtataaccactaaccgtaaaatagattacaataaaacagttcatacaaagttttactcgtagactcaattttaggagaaaagtattgatataaaattttgctcggttcatacaaagattagacttgtactcttcacattgttttataatttttggttttagtgttacacgtgaaccgtaaacatatcaaactgttagttaaccgtattatttaccgtatagttaaaaatttaaaaatataattaaaacaatgtataatgcaaaaaaaatatctaacgtttagataaatgttttcaaaaaaaatatcgcatataaaaacaattacgtcacaaaatggtcttttctaaaataaatatgttataatgctatataaagttagataattcgtaagatttcgtcactatattaatcataatcactaataaccgtaatcgtatttaatcgtaatctctatacccgtaactgtatttaatcacaaccattttaaccgtatatatagtagttaaatttacgattgaacaaaatttataactgcaaccagtagttaatcaaagttgatatggattctatcaaactaattgtggattctctcaaaaaagatgtggactgtgtcgaaattatagtgaactttgtgttatgtccattagtttgatgcccaaaaaggaggatttacttgcgattttttcctttatcaaaagaaccttctaccaaggaaccttggagttcatctagctcagatgattcgtcaacagatgaatactatctacaagatgttttgcttgcttctggtctggtcccctagttgacagagcagctattgatgagttcttcaaaacagttgctctggttgttggagttgagtttgatgaggacaaaaagaatgattatagcaaaagtgcaatcattcagtttgcttttgctaaagagttgttgtggtcacccaatgtttctctgacgtgctaccaacggtttgtaaacaacatatgttaagatggtttgttaaaactcttttcgaaaaaaagattaaactataattggttgagcatttcagctcaattgtaaatgttaaagggatttatctttacaaagacaaaaaaacatatggtttgagcggatgtgcttacaagactggtccattgcaaaagctattcaagcaatgacttaaggcatcaaaagagagttaaggacatattttagaaattatgttaagatttttatgtaaaacacataatcttataggttttttatattaattcattttttttttgtcttttcatttacaatattacatgggctttaagatttaaagttaataaaatattagttaaactggataaaaatagatatttgtacaaaaatttctctttgattaattccattgttatttcttctattgtttgcttggattccattgtaattaaggtaatggacttaattacaaaatggaagagtttgctttgaataaatagaattaaaagaaaatgttttttcactattatttatattttttacaaactatttatggatttaaaaattgttttatcaagttttagtatgcttttttttattactatatgatttgaaagtttacaaaaaaaagtataaagaaaactattatttctatttgcgttggacattcgaaattatcagacgagtctatctgcatatatcaatatgattgatgattatgtgaaagtgacacacttaatctaagtatcatgactggaaaggctgagaagctcgagatgagaaagaatagggttgactcatcgatgatacttaagagtaataagattactttaaactacaacgacaatgattagaaagcttttagaagaagatgaacctttttttgtgacatagttcagaacattgttgagctttttctatattttttgtttatgtaatgttctagttaaggttttagttggaatgtgaaaaataaaaaattctatttgaacactctatttaaacacgtcaatggaataaaatacttcatatagcctattcaatgtttctgtgttctttgatttgcagacggatcgtttcttagcatcttggcttaattcatctccccaatgtatgagttcaaaattgtgcataactacgtaaactccagctttaatcaacaagtgatatccattttaaacacaatgggcctcctcgagtttgttaagaatcacttatgcatgcatcggttctcaaaccggacctataatataaatctaaagaagggatcaacacatcattctcaaccggttgataatcatgtctttgaactaaaccggtttgaatcatatcgaaccgaattatccacacttggcctttttcaccaaatttaccaaagattacaagaccaaacaaggatcggtaagaaaattttgtaaatttgtcttttatatcatcgtttggacgattataagcttcactttcacttagattgagggcctgaggctggtcgctattacttgttgatcttgctagaactgacaatgccatacacagggggattttctctaacgaaatagtaaatcacaaattagtgacaagtcactattgttatcatgagacgagaatcaatcatcaacaacaaatttatgtaccttgtgtatttacgtctagccaaaagacgctgacaaggtttcttgataaacggaccaccactcacttcataattgacatagaattcgtctctctctgtagcgtcatgaacttcaagattgcatcctcccatgtcactaccattaagttttaaagcgtcctctgtgccttgtaacattacaatgaacacatgtctgtaaaaagaaagggaaactacattagcatttaactttacttgtcacaaaattggagtaagaaagtagtcacagactttaagacagcttcaccggcgtcatttgtttgaaaataaattcttgagatcattccacatggactgaaatgttcaagcaatgctctcgcgagatcattctcaccaagcgaagaatcatatccctttacgaaaatcgtgccacaatcatatctgaagttaccaccagttaatttgcagggagagaatataatcaacacatggaacataagtctccaaaacatggaaaatcaaatttacctccccccttgttttggaatgaataaggctctctcgcctacctcagcagtctttgtaagattcttaaaagagtaagtaggtaacgttcgttctagggtttctttcttcactacatcagattccttgctagaaacattacggctgctctcttttttacaagtattggtatctgttttagcctgtatatataaaacagaatacgatatttttgtgaattggcacttacaattaaaaaaaaaaactatttcttacctttttatgggcaggctcttcaccttgatcacttatctgccaaaatcaaccaaaaaaacatgtttgactcaaagaattaaaaagactcagaaacaaatatccacaaagaagtatagtcaatgcggttggagaaagaaacagctagcttgagtcctaaaaggcacacattacataagcaaaataatgaaaacaggagaacataacaagactgaggtatgaagtatcaccttgagatcctcagaggatgcagaattttgaataactggtctgacaatattcttaaccgaagcaggtatccttgcagtttcctagttatgaaaagtgtatgtaagttgaaaatctatctctacttgtgaagaaaatctcaaagttatatagcagaagtcgtagtaaacacaataaataagtgatcaagaagagattttataccttgaatgaggtaaaaatggcaagtgaatctttctttgtggacagcaaatcaaatgttgatttcaaagagttcacagttgctttgagagaagccacatcttctttaagagagtccacaacgactttgatggaactcacatcttctttgatggaagcaatcagacagattatctgttgtccattttatagaaatctgttagagagtgaaaacaaaatagtcattgtatcattatgaagaagaaaaataggctttaagaacactcgccttcttctttggattcactgtctccaattcatcctcagccttccttttatctgaaagagagagcagcagaatcaaatacgaaatcagcaaaagcatttaaaaaataattacgatttacaaagtcaataatatacttaaaacgaagacgcttattgtaatctaagaaccttaagagtcactaatcatgctgggggatttatgaatttatggaaccaagttctggggattcacaacatgacaaaaccgaatctgtcggaatcgtttactaagggaatctgtcggaatactaggctatcggggaccaaaattcttacctggagaaggagaacctaacatacttttgctagattgtcccattgatgtctctgctgctaggattcgagagggagtggattactatggaagcttttgtagacagcttcgttcgtattctgttttttttggatgggcttttgcgagcccagatccgtgaatgttgttggtgttggatttcttcactcctccgaaatcggcccattattatgtttaaggcccaataaatttggaaaattcattagattgagttttgactaacaaaaaaatttgatctaaaccaaatcctagttaatacggtttagtaactcgtttagggaaaatcagctactgtatatcttggctttggccggtttagtaaactaacttttgactttctacttacttaaccaaactaaacctaaatcggggaattcaaactataccataaatatggaggccggaaaaaaatcatccaaaacttggtcaacgctgagtccaacgtggccatcagccttcggcgaatgattattcgagaaagaggaaaaagtgagtcgttttaggggaaactgttaccaacgccgaaaaacaaatgctttaactcatcaccggaacaaatctgactcaacttggtttgttacttacctgggcggtgttcacggtgaataaaactagtaaaagtagtaactagttatgaggttacgattaaaaaactctttttgggacacaaaacaaatttatttactcaactatatcgaaactgactaatgtgggttacaataatatagattttatagatcagtgttgagaaatgatcagcataacccttgtcgatcgtgtttagaatgcgaacaagtatgttaagatacaaagaagaatataatagcatcaatgatttacgtaccatggtggcaaaatattcttgtgaatatataatggaataataattatatgaatacttgatccaaacaacacaacatacgaatttggtgtcaaagatatgagatggatatttctatatgcgataaatttgtaaaatctaaaagttgtcgattaaatttacgactttgttaattttaatgcatttttggataaaaatatattcaaaaattagaagaccaaacaaggatcgctaaggaaattttgaatatttttcctttattataagcttcatttcactagataattttcttattattcaattagacgagtatcaatacatcacacacaaacaacaagaaaaaaaacaaaaagaactactgtttcttgagaagaagagggccaacgttatctccattagctttgttgtgcttcacatgactcccatcacacaatggaaacgtccccgacctccaacacctaaagtcaaatcaaatccatgcatgaccatgattttatatacatgcacaaaaatacttattcgtacatttgttcgtttgtaaaaagactactaattaagaaaaatcttacgagcagaagctttggcaaaacatatggattagtatgaagatacattaatgtataaatcactactatgcatgattttaattaaaacatgattcaaatagtagctaactatgttcttttctttcctaattaataagagaatgtgaacctgcaatagggagttatgttcttggaaagctcggtgacaacgacggagtcaacaaccttatcttcgttctttctgatctccggattgatacctccaccgccttctgctctcaccaccaccattctctgctgctttcgtcccacctctcccccggtgactggcttgaatggaagctccccggcgtaacttagccccgtgccgaacgtgcttgcgatgatagccattggaataactctctcttactcactctctatgtggcagtgatttgtttatgaagtaagacagaagatattagatatatgaaaggtaaagggagagagagagcttgtggccatcacgctccctctgctaaacgacgtcgtaaagcgtgtgtatgagatggaagaatcaaaagatatggtcacaaactcacatgagatttaatcacaaaaatatgaaaaatcagctgcaaaatttattttttacttacatttagaatttacaactttttaatgttcttatattatattgattcaaattaatacacatagaaaattgtgtataacattattttaaagatgaaaaacactatttttaagatgaaagaatacacatatatactgtatatcttttctaatttttgttctcaaattcgtctaactaagtaaactattatgagaaatagttccatacataaaaaatttgcaaaagaattcgttgcaaattttaaaatagtaattttgaagtatttgcaaaggatttggtcataggctaaccttaactcttttttttctaggttgttatttaaaattttgaaaatggtatatattcacgatggtaaaattttttcaatagatgaaaattccaagaggatgtgttaatagatcaaatgtataaatatttttgagtatttctctgcacataatttcaaaactgagaacctaaaagtgaaacgcatgacgagaattcgagtcgaagtgtcgaaccaaagcttgtatatattgccctagctgtggaattgcttcaaaaatgagtgtcgtgcaaaacggactagttctcttctctctcacgacgagactttaataagaacccaaaacaagttcgcattgacacgtactacactaattaaacaacaactattaacaaccattcaacacaaaaactctttcccattgattcaatttcaaaattttggatctaataaaaccaaaactctcattaaaaaaaaaaataaaaaaatcaaatctgatttctgaaacgtttttgattcgcgacgattcccaaattcctgggaaaatatctctgatcgatggcgagattcgcagtgattggattaacgttcctccttttacttggtacgtccttatcagcgagatctgatgaagaaacacgcgagcgattttacggcaacgtcgtgaactcgacggctccgggaaacggtgaaggaagtatcgctaaaatgttcgatcgagttctggagaaagaattttccgaaaacgattcgcctgaaggttaggtttccttcttcttaatcgatctcttttgattgaatgtgagaaaaaagtaaacggaaacattaacaatttattctataatcatgttttcttttgcttaggatctgatggagctagctttaacagcagtgttgctgatcaacaagtaggttttagttacttgttatagtttttgatgttcttgagctctggattcagattctcccttttttgatgtttccaggctgaaatagagactgttgctaaagtaactcatgagaagggcaaaagaaatgatacacaagaaaataagtatgcagaaattttgttgtcattgttgaaaatagctatatttgattagtggttcaatgagggtttatgagttatttctcctaatgtgtgtctagtggtacgagaccgtttcaacttcaagatgtgttttccctggagaatgaagattctgatgatatgactcttattgacaagaaggtttttggcagaccatgctatattttttatactgatctcaccatttatttgtagttgcagctaatgttcttcattatcccactctgcagaataatgtttttgtcatgtcaaacaagaaatctaagtatccgatacttcaagtagatttgaggttagtctctctcagatttcctctgtattggagcatcttgttaaatgcactgtttcagacttgtgatggataggttcttcacattgttttcagattaatatcagatttggtggtcattattgtttttgctgcaattggtggcatcgtcttctcttgtcttggacaaccggtatgcaaccttacatattggcattgaaatacttctgatattgggttccttgtatttcgagctacacactatggtcaattatctattctgatgttatgttatacatatgctttaggtcattgttggatatcttcttgcggggtcaatcattgggccaggaggattgaaattcattagtgaaatggttcaggtacgatcaaaatcggtagacatatttttgctagttatattagattatggcatgcaaacattacaagaagacattaatggaccactttagtttcggggatgttgttacatgtatctattttctgatgtctcttttcgtgcttttacaattaaggttgattagattcaaatttccctactgtatagcaattagattttcggtgactttagatggcatgccaattatagcaatcagatctttttgctttctgattgagcatgttaacgttggcttcaccattgattttttttgttcttgtcgtttgagtttaatccatcagtatgggtataaatgaaaggatgacgtggagccccacagtcatacggaaaaagtactctggtattcacattttctgtttcttcttctgatgctatggcaggttgaaaccgtagcacagtttggtgttgttttccttctgtttgctttgggtttggaattctcaatgactaaggtaggtatatccttacatttgactaacttgaatacaatttcatgtcgactttgcaatatcactctgacaatctgttgttcttgtgttaatgctacagctgaaagtcgttggcccagttgctgtccttggagggcttcttcaaattgtcttactcatgtttttgtgtggtgtaactgccttggtatggccaaagatttcagtatgtgtgcatatacggcaatcttgaaattatttttagaattgatatctgatgacatgtgcagttgtgtggagcaaggttgtcagagggtatttttgttggtgcctttttatctatgtcatcaactgcagtggtatttttcttttcttttgtcttctcaagtttaatacaaaagctactctctttccggtttcatctcagagtttctgtttctaatccacatgtcaatttgaccaggtggtaaagtttttggtagaacggaacagtacaagttctcttcatggtcaagttactatagggatacttatctttcaggtttcactcacatcactctatatttacaaattgaatatttcgttttacgaaatttttgtttcctttagcttaatcttgaattttcaggactgtgttgttggtttactattcgccttgcttccagttttgggtggtaacagtggtttactacaaggaattatatcaatgggaaagctgtaagtggttccctagtaagaagtttgtccaggaacctcttatatatcctcattaccgtctctgacataaaacattttcttcttctaatttaggctactgatattgtccatatatctcactgtggcatctctattaacgtggtcatttgtacctcgttttctgaagctaatgattcaattatcatctcaagtacgttttagacgtcatatcttcatatacactacttgtctatctttatttctttcttaaagtgggatccaaattattgccaatgtctctcattatataatgcagacaaatgaactttaccagttagctgctgtggcattctgcttactatctgcatgggtaagtctaattctgtcatttctttgcatactggtgcttgcttagctttctgatcccttttggtgtattataacatctgagttaattgttacctgagcttgcatcttactaatagactacagaagaaaaaaatgatgattacaatagacactgaagtatttaagtataatagcatattgatgtaatttccaatttttaacttagagtgttggttcctcgcaaaactttttcagtgcagtgacaagctgggtcttagtcttgagttgggatcatttgtggctggcgttatgttgtctacgactgaatttgctcaacatacactagagcaggtattgattctaaactcaggtcgcttttgctttgcgagtacgtggtacaaaatgaagtcttaaggtggtggaatctcccttactttgtgatgtaggtggaaccaattcgtaatctgtttgccgctctctttctatctagtatcgggatgctcattaatgttcactttctatggaaccacgtggatatccttctagcgtcggtgattctagtgatagttattaagacagcaattgcagcagtagttgttaaggcttttaggtacaacatgaggatatctttccatgtgagtttggtctctctacttaagcttttgtgagtttctacatattatactattaaaaccaatcacgtaaatttcttgtcacaaatgttatatataggtcggggtactgcttgctcagattggagagttcgcctttgttcttctaagccgagcgtcaaacctacacgtaatcgaggtaacacccttttacccttgtagttgaacacactctttaccattttcttcttcctaaactttgtggctttgggattaatatgaatgaccaatgtaggggaaaatgtatctactccttttgggcacaactgctctaagtctcgtaagttacctaatatatgcaaacaagccttttccattctaagagaacatacttaaaataatatttagttcaaaactgattacctgaaaatgctgttacaggtaacgactccgttgctattcaagttaataccgagtgcaatgaacctcggtgtcctgcttcgatggttcccttctgagaacagttctccgaacgaggtcattctcttttccagatctatttatatttaagaactgagataagacatgacataaaaatgaaaatagatgtattgattataggaaactgacttgtgaggtcgtgactgagagttttgtttgtagagtttgcaggagaaagcatcattgatagaagtacataacagaaccaagtgatctctcttttgtacattgactgaagatttaagaagaaaaaacagattttgatccgatatactcaactaggaggcagaaaaaacatttgaaactgaccaaatcagatccaagacttgctttttgtattttcttaactctttattttttgtaatatcgtatatatttagtattcactaccttcttgtgtagttcaagcgcttatagcttgttttacttggtgtaaacgttgtaacgatattagccttatatgctgttgtttctttaatgttcatcacaaataagaatctcaatagaaaccacagagttctataattgtgtgctcaaactccacatatctaaagtgcgagcaacaactagatgaatttagaggtataaatccattgcaatgcacaacaaaaataacaaaaaagaaccctccttagaagaacaatgacatcaaagtatagaaaaggattgaggtggaatgaagtaagaggctggtgaaataggaatttagtagcacatatatgaggacacgtggagcttagtgattggttgaaataagaaaagatacgtggattcgattggtatgagctgaagttgctcaagcttaagatcaagttgttcatcgtcttcttcattatgcaaaaatctgagaattgtaaacttttcttcttcttcctttcttgtgtgtttggggttgttactcattgttagtttgagatacttccttcaattcactaatattatttatttacgggcaaatcttaatgtgagatttttgcatagtgagaagtgaatctgcgttttatgaacatcgtttcaatctatagttcgatttcatttgtgagattgttgagtttcctgtatcagctggttaaatagcaaatctaccattcttatcaccattacggagattgaattttccggagtcatggctttccacgtagtagatgaagtttggggataggccatacaagcaaacttggagacggaaatatatacaaatagaaaaacaaaataattaagattagttttgcacaaactttgcaaaaacatcaaaataggtccgacatttaaatcacttgcttaggtctataaaataacactcccatcattcaacatatttttcctcttgtgggttagacctacaaatccgtggataaaactctttaaaaacctgtaatctgtaacatattggcttattatccatcacgcatgctattttatggacatgaaaataatgtccaagcggaccaagcccgctctgcatggtattatttgggccgaggcccgttttactcatcagttttcattaccggtcaaaactcaaaagtcaaaattttctaaaagacgaaaaagccctttaatttgatttcccaatactttttactcctaccttctcaattcgtccgatttcttcacaaattcacgagagagataatggaagtaggatctgcaacgaagaagcttcagtgccaacgtattggctgcaacgccatgttcaccgatgacgacaatcctcaaggttcttgtcaatttcatgcttccgtacgtcttcttctctccccatctttaatcgattcttctctttcttttctaagtcttcgatagtttctgataaacccatagagtagcttttgaatttgattttatgatgtgaggttacgaatttcgatttttgatcatgagaagatgattacgcaagtgtttaattaggttttggattagctgattgattacatgtagatttcatttagttgtaagtaagtaagctttgaacacagctttgattgtctaattgtcaaattttaactaagttgtttgcttgcaacctatgaattctgtgagactgtgagcttattagaacacttgatggaagaaagcaaaagtatattgcgtaaaattgaataatccaagtattagatcttttgccaccgtttatggctatgtgagggagagtgtacgtacatgcagcgacttttgaattgtttgcttccaacttttgccaccggttatggctatgtgagggagagagctcgttaagactgtccctggaagtgtaattagaacaattgtgtatagaaagaaggctttatctcaatattcatcttaacatttggccttgtatactagtgtttctttcatattcatctattgctttgagctttttattgtaattcatcttcttttattatcttttctttttccggtgtggctggggctggtctttgcactgactactggtttttgttcaagcagggagtaagtcaaatttactcttcaaatactgttttatgtttttttttttgtttcacactcgcttgctcagagaattaaagctaccaaagttcaaacttgcagccattttttcacgacggaatgaaagagtggagctgctgcaagcaaagaagtcatgatttcagtttgttcttggaaattccagggtaactaatatccttgtaccccctcataataattcctctgtctttcatggtacatattgtagttgattgcaaacactgaagatgtttcttgcaatgaagatgtaaaacaggtaaacacacaactgagaaaccagttctggccaaatcggttccaaaacatcctgttgcggctcctacttcatctccagatgccaatgcagcaacaaaagactcttgctccagatgccggcaaggcttcttctgctcagaccatggtttgtatctttattctctcgtctttaaattctcgttgcacattggttacatgcatgaccttctatctaattttgtgtccttctttaccacacaggatcccaacccaaagaacagatcaagcagaccctgaacacaccgggacaagcagaagaagaaaaaattgaacccttagcgcctccagtacaaaaggctgtgatagacattaatcaaccgcaagtctgcaaaaacaaaggatgtggccaaacattcaaagagagagacaatcatgagactgcatgtagccatcatccaggtcctgcggtcttccacgacagactgagaggggtaacacgttctttgttcaatcattttgtgacccttttctttcactgtttgaatttctattgaatatcactgttttctttgtgtagtggaaatgttgcgatgttcacgtgaaggagttcgacgagttcatggaaatacctccttgcactaaaggatggcatagcagcagccctgatccggcggtctgatatattttttttcctgagattttcgattcaaagattaatcatcttttctaattgtgttttcatgttcttcttatcatatggaattctattttagatttgttatagaacctttcagttgacagatatatgtaatggttaaatgctcatcttctgtgttttggatcatgattatggctttgattgttgttttcaaaactttgaagatctttaaataatttcaccaatattagaaggactatttagcaacttttaaaacgtagagacaaattgcgaatatggaaaaataatttgccaatttatctcaaaacttttgtatttattcgactctttttcaacttcgttactctcaacgaacggctcgaatctctcttcaacgccggaggcaacaactatctccgcggcggagcattttccgatgaggttgatagtacctctccgtggagtaattcaaggccgtggtggtctcttcgtcggctctctcattccttgttgtctcttctactttctccagctctaccttaaacgacgccgtcctcctccctccgacccgacggacttaccgagaactttttcacggactaatctcttctctcgcgggaactcgatcggacgagttcgagtctcctcccgagcagttcctgtagctaaaccttccgattcgccttattacattgggttggagagagtcaaaacggatccgtacgatcggattacgaacacggatgggattattcagcttggattagccgagagtacggtgagattttaaaagttctcgatgatttcttctctttgtgattgttgcgatgaggtttaatctgatggggattgcttttgtgagttctgtagctgtgctttgacttgctacagagatggatgtcagagaatttgatggagtcaatgatgcaatctgatgatggtgaatttgatattagtagtatcgccatgtataaaccttttgaaggattacttgaactcagagtggtaagtgcatacaccattcacttttttattcttcaaattttttgaggaaggatagctttttgcagttattagttaaatatttgactgcaaacgtgtatcagaaattagaagtggtttgattgatatatgttcttgtataggatcaaaggaatgttgattatatatcagaaatttgtgtattcaaacttgtggatttagttgtcccaacaatgtagcgaaggaaattgaatttcttctattcctatcatgtttcaggcttttgctgatttcatgtcacgaataatgggaggtaatgtgtcatttgatccctcaaatatggttataacagccggtgggactcctgctattgaagtattggccttctgtttggctgatcatggaaatgcttttctaattccgacgccatattatccagggtaatttttagtttacacttctcgaccattagtatgtggtgaaactttttgatttatacaccagtcttctcttcctatgcgatgtactaaggaaacttcattttgcagctttgatagggatattaaattccggacaggagtggagcttataccagtacactgccgtagctctgacaattttactgtaacggtttccgcactggaacaagctttgaatcaggctagaaaacgaggaagcaaggtttctggcatcctcttttcaaacccgtcaaatcctgttggaaacatactatcaagggagacgctttgtgatattttgagatttgctcaagagaagaacatccatgttatttctgatgaaatatttgcgggttctgtttacggggacaaagagtttgttagcatggctgagatcgctggctcaggggaatttgataagactagggttcatatcatatatggcttgtcaaaagacctttcaattcctggttttagagctggagtcatctactcctttcatgaagacgtagtaaatgctgcaaagaagctgatgagattttcatcagtgccagttctagttcaaaggatacttatctctctactatctgatgtaagattcattgagggatacatggcagcacacaggcaaaggatccgggataagcatattcggtttgtggaaggtttgaaacaattaggaataccatgtgctgagagtggtggtgggttgtattgttgggtagacatgagcagtttactgacatcttacagtgagaaaggagaactcgagttatttgagaagctattgactgttgctaagattaatgccactccaggaacagcctgttattgtatagaaccaggttggttcaggtgctgtttcaccgctttagctgatgaagatatcccagtgattatggaacgaatcagacagcttgctgaatcatttagatcttgaggtcgaaccagaattttggttagtgtggtattgttacttattggtagacattattttggcaagtcgttatagcttgaaagagaagaaagaaataaacgatatgaattccttgtcctgcagctgaaagagtatggcattgaatctctcatctatttttacggtactgcatatacaagtttcttctctaaaagagaaaacgtctcctgaaaatttgctgtttggggatacaaattgtgaggatctttataagtgttttcttctaaatgagcttcaacctcggttggtattttttccactcaaggccttctatcattttgatgcccggcacaaagaggcagcagctatcagctccattctttgtaaattcctgctaatttatccaggcacttgtcaacatttcagaatcttttttcacgattgaatttaggtatgtgcgtgataaactgttacggtgcatatggctttggaagactatgagaaaagatatttgagagtcttaccgtgtaaggattctgctttctcatttcaacagctcttctcatataacttctccttctgctcatcattatcagctccccgagtgtctgtggcgtcctcacaggaaagccaatactcatgttgtcagtttctgtagtaagcttcacttcttcatgcaacggatgagtagaaacctgaacgtcctcagaaacagcagctttgaccttttctgatggaagaagacgtggaaagagcttttccaagaacgaagctcccacaagactggaagctcccgtcatgtaactgctagtactgtcatcagattcataagctggcgatgttggcatcgagctagtcactgtattcaggttgtcatcaaattcatccaccgcaacagcaccggatatcgaaaccgagcggtttgttgctaatagagacggcacagagctgaaggagtcactgcttgcatcatcaaaaatatcgctgctggtttcaacatcaccgtacatgggaggcggtggcagcggttgatccaacagctcaggtggactggtatcaacaaagcatgggtatggttgtcctggagtttcttcccaatcgaaaggaaccgaagtaacctgcttaaccggaacaggaactggaggcggtaatggagtcggcgtagcggtttccaatggtggatgtggaagctgaggtgggtcatttgaggaagcagggagtggttttccaggcgtttcttcccaacggaaaggaactgatgttaccagcttaaccgggactgggataggtggcggaagcggaggaggagaaggcacaaaagtggctagtgaaggttgccaattcttcttggggaagccaggccgctcttcccaaatgaaaggaacagaaggaggctgtctcaattgttttcgaggtggttttgtttcttttggttccatatcagacatttgttcgtatctcttacgttgttctctttatttataggcttttatgggtttgattagtcaatgagatgttgtgttagtaactaaaaccacttagaatttaaagcgtgtgtcgtggtattagagctaactattcttctttctcatgaagattcacctaaaccatttggtgtcgtgtcaccaaacttgtagatccacttcatgttgactttattttatgtcatcattctctgttccacttaatctcacaatctaatccattaatcttatcttcattattccgtttcgattgaaatatctcttgtcatatcaacatttggagtttttgatatagagtatgaacataattgtgatcttaagtccaaacccaattttgatttctcatttgggaacactagcgtcttcttttgtaattcaatcataaatcattcaatagaagagtgtttatctcatatacacacattccaccaacccattaagagagccaaacaaaaaataaatgaatacttttagggatgggtcatggatcaatactcgccctttctttatagcatacattcgtccatactacatatccataaggattttagaatgtgttgcaagaacaataaaagtgaaggaataaccaaaattagcaatgaaataatagaaacatttgaagactgagaatggtaggggctgcgcgaacgcaaaccccctctgccacaaataatgacgcaggctcttccacatgggaagaccttaggctaagcacccttcctttaagtgcaatggaagtcactagcctaggccactcgtcttcttgatcacgagttgaccccgtccaggtaagtactttactcgatcacattagtttttactttatactcaagtctcgaagccttcttgtttcttgcaaccgatgtgggactttacactctccaccttccagacatttactttagttttcgactgggctggtcttcttggcccactgttaggatccagtaaacctaaattattaacaaagccattattactaaccttagagaatcaacggattgtgttatacctaaaaaaaacattactagcaataaagttatgtagatctctaagttacaagatatgtaagttaattcgaaaactaactagaaaaaaatgtagagaaaacctttaaattatggactaagtcgctatgtaacattaggaacaaaaaaaatcattcagagaacaatatgtagagtttatgggtccgatccacaacaaagaagattaattgtaaacaatttttaattatatatattaaacagaattttacgtctaacagtagaatgatataaaatcctagttatatatcaaatatatacgccctaacgttcaccatcttaacgtcttaacatttgccaaaaaaaaaaaacgtcttaacatttaaacatttagcatataatttcattttaaacatttataggattcttcaggaagaaaaacaacataaaattccatgtttcctaatgatc

SEQ ID NO: 880 - DNA, 16203 bp, Arabidopsis thaliana
aagttattaaaacacatggcaatggacaagagatccaaacaaaatcaaattgtaattattcttaccttggcttttagtttctgtagctcatcttcatataacttagcctaccaatatcaaccaatatagaatccaaagaaaactaagcaataacaccgtgattttgaaagtaaaatctcattacattgtaaaatggtaaatcaattttgtattctgttacctttcttaatctaaccatatgaaggcttttctctatctgtgtggctatctctgaaagttcttttaccgaacaagaatccaaactttgtcccatcatcttcctaacaaagccacattttcaaaattgacacacatcctttagtaactacttgaaaatcaactctatcataaaatatttgaaaagaaatatgacaatgatatatatacaaaccggttatggacttcaagcacttcaatctttttcaccattgtcaccatttccttctttagcccctgtatatacaaaatgtttgtaccaaatgtcacaaaagtaaagccaaaatgtgactaaaattattttcaacttaagttggacatgatacatgcaaaaaggtttgtaagtcatttatgaaactagagtaataattgaagagaattgttatatagaaaggaacctgcacgtattgctctataggatgagtttctgcaacaaaatactctctcttgtactcagcgtatcgctttatcgtgttcctgatactaagacaattctcaagaaaagcttcattagtttgtgagattaggttgaataatatctgaatactctcttgcatggttaatcatgtcatcactagtttatatattggttaagataaactagacatttattggatatgtttgcatgtgtgtttgagtgtgtgaatttttcggatataaacctagctagatatgcatcaaagtatccatgattgatttatcgtgatgatgttattatgcaaatcattctccccgaccatatgcatacatgagctgtccgaccataaaggtcgaattagactatgggaggcattaaatatagaagttcgactcagaacatgaacacacagttgaactatcatatataaagtttatcaaaaaaaaaagtatcatatagaaagtgccaaaaaaaatcatattcacactaatctatttctcatatatatactacatgatttatatttatgttcttaactatgaaaatccatttgaatagattaacatatacattatatgtcaaatggtttgtgggtttccgtttcatgacactttgagttccaacgtagaataaggctcaatattcaataatctatatttctgaaaaccctaattaattcataatatgaacaacaagtggaactataaaatgtaaaaagaaccggaagtaaaaagaggaaaataattgttaacaaaaaaaatctatagaacataatataaaaataaaattgaaagatgcaaattttgggaaatcttacctagatatctctagtactacttggtctgaaagatattacactacacaagtactataatgacaacaaatatcaacatcataaaaaaatattgaaatagtataataaagattggagtaattaatcaagctgaaattaagaatcttactcggagctagcgaattcatataatcttcctttctgagagaagatcatagctgccacttgagcatcacatagaacagaaagctcatgagccttcttaaagagaccactccttcgcttcgaaaacgtgacttgtctacttgtcacgttctcaatcttcttgatttcgatctttcctctcaccatttcagttacttcctacaaaaccaatccagatttgataagagatttatggaaaccctaactaaatgtgaaagatttgttggcagatcagagaaacaaagtcacaagaatccaaaagtcaaaaaccagaaacggtttcttgcttgaaaaccaaccgtgagaactttaccaagaaaatgtgggaaaatctgagaaacaaaaggtaactcccaaaaccccttttgagagctagttttgtcgagattcgctttaaaaattcactcaagaagacgaatttggatagataaggaataatttacataagaaggaaaagaaaaataatttgatggaaattgaaatcagaaaaagctttgtgtttacctctcttaggctcttagtgcaggagccacaaaccctaaagtctaatctattgtttaacaaaatgaaggaatctgtcttctttaatttggtaacgttttttttttccattagcccacgtaggcagtaggtaaggaaaaatagacgaagaggaatctatttgtctatgtaaaatcaactgttcgttaaaccggaccggccggatgaatcggttctaatgtgggtcaatgaatttgtcgaaagtcgaaacgttcagctatatttatttattaaatggctaaaaacataagatttattatataattggtctattattgagttttcaatttcatgttaatacatttttattaaacacacatattaaaaaaaaacatattaaaactgattctaaatatattaattttgtgatttacatttttctataattctaaaccaataatattcaattatttattttgaaaattaaaatacatcaatgtaaaaaaaatcaaataaaaattaacagagagaatatttaacattatttaatcatatacttccgatgaatttgttttgggtcaccgagtcaacaaaaaagacttgttaatccaagagttgttgttacttattaattagtgtcattaaattctgaaggaccaatctgtttggaagaaaataatgcaacctgtctgtttggatgaatactttatacttttatagtcctgatcctgaattcaaaagagctagattttgttttcgccaaaggttgatttttcatcaatcgaaaatgagaaagaaatagttgcgtaaatcgataagcaatcaattgtattcacgtgtattttccacttcccctaaaatcaagactaagatttgttttaactgttcgtcttgatttggtctttgattgatagctagcttcttcagaactaaaaagttcaaaaccgatttgtttgagctaagtcaagaagacgtcagattaattagacgcattcgcatagaaacaaaatgtcacattcattcaaaagaaaaactaaagtgacaaataatacatgtcaaattattttcagtttatacacatatatatatgaagagatggtcatgcatgagcactcagaaaactataaactgtatggaagcattatagtgtacaaacatggaaccaaagtaatatgttatagccgagtcacgggcaatccgataaataggtcggtttcaacctctgatgaatgtttggttctgtgaccaccttcagtattacccttatcacatatttgtaaagttgctggcaccaccggtcgcatcaacctttctctattttgctgaaaatgtcatgtaaaacgtaaatgcaaacacaaacaaacaatcaaggcctctatgaactatgattattcttataagaaagaagttttaagtgcgatgaatctaagcctctacctaaacgaagagacataactaaatttcatgtgtatttttatatgtaacctttgatgagtggtgcatatttacctcttcaagcagcctttttctctcgttcaagagctccctctcctagaatccgagcaagaaagatcgattaaaaataaaatcacatggagaaaatacaaccgatcccacaaattaaaacttgtatataagttactcatttaaaaaaatttaccttttcttttagctttttcagttgatctgcatataactcagcctacgcaccaagatcaaccaacgaagacataattacatcattaacatgtgtgtatatgttatatatatatttgtgtccgagtgtttgtacctttcttgacctgacaatacgaaggcttttctcaatttgagtgtcaatctcttgaagttctgtcactgaacacgaatccaaaccttgccccaacagcttacttcatatatagtggcattcaagaatcaagagataataaatttcagtatattttaggactgaaacaaagtttagttatatacaaatatacaatgcacagagtaattaaccgtaagaatagtaagatgcgaaccggtgatgaacttcaaggagatcaatctttttcaccattctatcaatttccatcttcagctcctacacaataatacaaccccaaaaatagtcgattaccatctgaattaatacatactgtacattttttttttaaataaatgaagaaactaacataaagaatatatatgaatatagagaatgaacctgcaagtatcgttctacttgaggcctctctgccacatagaaggcattactaaacttgccatatctatctataatcttctccatcctgaaaagttaattcacaagaagatatttgtcagtgatgaatgatgatgacggatcataagattgaaatattatggacgaatattcttaatatatatatatctacatgttatcttttataccgacttagcttctatgatagatttgtccaccaatattttgattaatgtagatgtctataatttagataacactcatacaatcgaatacttttaatttttgcaatcaccaaacctagtgaaggaaggtttttgctgcacaaagattgttaaacatgaaatgaaaaatgaaacaaagggaagttatacaaaataaattatactctgtaaagattgtatagtactaatctttaaaccaattctattaaccacaaaacaaaagggatttataaaatgaacaatgtaccgacctcatgattgtaaatctagtgaaaaagtttggatgcccgagatattttttaaatcttctcatcatgcattatatttacaatttctgtacttaatgtaactacattttcggatattcatttatgctggatattctaataaaaccagatgccaagtgggtgtgtgggtaacagtttaagttccaaggaatacgaggttcactgttcaagaaactttttttctgaaaaccctaatacaatccacttgctcgtgcttgaagaaactctcttaagtagtaaaaattcttaagtttgcttaaataaaatccagaagctaagtacttacaaaacttaaattctaaaattagaatgtgacaaggcattgttgggcaaagtcaggaactagctagcaccaaaagaaagggggccaaatctttagcgcctatattattgcaaaatctctagtacgatttaaccagagatatattatactattcactacagaagttctagatactcaacaaatctatgtgtagctagagaaagattttggaaatagacatgtgtaaatattttgaaataatttgatgaaagaatatcttactgggagctagagtattcgtgtaatcttccgctctgagaaaagacaatggcggctacttgagcatcgcatagaaccgaaagctcatgagccttcttaaatagaccgcttcttcgcttcgagaacgtgacttgtctgctcgtcacgttctcaatcttcttgatctcgatcttccctctcaccattgttcctgcgatattcattccaagattcatcagattgaaaccctaactaaatccggaaggaaattttcactcagacaaaatcaagaaatgatttcttgaaaatcgagaaggagatttcaaagccagaagtcaaagatgataacttgaataatgtaagaaactcagaagatccaaaaccagatttgtctagattcacttcaaaagctacatagaacatacttttttccagacgacaatcaaccgacaaagttaatagttttagagaggggtataatttgcacatcttaactatcaagaaaaaatatatttgcacaaagaaagaaaaggaacaaaagcttaataatggtgaaaaagaaaccctagaactaaaattccggaaagaggcatgagctagatcttatgatgataaactctgtgtttacctctgtgcctctttgtacaggagccacaaaccctaagtctaagctttgctttttgtgttctgattaattggacagagaaaagggaaaaaaaaagaagaaaagagatttttattttcttcttttggtgatggtagttggattaataattgaacaacaatagagagagaatcattcaaaaaaacacaaaagaaaacaagtgagtcccagattctgattaaagaaatgtccatgactttatctgtttttggtaaaattaagaatagagagcagaaggaaaaagagttgattagctaaaaaagaaacgttaattgaatataatcaaggactaatttctaagaaaccggtgattatttgttttttaatttggacagaacacaaagagtgggtgggataataataataataataatacatctaaaagaatagtgttcttcgattggcgtgtcgacatcatcgtacactgacgtgcattgttaaccaaatatatgaagacacgtatgttttccactttccccaaaatcacagtcagcttctgtgcaatgtgacctcgtcttcatcagacaacacacagattcctttttcctcttttacatggttctttgttatgtttagtaatattcctcttttctgttgagtgttgaaagaaatatgataaagagtatgtgtctaaacataacaaaaagggaattcaccattgtgtcctaaatatctaaatcgtgataagggaatatgaattcttctttctccattttgttttggtcgtgggacttgatcaacattgattttcttttatactagatcgtaagtcatgttctttttgttttttgctaagccaaaaccaacgctttatcttttgcagtcatgtaaagtcaaacatgatccataaaagaaacacccttgtagttgggtcatatataattttattgggcttgaatatacaaggttgggctttaacaaacaattaataattgggtcttgagaatgatttttctttttgtcaaaatatatatatttgtcattttgaatttaactaaaataaattattataaatgaatttaacaaatttaatttccctgaatctgatcttaaatcctcctcagaaacccagaaacgcgaagatgggagacaatggagaatcaataaaatggccaaagatcaaactcaagtcgaatctcaatgtctcttatcttaagaatcatgatctcttcaccgtaagttcctcccaaaaatcatcaacccatttcattattttccccaattttattctaacctaattgaaatttagggtttacacctccagaaatttcctgaaaaaatccttaataccaagtaaatttgtaatattcatcgatttctattaacgggttcttgtaattacatatatttgaaatcaaatttatgagctttatctctgtatataggtcaaagccatgagcttgtgaattgttagataccattttgcttcgaatcgtttaaagggttttacttattttttttctgttgaatttgatttgagaggtttttaacttatgggtttatgattttcaggtggagaactgtctcacttctgatgaatcaaaggcttttgttaaaatagcagagtctcttggttttactcatcaaggaagtcgtggtccagcctatggtgaagcttatagggataaccatcggatctcagtgaacgatcctgtccttgctgatacgctatggcaatcagggctttcgaatttgtttactgatatcaagattaggaggaaggttgctgttggcttgaatccaaacattagattttacaggtttgctgtgccaacttttttgaagtttcattcttttttttactggtagtggtttaattatgggaagatgtgtaaagaatatgttcttgttgttgttcttgtcatgtttctcatttggcattgaaaaaggatacagctttgtagattacttccaaaattttgtgtcacgatgggaagatgtatatgatactttgttaatatcatgttcaggtatagtgctggtcaacattttggtcgtcacatcgatgaaagtgctgatcttgaagatggaaaccggacctattacacattgttgatatatctaagcgggaacagcacaaaatcaaaatccaagagcagttcaagcaagacgaacgattcttcttcggctgagcctttagtaggtggagaaaccgttttttatggttcaaggaacagtattgtagctgaggtaattaactctcaaatagtttgtttgtcttagtttcatattttatggatctcatcaactaaaacttgcttattatcgcaggtagctccagtggaaggtatggctctctttcacatccatggagacaagtgcatgttgcacgaagggaggaatgtctccaaaggcgtcaagtatgtgttccgttctgatgttgtttttgcatgaagaagacattcatcttctctgtattttgtgtttctcacattaactactttcatacacattaagaaccatcgattaagcttgtgtagatcactatttacctgaatcaagcccatgttcccgctggttcagcatttataacaagccatgagtccatggctcattcatatttagtgaccagtaagtgaaaatgctgatgaatttatagatcagttcaatgaagcagaacaaatttacttttaaagcatactctgcaactcatggagaattaggaggttttaaaaccgatccatatattggccggtctacattattataatatcaagtataaatgaaatcaaatttgaagaaaagaaaactctcatttggttgcttgttaggaatatgcttttagttgacgaagcgagtgttaactctaacttgtccagtctctttgactccaaagtttccaagttttaccatggaagctgcaaactctctgaagaaagctttttggtcttgagcaaacgtctcaacgatccacttagtccgggaatcgcctagaagtgcctgatcagacccaaacactcctttcccggacaaaatttgcttgtagtaaacattgtcgaaaaccgaggaagtagagtccaagactgtccctgcgttcttgcctcggttagatgttctcgggcatttctttttcaaggtttgcgcgaacgcatagttcatcgaaggatctatgtcatggaatttgctgaagttttgaagacgggactcgaaagaagaacagtgagagaaccctatggtgtggccacctgagagcgtaaccatgtctttcaccgacaagcctcttgctgcaaagctttgtatcagttgagaaacattgaacgttggtggtgggagatttctagtctcgttggctcgtgaaattgtcccgtcttttcgccctttcagtacgctccaataaggaccaccggactaataaatgtaaaacattacacaaggtaaatcaaacagaaccaaatttcaaccgtaaaagaattatattacactaatatgatcataaagggacaactcttttacgaagactcaccagggtgaccacatctctggcggcaatggcgattacatcggcacaagacacggtacgaggacaagccttttcgagctttctcttagcatcttcgatcacgtaaaatgaccgtactgagatgtttggaggaccatccttctcagcttggtttgaccgtgtcgaatctagtagaatggacgcatcacatccctacaacaatccaaccttactcaaaactcaacttcatatataactggatcaacaatcaactatcaaataaagaagatcaagatgcataccctgatgaagcaatcgtggaagaacattcttaggagacgagcaggcactttgggatcatacaaagtagcattcctaacagtttcaagtatgattttttcagcagcagggcacgattgatcatagtaatgagcatcaagagcagcttctgagggcttaactatcgctaaaaccgcaaatatcatcgcaaaaatgagtcccttcgagaatgccattttatggtaatgtgttttgggcctcgaaaagcactctttgttcttgaagttgtttgaggatttgatgaatgagaagaagcggggactatttggcttatataaggagagaaatgagaggctaatattctagaaaatgtgtatgtgtataacatatgctttaaagttactcaaattatttggaacaaacatgtatctattccagtattcaaattcttttctccctaaaatcgtactttgagtctaagcatgtactttggtgcagaagagctggacagaatctgtttttggtaactattaaaagaatctattaaaacgttttttaaaatttttatataaaataaatggatgttattgtaattaaaattttacttaaatatttttagatacattaatggaacctggaagtaattttctttaactcaattaatttataaaaattgtaatttgtttttgttttgccacttgaaaaaaaatattgtaaatagaatcttgatggtgccaaataaggaaagaacacgaacggtttagaatacggatggtgccaaataaaccacatgaaaaggtggttgttgtggttattaacttaagcttaaatatgagtaatgaagactaaaaatcagatgtaaaatggtggcattttgatgtgttcgtgtgtgtgtggatagagtaagattgaaaatgaataaagaagagaattaaacgagaagatggtcaaaaaagggtaactactgttgagttatgcctatcagtgtttggtttcaattgccttggcttcgcagtacggttggtgaaggattttgtggtactatttttttttctgcatcttttttgttttgcttctcacgtgtacggcactatttgcattgtagttacggatattataataaatttttttgaagaaaattttaaattagaaaattacttattttgtcaacaatgagaaaaaaaaaaaaaaaaaaaacaaaaaaaactggatacataatttggatacggttgaaaacaaagaaacaaaattttttgttacggtttagtttactttagtttcggtagagaagaaatggtttcgtaattcgtagaaataaaaatggtacagtataataattgaaacaacatttcttttttgatttcatcagtttactaactcatgaattatcattcttggatcgagagttacattcttctaaactgtcattgaaatcattaaaaaaccattactataatttgtctacaataaaaactaaacctcaaggtagatcacacttaaacttgtctccttattaatactcttaattaggctatggtttcgaaatagaacttaaaaaagaacttgattatttcactaatatcaagatgaacatctcttgttaatcttaaccttaaagccatgcttcattttaagaattaaactagtatctggctcaaacttctgcccgttggcaaccttgatgtcatagttttgtaatatctccaccgccacaatcttcatttgaaccatagctctttgtttaccatggcatattctcgaccggcattgaatgctaactctccggtctcggaaatccatctctctggcttgaattctaatgcatcttctccccatacagctctcatcctacccaccaccccataaataaagaccaaaatcttgtttaagtacatctttgtttaagtactccattggatcacaagatggtctctcttggccactacaacttcttggtagattcatgtcaatctcttggcgaatcttggtcaccactagagggttttcggacaaaaaccaaaagaaccaagtgagagcagaggcagtggtatctctcccagctagaagtaaagcaaagacattgtctcttaagaatttatcattgataggatccaagagctggtactgggttgtatcaagctttatgtgagatgtcaaaagatttgcatgactatctctaatgaaatgatcattattattcacttgtgatctttttacctcttctctcctggctgatatgtatttcccacacactcgatcaaaaatggcaccagcttctatcatcttcttctccatcccaactccgatccagctttgtagcttccacgagaatctaggtttaacgtgcctatacattattccttctactattgtgtcgagagctttagcagactcaacctctggcgttttagcagactcatttttaatctcattttgatttattttttaaaaatgataggatagttccattaattaccaaaatgtttgacagaaacataaaattgaaattgtgctcccaattcttttacaaatcttacttaacctaaatcaggaatcaaacttactaaaaactaaaaagaaactagaactaagagttaaaattccttaagtctcatgacatgaagacggagatgagttccctgagccacccaaaaactgaagctctctcttatcataaatctccaacgaaaaatccctcagcggttgcgtcgttccgccaccgctcgtttccatctccgcctcagcgtctgaagcgtttgagacataactagacaccggtctagcaccaacattcagaaacggagctgtagcaacggtaggaatagcccacatttggcccatttgatccggcccaccagtaacaaacgcagtacccatacccataggccaaaacggcacaaacccctgtgtattaacgttcaggatattaacgccgtagtttgacgccgttatcggagctaacccagaagtaacggagctatgacagctgtcattaacgtctacgaaatcgctcgtacagtttctcttcctccgtttctttattaggtcaccgtcaccgtcacggccgccgtcattcaacactggagagctcgtcgggatttttaaagttccgttaaccgatacagcaatagccggtacagttccggttccggttgcttcaattatcgccggttcagctcgttccaataaccaccgtatcgtttctccgtcggatttgtgaccaagttcacgggtcaattgaaagacccgagcagcgcaacccgccggcattcggatcctccgacctcgtccttctactttcgtgtgacggtctttagaagtcggtctcttcggagccggtttagtcttcaccggctgcaaatacccgtcttcttgtttcatgagcatcatacccggtttggttttcggattcgggtcagacagatgggtcatggttgttacttggtcaatcacttgtatcgcgttgccttcgtgattcgattccatttaccacaaaaccctagaatatctgaatgtcacaaaacttcaaaatcagccgaagaattgattcaagtaggatatagtcaaaatgtttagtttttactgattcttttgacgaaaaatgttatctgtttgaatttgacagattgaaaactaaagaacagtggataaaaaaaagtgaggaaaccctacaaaggtagaaaaataaaattaaaaaaccacagctaaccttatcctctgcacgaagaaccctacaaagatggaagaaggggccctcaagatcatcgtttttatttttatatagtcccattacaaatcaacggtctagatcacatacttcatatgggcctgttttagctaactaatgggccttggcctcgaccacatcacaagagtcatgttgtggagctaatttttttttttttattgatagttgtacagttgaaccggtttccatttaagaagtgaaccaaaccaaccgaattggacaaaaccgagccataactagggcaatacaaaacttagctatctcaaaactgagtactattgacaagtgcagcttatgttcatttctgagtattattgacaagtaaaaccattattgtcttggtctgaattctatcaccaaaacgactagtctctattttgatagcatgttactgttttcgtaaaaaccaatttggtgtacctaatcccttgttgattttgttgtatacaaggttgaaaaactttggtccccacgagaagattggaactgcgtagtaaaacaaatagtgcatgatttacaacaccaagattccaaactactcggtaaatattcttgcaagcttagggtaagctttataagaaatgatggcaacaaaaaatgtcaattactaagcatgactctcgaagactagagtatgaagcttggaaataaggtttcacccgccaaaaagaaaacaattcactattcattatttaatactatatttataagttaaaattatcaacattggtcatttgtaataatcttttgatgttgactactaaaaaaatagattaaataaaagtattattccatatttttataatagattgatgtttgggattttttcacatattaaaaaaaaaacattatctaatcattaacattttttatattaaatatttttaagtttaattatgagctaataaaattaaaagtttaattattttcaatcattgcattttgaaatttagtatttatcatactaaaaataaaaataaaaataacatctagaaaatcatttgtgcaataaattttataaaatcaaaatttttaacaaccgaagaaatatatagctgatatgggtttattttagttattgggcattcatttgccccgttcatatctacttgacatctaggaatgagcgaattgtaaataaatatatatgagctaccttttttcgaaagttaattatttttttttgaatcagtagcaaaatcaaaattagtgggagatagaggtgctacttggacgctaatgttgacgctgactttgtactgaacaaaaatcaaaattttcattgatacttgaaccggttctgatgtaagaagtgaaccaaagcaaaccgagccaaaactaggctatatgttaactagactacttcacggttcttatgttcaaaaacatgaactccacatctcacactctctttatcaacaaactctgaatccaaaaaccgagcaacgaatatccaaagtttataaacatcttcgaaattagcaagaaaccctaacgcagcagtgagaacagagatccttggttcgtcgacgtctctgtttcttttcttctcaaaaactctatctttcacgccttcgtagtcttcttggaacaagatgttcttcaagaaacttttaccgagtgagatgttgctgcattcggctaacttctgcacgataaaaggttcgattttttcgcctttatggttgaatagattgaacgcaaccgctggtcctcgattgaaattaactttcggaccgtagattttaactagacgactagttgttgaatgtttgagtttgtagagagcacttaccaaccaatttatcaagcatcttgatctgttccctgttgctaccaaccctagtgaatctacatgatctaggcctttgtattcgacactagagctaaagctatatgtttcttccgaatctgtttgtgttcggttgatttccaacgcgtgtaatgaaatcggattgtcggtaggtacgaggttaatcatacctggaccagtggaagattcaagaatcgatatggtggatttcttgacaaacaagcaaccaaatccggaagggttttctccaaacaccttgtagaacgaacacaccatgaaatcggggttatatatagaaagcccgaaactatccatatccttaggtcccaaaccgcatgcatcgatcattacatgccacccattttcttgtgccacactcatccatagatacggatacctagatcctgtaaccctagaatgaagcggaaagacgtaaatacctttcttcttcgtcttgcttccgtttttcccagcagtaaccagttttctcagcttggacgaacagagtttgagtcttggccatgagaattcagctgcagctactttggctccacgtttctcagagactctgtttatttcactcaccgcctcactctcgtagtcgtaaaccgtcaagagcttccgttttgagttaaacgggtaagactcggcgacgagcctgaaagcagaagttctattagcggtgaagaccattgagtagtcttcctcggagattttgagaaaccccattattcttcttttcattgagtactcaaactctgtttcttgacctccatcgttgagaagcttttccttaaggttaccaatcttgggagaaacactgaagaagggactttcagacaaggaagaaga

SEQ ID NO: 881 - DNA, 81347 bp, Arabidopsis thaliana
gatctggtaagtggaagggtcgtagttgagcaactgagagtaagagtacaaaccaattcctatgtaatcaagacatgtgtaatgtgataaacccaagtgaaagtagtggtcggatctaagacggtcgatcttgtaagtgtcggagtagttggggtaagcttggatgaaatcggagaaagattcttgatgagaaggaagagaatttgggtcggtgaattcggtgtccgggaagatggtggagacggtggtttgggcgaaattacggcggagagtagcggaagtgacggtgggggttgaatgtggtgggtgttcggagctggtggtaccgtgaaatggtgacgatgagaagcagccgtgaaggcagtttggtggtgaagaatctccgggaaagggttggtgcatttttcttctttttttgggtgcaaaagatttatgactcttgtaattgtcaagtcattagcctatcttgtgttaaataaatacgctaaagtctaaagtttataaaagtagtgcacctaagacaaaagcttgtttctcttttcttttacactaaaaagaaaagcagaagcaaattaggcgggaataatgatgattatcaagaaaatactgaaaagtgttcactttgtcttgtttccgcaagtgtttttttttagaacgcgtagagtttagtggtcaagaaagtgttttctttttcacttttgtttccttagctatttacaatgcttacatgctaagatataccactatgcccaattgagtaaacaaaaacagccaatagttatgttatatacatatctattttttttatgttatatatcttgttaatgaaaaaaaggcggaatataaaagattaaaaatataccaattcttttagttagtacaataaactctattttttgtatcaaatagctatcaaaagaacactgatctgtctgttggtatatcggcctcgctcctcaagcttctattatttaatttacaacgttatcagaaagtgtaaacatcacactgcgttatttgtttattttctcatgttatgttattactatcgtaaaaaggacaaagttctctggtcgatcgtggtggtggttaaaggagcacgcgaaccgttcgaggactataatgatgagcgggagttacttttacaatttagaaatcttgctctttgaagaatttagtttgatttctcaaaattagtcattaagaaatatagatcgcgactaaactagggaatcaaacgcatagaaatatcgaataatgggagaaataaaagaattggataatcctattacacacaccaaaaaagaataatagttttttttttggggactctacttaacctatatttgtttgaatcaaagccaagctaattataggattgtaattaaaatacacattcgagagaatagggtgctacaaccaattcttatgttgggggtcaaaagcattgtccgcaattatattatgcatattacctcacgcatttcaattttcatatgcctgtttgttatacaataggtatatggtgtgaggttgtgtccaggtttggaccaactaaaagatttcaattaaaactaaactagattctgatccgcacatacgtgcgaagtttcatattttaataaatgtattggaatacatttttagtgaaagatattgtagtgtataaattataatatgcatagaaaagtgtatagtgttatttatgatacaataactaaatttttttatttttttatattatttatatttcatttgtgttttgcatagtaaatcgaatgttagatttgtttcgatttgcggaataatatagagatatttggaaaatctgtgtatttttgttagtttgatgtatagacaaattagttgattttgtttgaaatttgatcaattagatgatataatgtaaactttagtccgcgacaccgttgttcgatttttttgtaactaaaaatttgaattttaagttatagttgttttgtaaatattgttttttttgtttagtgtttaagattgtataattgtgttaaaattgttaattctaagattacactcgtagattatcgtcccgttatgagtatcaacccaaactcgttctactagataacttcattccgtaaaattaaatattatttttgttattttaaatattaatattgttatgagtatctaatcgtttttttaaagcaaaattcaagatatttatttagttggagtagttattaatttactaaattacttatacaaaaaattcatttagttagttttaaactacccttacaatgttgtagttcacacaatgcttctcaattaatagtatagatagttataaagttttttctcatcatcttatttgagagaaatataaatacttgcgtgtaagaaaatttaaatgtattgatctgattctacctctattgtttttaatatactaatgtcaagaagatttttttttatttcgtcctcacatggcataacatgattagggaatttattatatgatgactttcaaactctatgcagatctgaatttgttatttcttaatatatattctgcgatcgacctttatatagtatttggctttgagtagtaacatcgcactgcttataatgactatcatctcttgtataactattcacatttttcgtaatattttattcgcaattttaatcttctatggctcttgttattgcgacaaaggtacaatactaatttcttataaatacaatttaattctagtatacatttcaattttttttttttttttggtgaagctggagactacatttatgaaagatgcaacattggcaccaaagaatgctagtttcgactacataatcatcggaggaggaaccgcaggttgtgcattagccgcaacgctctctcaaaacgccagcgttttggttcttgaacgcggcgggtcgccatatgagaaccccacggccactgatatgggcaactccgtcaacacactcttaaacaacacaccaaactcatggtcgcagcttttcatctccgaagacggcgtttacaacacgcggccacgtgtcctcggtggagggtcggtgataaacggaggattctactcgcgtgcgggcaatgattacgtggaggaagctgagtgggagatggaagaagtggaagctgcttacgagtgggtcgagaagaaacttgtgttcgagccacaagtaatagaatggcaaaaggcgtttaaagatgggcttctggaggctggagagtctccggacaacggtttcacgtacgatcatatctacggcactaagatcggtggtacaatctttgaccgtgctggtcatagacataccgcggcgaatctgttagagtatgctaatcccaaccggattgttgtttacttgcatgcttctgttcacaaagtcctcttcaccaccgaaggtatttttgactactattcatatttgttttaggaaggttttggaaaacatgtaattattatattttgatttcctaatataatttttcttcgacagatttacaaaagtagttagaaaagctcccgaaatcagttgtagaaaatgttatgaccattatagagatgatagtttttcaaaaagttggaatacaacataaaaaatggtattttgtgctatctttttttttataaaatcgagctagcattattagtgtaaaatctaatgcattgactttttaaaaaggaatacttatttataacctcatgagctggtcattaggaattatggagtgagcccactttcctaaatgacttttatatgttttattttaattgtgtgtactttaaaagtttcttacttttctaattttttttttaaacttattagtttttcaattctacataagaaagtatattgacaaattcaattaatataattttgaagaatatagaaattaaaaatatatattttagtttcaattagtatatgatttttactttatgaatgattgtttgctaaaactacttgctgcaaaaatgaacattaaaaaaaaaaacaggtaactagaagccaaaagcgtatgaagtgctatttgaggatgcaaatggagtgttccacaaggcaaatctagcaaataaggcaacgaacgaagtgatcttgtcagctggagccctgggtagcccacaactattaatgttgagtggagtaggtcctgccgtccatcttgaggctcacggcgtgaacccactcgtcctagatcagcccatggttgggcaggggatggctgataatcccatgaactttgtagccattccttctcctcaaccagtagaactatccctcatacaagctgttgggatcacaaagtttgatagttacattgaaggtctaagtggcttgagtctctcttttgatataactcgtaggtttttcgatggtgttttgaatcttttaaacgaggtatataacataaatacatttaaaggttatttagttatgacttatgagattgtatgttgtctaactatgacgcattatgcagacaagtcatactacatctaggaaaatcctgacccaatccattgcagtccttttaaaatcttttgatgttaaattggaagtgaggatgaatgggggtttgatctttcaaaaagtcgatggaccggcctcaaaaggacatatgaagctacggaacacgaacccaagggataatccttcagtgacattcaactactatcaagaaccagaggatttgaacaagtgtgttaaagggcttaacaccattattagaatgataaattccaaagctttctccaagtacaagtatccgggtgtgacggcacgtgaactgctcaatctcatgttggcccttcccatcaatttgaggccaaggcacgtgacctcagcgttcaacttgaagcagttttgcatcgacaccgtgacgagtgtttggcattaccatggaggttgccaagttggaaaagtggttgacaagaattacaaagtcttaggcatagatggcttaagggtcatcgatggatccacatttctcaagtctcccgggactaatcctcaagccacggtcatgatgcttggaaggtaagcacaaaaactaaataatcacaacatcaataaataagatatgatgtttgaataaaaatcattgtgaaagtgctatgtgtaggtacatggggcaggaaattattcggcaaagagcggctttccacgaaaagtaacaaaaagcctaaggttcttaatagagagtagacaaaagttttctcatctattattacttgttgtgttattgtcttctaacattttcacacaaatgaagaaaagtaaacaaattttatttctacccgttactaatacactagataatactttctctttctaaatgataaagtgaaataatagagataaaaaaaaaaaaaagagatttggttttaaatattccattgaaaacacaaaaatgacaatttttgtgaaacaaaattaaaaccttaaaatgacacgcgtcctcgaagtccaacttgacgcagttttgcatccacattgtgatgactatatggcattaccatggaggttgtcaagttggtcgacaagaattacaaagttttaggtattgatgccttaatggccattgatatggatccacatttctcaagtctccggagactaatcatcgagccacggtcatgatgctcggaaggtaaaacgctcatacttaatgatcatatgattcttcgagttgtgattgtcttgttgagacttgagtgttatgtgtaggtgtacatggggcaaaggattcttcgagagagagagttgcttttcgagaagtattttctatgattattcgatcgtttctccaactaaagatgagaccagacaagtatatgaatatgtgatcatcgtccaaagaaaagaaaattctaacataatcagtatatatcacatgttccatgattatttggaataaagaaggaaatttgattcagttgtggagttattcttatgtgggcctaaattgggcttgaaattaaatggtccgattataaagtttactaagcatagttaaataaactggatcatttaaattttattcagttcttaacttcattgattcattctgcgtcgttcggaactctgcaacgagagttagggtttatacagagcaaagagaaggagaaagcgaaaccaaaaatcgacattaatggctgacgaagattacaacgacgtcgatgacttggggttattctctcttcctctctctcggtttcatatctattcattattcgtgctcggatttcaaaagattctatcttcttctcgacgaattcgtaatcgatttagagtaaattggattagttaatgtctaaattagcagtttttatagatgggtttcttcgatgaaacgttgcttcgattttgttcggtatagtactgattctaatcgattttaaggtagaaagtagaaaccctaatttcattgagaaaaagctattttttaaaactctatgagcttttctagtgaaacttgtgagtaaattgaagaaaatttgggctattgcagatatgaggatgagccagcagagcctgagattgaagtaagttcaatattttttctttgtataagagacatggttattgcttattatacaactttcggtttctgattggttttttttttcttgtgtaggaaggagtagaggaagatgttgaaatgaaggagaatgatgatgtcaatggtgagcctattgaagctgaagataaagtcgaaacagaacctgtgcaacgtccacgcaaaacgtcaaagtttatgaccaagtatgagcgtgctcgtatcctcggcactcgcgctttgcagattaggtatggttcttgctactgagaacaatctttttaatgttaaattggcttgaaaagtttgagtcttaatgttgttttttggctgatacagcatgaatgctcctgtcatggttgagctagagggtgagactgatccacttgaggtgtgcttacctaccttcttgttgttggtttttgaagttatgtctcagtaaacttatatgaacatttgagctaatttattatgatttggattcagattgcgatgaaggagcttaggcagcggaagataccattcactattagacgctatctacctgatgggaggtgagagattgcattgagcttatattattctcttcactcacttgatctcttcttttcttgtgacttacttatgattcctgaaacagtttcgaggaatggggagttgatgaactgatcgtggaagactcatggaaacgtcaagttggtggtgattgataatctgaccagagacaaatcgacaaatacgtatgtaacttgcaagctttcctctcttatggatgataaattttctgatgttgtaatggaactaaaaatcagtgaaacttatggataatactagactcatattccgaaattctgcaaaactagaagccccaagtaccataattccaccattattatacatattagaaacagaacatgaacagatgtacacattcatactctttaagttaatcatacattgattaaaacaattccaagatcaagattttctcaaaacaagtaatatctcacgcttctttatccggtttgttgtatatctccctctcttgaagaatcctttggcccatatacctacacaaaacactctgacacaatcagttcttaatcaaatcattaacatgttttagattatttggatcatttggtttatgcatttaccttccgagcatcataacagtagcttgaggattagtccccggagacttgagaaatgtggatccatcgatgacccttaaggaatcaatgcctaagactctgtaattcttgtcaaccactcttccaacttggcaacctccatggtagtgccaaattgtcatcacagtgtcaatgcaaaactgccttaaattgaacatcgaggttatatgccgcggcctcagattggtaggaacgcttagcattagatcgagtagtccatgtatggtcgcgtccgggtacttgaatttggagaatgccttggagttgatcactttaataatggtgttgatcccttcaacacatatctgtagatcctctggctcttgataatagttgaaccttactgaaggattatcatccgggtttgtgttcctaagctctaaatgacctctcgagatcggtcccgcgattttctggaggatcaaaccggctctcgtggtagcattcaatagaggattgatgggattgaaaaaatctgtgatggattgggtcgacagtgttggagatgtagtactagtagtacggcttgtctgcatcttacacaatgaaagaaaccaaacttttaccatacagtttcatcaatataaatattaacgttattagataatattcagtgtgttaatctatcatacctcgttgagataattcaaaacaccatcgaaaaatctacgagtccaactatatgagaagattacaccacttgctccttctatgtaactttcaaactttgtgattccaacgacttgtattagagaaacctccacgggcgtaggagaaggaataaatatggcattcatgggattatctcccataccttgccctaccatcggatgatctaagaccaacggtttaatcccgtgagccgcgagatgagctgcgggacctatgccgctcagcatcaacaattgcgggctcccaatcgcccccgcggacaaaatcacctcgttcattgaattcttctctaactctgccttgtgtaacactccgttcgcgtcttgaaatatcactccgtatgcttttggccttggccttcctgtccaaaacatagttttcgtatctttaagtggaagtggacatataaaccaaaccaaaccggatccaacctctcatgtttaaatgaagatgaactgaaatcgattttagtctaaaccaaacaaaacaaaataaaacatgacttaaatatatgacaaaaatagatctcatgagaccacaatattaatcaacttaaaaaaaaaactttcaaactgtcaatttcatctataaaatctttaaaatggtttatataaccatcctaataatagatgaccgcttatacaaaaccgataacaccaaaaaaccgagaaaaactgaccgagcctaaaccggaatccggacttgcttgctcctattatccaaaaaacagaataaaaaaagaccaatgtatagatgactcaatagtcaatacctttggtggtgaagaggatcttgtgaacagaggcatgcaagtagacaacaatgttgcccggattagcatattccaacaaatcagcggccgtgtgtctatgaccagcacggtcaaagatcgtaccaccgatcttagtcccatagatatgatcatacgtgaaaccattgtaaggaaactcaccagcctccaaaagcccatctttaaacgccgtttgccatcccagaaccggcggttgaaacgccactttcttctcgacccactcgtaagcagcttccacttcatcagtcttccactcagtctccttcacgtactcatctcccgcacgtgtgtagaacccggcgtttaacacggagccaccaccgaggacgcgtgcacgagtgttgtaaacgccgtcctcggagataaaaagttgcgaccaagatttcggtgatgtgtttgagagtgtggtggcaaagttttcgatatctgttgccgtaggattgtcgtagggagcaccaccgcgttcaagaaccaaaacgctagcgttttgagatagcgtcgcggctaacgcgcaacccgaagtccctcctccgatgattatgtaatcaaaccgagcgaacattggtgctaatgttgcatctttcataaaactgtaatagccagcttcacgtttaagaaaaaagaaagaaaatatccctatattaacatcaagaattcaattttttatgaatattcttatcgttacacattgaatgatacgtaaaagaaactatacctttatctggagaacacgaggcatggaagatgtatgtgatgatgaatattttgcgaaataaccataatatttgtaaacccattatgggtgaaagattaagtttgattctttaatatttagattagagcaaaaaataagaataggtttgatgaggtttatataataagatgaagcataagcctcttttcgtttgtcattatgagaggaagcttttatggttcaccggcacatatttattgggcatagaatcatacaaagattttagggtcttggttatttattttaatgaacaaagaatgttgttgtttcttgtatgtttaattatttgaatctttgcaattgtaaaattcttcagtcgtaatatagctaaattaatagtcacgtacaatgaaattgatcaaaaaatttgtggtaaactattttgactattagttgttatctaaatgtcaaaaagaaatgggtagttaggtaaaagtagtaagttatacatgagttataaatttctttgatcgtaataatatagctaaattaagaggcacgaaaatgaaattggatcaaactttcaaactatttgacgagtacatgtcaaatagagaaataattaatgagtgttagcatgttaggtgtgaaggtagtagtaagtagtaacacatcagttataaattttctttgtttaatctcttgcatgtaaagatcttattgcaacaacctcttattatcgatatgcttagaaaccataatgcaatacttcttttaacaaattatatacataccgcacaaaaagataatatcaaaacttttgtggttgtcttatagttatagctagcaatttatatttatgaacttaatatcatattcaatcattacaaacataatagtaaatagtccttaaagtatgtgctattttccattattccgtacttccatttccttaaattcccagatagaaaacgacaatagacaattaactagttttccgtagttaatagaggaataaaagttaatgagttatgcataagtcacttgctaatattgtaattgatttgatctgatttttaaaaattataagaccgacacaaatagaaagaaggtagctccaactgcggcctgcccataactttgtttacataaaagggattagtttttagttcacactatctttggtgacaaaatgtatatatttcttattatttgattatctatatttagaggaaggtttttgagttttggtggatttaagaactacacatatcggaactacttttatgagcctccttttacagattcatttaaagagagtgggcctcaaatttagtgcctttaatttcgttgttttcctgttgttatatgtttcatttgatttataaatttcgaataaaaaatagaaatatatttctaaaatatcacatttttaagtttcagttctaaaaataccatcactagtttgtttttccaatagtatcacaactttctttgtaagaaaatacttgtttacccaaaaataaaaatagatgaaaacacaatattttttaaaatataattattttggttcactatttccaatttaagaataattgtctattagtttttttggaaaatcaaaacgtatttattcttaaacatataaaagttaaaataaaataaaaattcattttaagaataatttatttttatttcatactgattaaaggatgtataattttttataatgttagttataaatttgtaacttatttgaaaatgtctcagttatctcatattgtaggcctgtactgctttcaaaagcccattaccaaagtatgggctgtccaattactactttggttttttttcaagtccatcttcttcacttcctaatacggactttcttctcctctccgctggattttgtctctcagtctactttatccgatcggcgccggcgagattcaaggtgatcttcttcacttcttctattgaacatactatcgaaaagacccaatcttcggattcattagttcccactgcgctttttctgattctatctcgatttgttcaatccgattccaacttttgtttcgattctgagtttttaataatgctagttctaaaccaaaatgagattatttgatgattctaatcaatctatagctcaagtaatagttattaacgaattgggttttaaaaattcgatttttgagtctttaacccgaatttatgtcactcttttgaaaatgtgttgatagggtaaagaagaagatgagtggtgaagttgttttagctgctagagtttatcgtgaccttctcaaagcagtggtgaaacatgttggtaaagaagatcacaagtctcatttcttagactttgttaagcaagaatttcgaaagaatgcaaactcagagaaaataaaccttgctcgaaattacacatatcttctcaatagcattcactctcacaaggttcagtcttttttatgatctcttaatcacattggcaatgcatttgtgtgtttagtctctcacatggataagttatctggttgttgcaggatctgctgttctcatacaacattgcggttgatagaactgaagaaatgaaacgagtgcttaataaatctgcagccagtgtagggcttcgtcttcctgaagtttacgagccttgatcatgcattcattcctctttgtctttccgggggatgagtcgttatgatttcttcatttctgtggacaggtctttggttaatttttgattatatgagatagtaaatgaagccagagagctcttttcctttaagcttttaagtattgacaaatccgagttgtgtgggttacaattttttgttagtgttgcaccacatttgttttaggatgtgttccatgaacatattcatgatcttgttatgtttgatggaaaccaccaaagtgagagaattcagaagcaattgcatattctgagatacaaagaagccagccaaagtaaatgaaaaaaatatttcttatgacttcattagcattatgatacgaggcataaaaaacctttcttgaaaacttaaaaactatttagaggaacttgttccgatcatgtctatatttggatgatgagtcaaaaatggtaaacaagatttatgaagagaaattagaaaccataagggttttatccaaaactcgataagccatccaccgctagtgtttatcactttatctggttcttgttttgtattttttctatttatttatttagtggagacatcgatgctgacactttcattttcttaatcattctttaaggctctggtagctttggcttttgatctaaaagctgagagtcaatagagagctttgtgctgagcatagcagagaagagttatggggaaaggagggatgtctcaaggagaaggctcaaaggttgaagaagaaaacatggctgcttggttggttggtatcaataccctcaagatccaaccttttcttcttccttccgttggtaagacaaagatttgatttgattggatatttggattgtcctgtgaccctttggttcggaaccttggaaactgatagatttatgttcattcaaaggtcctcatgatgtgagagttaggatgaaagctgttggtatttgtggaagtgatgttcattaccttaaggtacttatgatataatcagagagatatttggttttttctttgatttggtatggctcttgacattggtttttgatgggtgtgaatgttgcaaaacaaagaccatgagatgtgcggattttgtggtgaaagagccgatggtgattggacatgaatgtgctgggatcattgaagaagtaggtgaagaagtgaaacatttagtggttggtgaccgtgtagctcttgaacctgggattagttgttggagatgcaatctctgcagggaaggacgatacaacctttgtccagaaatgaagttctttgcaactccaccggttcatggctctttagctaaccaagtggtacaccctgcggacctatgcttcaaattgcctgagaatgtgagtttggaggaaggagcaatgtgtgaaccacttagtgttggtgtccatgcttgtcgccgagctgaggttggtcctgaaacaaacgttttggtaatgggagctggacctattggccttgttacaatgttggctgctcgggctttcagtgtgcctagaattgttattgtggatgttgatgagaaccgtttagccgtagcaaaacagctcggcgcagatgagattgtacaagtgacaacaaacttagaggttctttacagtttctttatctttctgaaacattagtgatcggattgtataaagataagaacttttcccatttttcttccacaggatgttggttctgaggttgaacagattcagaaagctatggggtcaaacatcgatgtaacattcgactgtgcgggttttaacaaaaccatgtcgacagcattagcagccactcgttgtggcggtaaagtctgtcttgtcggaatgggtcacggtataatgactgtccctctcactcctgcagctgcaaggtaacctcctttgaccatcatagtaagaaactttctaacttttgaaaagtacaatcacataataaccaagtaaatgtgttggtttggagacagggaggtagatgtggtgggtgtgttcaggtacaagaacacatggccattgtgtcttgagttcctgacaagtggtaagattgatgtaaagccactcataacccacagattcggtttctctcaaaaggaagtggaagatgcctttgaaaccagtgctcgtgggagcaatgccatcaaagttatgttcaatctctgaaaacaatctttgcttttctaagaacatattaaggtttcataataaggaagcttctgtaactttgttatccattgtatatcaactctgaatctctcttgaataagataatcctttatgataaattgaccaatacaatccaagcgttacaagacaaatgctgaaattggacaaaaagggacctaaattctcccgattctgtctcaaaactcctaacatgacacgatcttggccactgtccatttcatcagaccgtggcttctactaggaggacctcaacaagaaagaaaagtctccaaaatagactcatatataatggtacaagaaaatcgtagaaaacatctctttgacgatagcatcaaactttctcaaggcaaagccgcggttggttcagtgcaccatttccatactttaacttgaccagttccgtcacccgtgaaaaatatgcccccgggacctatctggatcgcccgtatctcttgctttgcaaagatttttcccctctccgtaaatctaatgaacaaacctaagctatcagaaccaataagagagaaagagatgaagaattcatacataaacgttgaaagtcttacgatggtaagtcgtagaggcgcaaggtgttgtcattgcaagcgcataacaaaacaggcttggcttctgcatcatgtacaccacatagagctagcactccctgaatccagtttaaacattgccaaaatttcttagtcacataacatatagattaggaccataagagaaggtaacacatttataaaagaaaccatacatgttcttctttgtgagtatatgttacttccaaattgccaccttcgattgcagcccatatctacagcggaaaaacacattaacaagagaaagaatgaaacttaagaaatttatgaaagttaaagaaagacgaactaaccttaaccgtgttgtccaatgaacaagacaaaaggaattgatcccagcaaatgagagacatcacaactgatgaatgatcagtgagtgtttgtatacactgtagattatccaaactccaaacctatcaaacaaaaaacatataaaccaaaaagattagctcaaagaaagaaaaaaatagtgagagttttcaattcaaatataatagataatactagtacttacttttatagttttgtccatggaacccgaataaagtctgttcgccccaacatataaggtaacaactgcaagtgtatggcccgtcagtgacgctgatggttcaaaacagttagtggcagcattatatctccatgccaaaatagagccatcctgcacagaatgtaaagaacttgtcacttatataaccaaaagccgactatttcgcagagatctcagcaagaaaagaaaacttggaaatttacctgtgttccagcaaagagcagatcagtacccacaacaagagaatagacttggccaacaggtccacttagactctggtcagcattggtttcaatattccacgcctgtatcaacaacaatgagacataaccccataagcatctaagaatgaaaagggttcctcgatatctattgtgacagtcaaagaaaagtactgttaagaggaatcatactgaatacttgccttgacaaggtttggcatgccaactaatagccacgggccttcactaagcacacagccaatttccccaccaagtttgagtactcctgtacactaatcaaaagagaaaagaacaatatccacgataagtaaacttgaaacagtctttcacaagatcagaaaatgcattcctcaaatacaatcagcatcagcgaattagacacttcctttcctaatttgacaacaaagacaccaatttccatcgatatatcagtgctcactactctacttatgacaaattgcagtctcttgtgtcactctaaatcttaaccaagcagttataactattcatcaaacatggttttctagctagagaggacaacaataacatccatggacaacaactgcattctctaaagccactctatatcctaaccaaacaattctatcactgaggaaagcttaaggtcctttgagcaaaccatacctgtccagaagcacaatcccaaacacgcaaggtctcatctttacttccagtgtaaagcttatcagaaccagaaggcaaagcaataccactaacaagcttctcatgaccatcaagctgagtcaacaacgcaaagctctctcctttactccaacaatgcaagtatctacacttatcaccgtatgtgcaattcccatctacccaaaagttgcaaactttctcagtcttcgtcaccgttctgttcccaccaaatctcccccaactactactcgagttcccattaaacccaggtcctctccgatgactcggacccgcgaaaccagattcctcagcgacccttttgttcgtataacccgggccttgaccttgacccggaccaggacccggtaattcccgatgtagataaggacaaggagaacgattacaacgcccggctcgccagtggaaacaaaccttttgtcttgtatccgttggtgccatcggacgagttgacccgccaccgccaccgagtctgttgaagactcgtttgtttcctccgttcaaatcgaaatccatagctttttttattgcctctcactctctttctctagattacaataacaacagacgcaaattaacacaagaccgaacttaaaagtaaggatttttccgattggtatatagataaatcaagctgcaaaattggaggaaaccctaattaccaaaagaatctctgagaagtagtaatcaaaatatgaaagtatgagaaagaaaaatttgggattgttgtgaatgtggtgaagtgataataatgcagagaaaaaagagaaaaactttggagtggatttatttgtatgtgtttataagctttggatcttcgtggagaggacagaagtagtagaagagaaagagaaagtgaacaccagtcgcgtcagcttgacgtctattgtttagttactattttatccctatgatggctctattttacaaaattactttagtgttttctctcggtttaaatcggttctgatttagaccggattgtaggtttatgcttttgccttggaatgaagggttctaggcacaagcacaaccctatacataatgaagggtttttaaatctagcgagccaagaaaccccacacttctataactgaaagaaaaggacatgtaaagttagtgagggccagggacatgtttttctagtgaaaagatttccaagtgttcagtgtttgcttagaagaaaaaagatagatgattaccataaggcgtgactcatgagaagcttgaggccacatataaatattctaccttttttaagaaccacaatatagaagctatatcagtctaatggtcaaggacctctattactcattcacgtgtttggactaatgtgtaagagattttatagttttaattttttttgctgagtctacaaggaatatatgataatgtgaatcaggattatatttggaaaagcagaggtttcaagcttttataagctctggaaatttggtaaagattgtcaatacatcaacgaaacaaagagaaatctatttacagtttcagatacaacaaaacaaaattttcaaattctatagctctaatttgatcaaatctgtttaccaaaaacaaacaaagaacattctaacaagaataaatgatagacgatttattactaaagatttggtaccaaacaaaaaatacaggtacggaactccggaccaatcctagatgtccaaataatccctaaactaacttattatccagaaaaagagccaaaaaattactcgtcaaaactccagagtgacacgtcacccactccgtcaaagtcgttatgattccagccaacttccggcggcggcaaaagcatcccctccgccatattctcaaaaaagttgggcatccccaaaagcgcctcatcatccatataaaacacaccaccattctgctcctccgccctcctctccccctccctcaccccctcccctgccgcctcctctgcctccgccgcagttttagatccctccgtcgtagtctcattctgaaacgccattgcagcttcagacgcagctttctgaatctccttaggacaagtagtctcaggaatacgaagccgccaagcagaatcagcgaaattgagacaagcagagcgaccacgaagagctaaagcagcaacatcatgagcacgagcagccatttcaaccgtcggaaaagtacctaaccaaatcctagatttcttattaggctctctaacttcacaaacccatttaccagaattcctctgacgaactcctctgtaaatcggatgacgtgtctcacgaaacttcttcctcccagctcgtttctttggacaacttgaagctaactttggtgaacactcactactgtctgaaaccggagatctatgatcggagattgagagaaacgagtctgggaatgtagagtaaaatggattcattttttctttggataagatgttttatttctctttctatctttttatgttttcaggtgttggaacttttggagatatttttattacagaaagtgaagaagtgttgtgtttttattttataagaaaagtgagaaacacggaggatctggtaacgacaagtgtcccacggtatgtgacttacacgtgtccttctgaatcactttacttcgtctaagtgtattgtgtactgtggctggttccgattcgatggttcagttttgatatttattattttattgaatttaagtatggtgttcggagaaaggggacgatttagaaaaagacaaaacagtctttagttttaaaaagtgataaagatacgttgaggatgacgtcatgggaacacgtttttgacagttggagtgtaaactgctctctgtggttcgaaaggtgagccacgtttgaagggacgggttcgtccgctgtctagccacggtttggggtttcgctttttgtaatctgacccacgcgcttttagcttttggtgtgggtcccttttcttattcattatttttggcaattgtttggattatatttatttctgtgttttattattggaaatccattggattattctatgaacttcttctaactattatcatcatcagccttaccaaaaaacaaaagtattatcatcatcaactaagccaaagatggatacgtggccaaggcggattgtgtatttttttcattatgtacccaaaatacattgaaccagtagtttaaagacaatccagtcttgttgaaccagtcgagttttttattctttaatacaacaaaaaaaaaatcaatcaaaatggagttgtcttcattcgattcggtttcaaaaataattagaccctttcgcataattttataaatgaatatttgattttataatcagcaaggccaaggagatttcaagaatttgagtaacttttttactaaacgtctaaacctttcaactaaaaccaaacacaacatcaattagacgacgagctttaacacagaaaacttttaaaacccaaaacaatgtactagactccatgaacgatggagccaaagcttttacatcaactttgtacattcaattaaagaccaagtaaagccctgagacaacaaaggtgcaaagcctttggtcccatgtaagatgtttttttttcactataacaaataattgtgttgggatcttccatataaggaactggaactttggttctctcacacctgaaagtccacatcatcacatcggacgttgttgttgttgttctcatcatcctcttcaaaccaattcgtcaccagaatcttataagccttctcgtagatatcatcgtttttgttcatttgcagcttcgaaatcttttctagcccttccgcatcttcaatcagtagacaataagggttcacgtcttcactgttcttttcagcctctccggccttcaacatgttttccaatccatccagacactttaagatggtggttctttcatctgaatatactaggatatcacataattgttttatgcaactctgctccgccatgtatctgaatcacaccaatggagaattgtgagacttgatgatctataataagtacattaaagttgaaaaaagaaacaagacagggacgttacttgatttgatcatgagaaccatttaaggccatatttgaaattgcccatacagcttctttcttcatgtagaagtcagtatcttgagcaagattgaccaagattggaatcaaatttgcatcaataactgactgtaatcaccaggggaaaaagaaaaacaaattagtgatagcaaaagacaaaaatggtaaattttcattggggataatagcaacaaaagtttctcacctgaatttgttctttagtccctgcagtgatgtttgaaatcacccagcaagcacacttctttattttgttctcgtggtttcgagtaagcatgttggaaataatgggtaaagcaccactattgatcacacactgaagaataagttcaaagaggtgtataacaaagcattttgttgtttggttacaaaatccaaaaggtggacaacgtaagttgaatatgaaatacatacctgtgtctgctgatgatttccagcagtcatagccccaatggtaagaagtgcaggaacaagcaccactggagaagggagtctgcaaaagaaaaaaaactgtcagcctttccttatccaaacatgtcacaaaagggttaaatacatattctgagaagtactaactggagaatttgaactagttttgggacaaaaccagcctcaatcacactttggattccatcttctgaaccctcagacagatgacatagtgccatgcaagcatttttcaagacatcttcatcatgtgaatgaagaagtatttcaagcgcaggaagagcaggtttcacctgttgaatcatgcttcatatgttaaaaagtatacaaaacagaggaaacagagacagagagagaagtaagaagacctgatcgaaagccgggtgaggcttgccacgacacaagttacgcaaagcccaagtagcaattctgagtgtagtatccttatacagaagacgcaacagtggcatcaataccccagagttaagaacaaagtcacggtaatgtatcgaatgaccagcaacattactcagtgtccatatagcctgcaagaataatgtcaaaactcatatctgtgagtctgtgacaagtattctcatatctacacgtagtaaaatacttacctgctcacgaacataatctttaggagaagcaataagctgaattaatactggaacagcgttgttattaactaccacgcccggattgtcaacagcaatgtttgttagagcccaagctacctcatactataaaaacaaagatcactgaatatatcgtaatcaaaggttacactgatcatcatcataaaatatcaactaacttgaagcttggggaaaacttgatttttaagcaactgaacgagacgcggtacaactccagatcgtatcacacaagatatatctcctggaaagatattagagtaaatgataaaagacgaatctttcaaaccgagatcaagaaaaagtaaagaaagtaaaaaacagaggaagtttttactctgtgatgtaatacgtctgatcttggtaacggattcaagttgtaatggaggatcatctgaccaaagaccatcgattatatcatctgaaacttcgttcacctacaatccaaaccctaaaaacctcactagtccaacacaaaatcaaccagagagtgattacttgtgagatagttttaaacggacctctgttttccaagccatggcttttctctcttcttttcgacctctccaaagcaatttagaaaacttaaagactaaaccctagaaatctcaacttgaaatgtgagagaggcaaagattttgcaatcaagcaagaatgcaaacaaaaatggtgaagcagaattttaacgaagcgtaaaaaaacgggtttttcagttatcgtttctttcttgattttattttaaccgtctgatcaaaaaatccagtcgctacttaaccgtctactctaaaccgatcaaaataaaaatttgatttgaatccggtttactccaacccaaaatttcaattcgacaaaccacaataccacaaaatcttggtttatgtaagaacttgaattctcaaagcctttgaccacatgaatgcacaaaatcttggcttatgtaagaatggttttacatttgatttcaattacatcgaccaaagctcctatgaactctattcgtaaaccaattaacaacacttagaaatgcaactcaattcaccatgaatcagaaaagctcatcatcactatcatcatcactactatcactcaacacaaagtctccttcatcctccacccattcatcttccgaaaacgccgatacattaaacctcccaaacccatcactctccaccgtcatctccgccttctcatcctcatcatacgacaacgaaaacaactcatcattaccaccaaatcccacctcatcctcctcaaaccttggtctcttccccggaatcaaatccttctcaccaatctctcccttctcaacaccactccaaggcacccacaaatcagcatgccttcccaatgctctatccatatcactaacaaccaaagtcccaagatcagcctctctagctttcctcaacatatcagaaaaatccttatcatccgacaccaaaaccaaccaatcaatccctctagtcattgaatgttgtatctgtctcttaaccgcccaatccgcagcctgaggcttatcctcaaccgtcttaacataaacccctgctcgacgtagctcagcctctaaaccatatccaactttaggagtcaacaaactcctcgcagcctcattatacttctcattccctgaaacataacgctccttaaacttctgacgtttcttacctttcaaagatctcatcctattaactttcttctgtctctccctctcatgaagctgcttgaaatgtttcttcaaatcaagattggttttacacttgcgaccacaaacaccacaaatgtacggatcaattggagtcacttctcctttcctctccatgaaatcaaggttcctcctttctcgtctctcttcgacgacccaatgaggtaaatggataaaagcatgacgatttgcgtaagcggagatttcgacgactcggccgagtttctcagcgactttacggagagctgttgcggcttcgtatggtggacctcgtggtggtttgttgtctaagtcccataagactacaactttcttctcctttggtgcaaagataccttctttgtttcttaccatatcgatttctgatgaagatgctgatttcagacatgattcgatccgccattggtgacgaagtgggaagcttgtgaatttagggttttggaatttggaattggagaaggtaaagaagtgagatttgtgtgaaaggaatggttttggataaagggtttcgattgaattacagaacaaactcattggaagcttcgaattgccactgaaactagcgtaggtgatcggtggcttcggagagattcggtaattgtagtggacgtgaatcagagattgtctctctgggtaagtttgggtgtggattgttatcttctagcatgtccggcgaggaagacgacggctatgtggatagtctgagctaacaaaagtttatccttttgcttttgttgtttgagagcctcttgtacactcggagggtcttgacgagagagactttacctttgttttttactttctaactgtttcactaactcaagttgatccagggatatgaaatatgctaaagacacatgagacacaatgcataaggatgggtgagaatatattggacatgatggtatttcaatttgaaattataaggatgggtgagaatatataaaaagatgagtgattaaaaccatataaaatgtgaggtatgcaaaaaaaaatataaggacacgaaactggtaaaaaagcttttgaggtatctttatgcacaaaaggttgtcatgacatgaatgtagtacttgacacatataacgtcgagtttggagaagtaattgacatctttcaagctcatgagataaattttgaactcctaaaggttagagaatcctaagacagtagatctagtagtatatatggtaaaaaagaatcagagagaagcggaagccattgaaaacctatacaaaggttaacaagaaaaatgatctatgttgttttgtttctagtcaaacatgatataaatgtaacatgttcattcttctctatgtagtagtattcgttggatattcataggatgataaagatgtgtgtgtgtggtctgatggttaagttccaaaaaatcttctcttggaagttattatatcgtagtttatctttctaaaatttaagtttgccgttgacaaaaaaaaaaagtttcctaccattttttcccatgagaagctgttgttttttttggggtcagaaaacacaaaccattagactgtgttgtatcttcagattttaagttatataaaattggaggcctttccacaaacaaattattttgcttctagatacttcttatatttgttcttaaaaagattgttctttttctagaagcaccataatcagttgaccaaaaataaagcagaaaaacaattcttatatcttcgatatgtatctatttttccctcatataaaccatatttatataaaaatggaaaaattcaaattcaaactcattatgtttcaaaaatattaatatatcatattaataacctatttgactttccataacagcgacccaaaaagaaaaaaaaaaagggggaaaatctcattcgaccggaaaacaataaaaaagagagcagcttcaatggattcatttataactccaaagattatctccttcatgattctccggcgaatcatcttccatcgtcggatgtatcatcattctcggtggactcatcaacatcccttcagccatctccgtcaacaaagtcggcatattcaacatcgcttcctcatccataaactccaacgaacacgagttacacgacacttcttctaattcttcctctttgccgggttgaaccggttccaataccttctcatccccaccctgatccggttgcttcatctccgctgctctactagcagccgctcttatatccgcagcagagtttgaaaccggagccacgtaagtcaaagctaaaccaggaaaattcaaaacggcgtcgggtccttttaaagctaacgcagccacgtcgtaagcggcggcagccatctccggtaccggataagtcccgagccaaattcttgtcgttttacgtggctctctaatctccgatacccattttccgttacgtagtcgaatccccctgaaaatagagtgcttgccggataatccagtcgccgttcttctcgccggtgatccaccggaaggtctcggtgaaggagaagaagatgatcctggtgaggtttgaggagattgatcagtaggcaatgtgattgagacttcacgagacgtcgtcgtttcttgattcacggtggtcggagaattattattattcgacataaagaagcttaatgcttaaactaatgttacaatgtgtttttgtttgtgttctgtttttttttgttgtatcaaagtgtgtttgtgtatatatatgatgtttttgaatgagagagattgtaaaaccgtggcaaattcgtaagaagctccgtttttttgttagaagatgtgagctgttacacataaatacgattagatttatgatttgtttatgatcgtataaagagaaattgcaattttgctctcaccttattcctcagttgattgtatttaattcttataaaaaaactggctactcattgcttaaaatgtcaaaaccaagatttgttaattaaaagtagatttgtgaaccccatgtagagataagccacttacgaagaccaaatcgtaaactaaacacttttttttttggtaatcaatcgcaaactaaacacttaatgattcgatagttaccactaattagcagtaatttattgtaacaataagaacggcagggtattatcaaattggtttttgagactttgtggttataagtggcttgacttatggatattctattcagccacacgaaaaaaggttacaacttgcaaatctcagattttgatagagtaactaataaaacagtagagagttgatgagacaaaaacatcttttccattgctcgaatgagcaagatatttgcattagatatctcttcggatataattatattctgttgataatactaaccagtataagttcttaggatttttttttaaagccttttctatagttattttctttaaaatcgtaatttatccagactaaaaacattttaggatgaagctatataactaaaccatagatgataaatttataatttgctaaaacgaaacagtgacatttctctatataaaatagtgtgctttatcgtggattttcttaaaaataacatattatcggacaatataacacgttatgttttgatcaaataaaaatcatgcgctaaaaatgaatcataatgtttacgaaaatgctacacaccagttttgcagtaaaaaacatggtggttaagttgtcttttaaagtttaaattgtcattatttgtgagttcacaatatatatttgtgcgtgtgaaagaatagataaacatatgattgtgaatgatgattagttgtcgtgatttttaaccacatgttagtagtattcaaagccttgaaccagaaaacggtcattgaacaaataaaattgttgtatatgagcttcctacttaattttctaacgcatagtggtattttaataatcccgtattaaagtaattggaagaattgaacaaatcagaactttttgttatttgggttgatagtggacacacctccgtatcaactccacataatgagttgtaccaaaaggtattttatactttcttttcgcttttgcacgtttagaaaaaataaactcgaaagcgaggttgcgaatcgaacacgtaccttgcgcgatttcatttcatttgttaaataaaatctaaattaagatgaaccaaaaaggcaataaaatgacagaaaagagagagttaaaaagtcaagatatactttgattggagtaatggtgagcacttaaggaagccagccaaagcttggtaagacgacgagtctctctatatggagaatgattgtcctacacgattttgtttcacggtaggactctcctataggcttgtttttatttcttttctttatattgtttcattattacaacaacccacaaaatcattcaaaaatgaaatgagatcatcctccaatcacccatgacccatatatgatatatgttaggttaaactattacaatattcaatcctataggcttgttttttttgtttttttcctttatggttttcgaacatttttaaggtatatctcgacacgagttctctactgttcccacaaaacatgtttactacataaatataataaagaggaattggcgaaaaagctagacaaaaaaaaatccattaatcctctcatagaaactagtttttgtgagattaaaaatgctcgatagatgatcatatgaaatcatagttggacgtatacacatgattacaattagagaaaatgttaagtgtaaaatgcatatgtagatatcttataacgaaagagtaagtactggttagaaaaatgggcatgcaggcccctacgcgttgtaccaacgttaaattaaagccacatttcaccatacgacaacctccggtcctttagctctttcttgcttctttgctcttcgatctgactaattactttttgcatgttttttgttgtccaatgtccatcatcacgtgctaatagcctatcatatgaacattgtcttaatagcccattaaacgcttggtgaaccgtttttgtagtaaaattttgggcatctctgccaacattttcgattatatttcttagagtgtttaaaaaaaaaaaaaatcccatcttagatatatggactaaacattgataatccatttcttcacattttatgatgaatatgtttgaaccaatacaatgaatatataatttagtttttttttatttttaggtttttttttggtaaaaagtaaaatttcataccatttttgaaaattttgacaaaaattacaaaagaaaacaaaaaaaaatgagaaacctaaagctacataaaccaccaaaattactacataagcataaaacagaaaaacacacactagcaaacacggtaaaagacttttactaaaagtcatgaataaacaccgattctaaacagtaaagatcgaacatttataggtagaaaatttgattgtcaagcttcattcatcaacttttcatcttcacatgcttccacgtaaacctcaacaagcttctcaagtagctaatttgattaagaaccattgtgttattcccaagaaccgcattataaccaaataagataaattttctggttttgctattcgtaaacttctccaccatttcttccacatccaatatctaaatcgcatttacaagtgtttaaaggaatcgaaatttatgtttgagaaactctcggataactttttcgatgatcggtaaatggcggcagttgtatcatgaactagttggtgtatatgttaatcatatgcttagaatcgtgtaattgataatgcaatgagatacgattgttcttagatctatatgcaaaataaaatttgagaatcgaccaaatgattggatattatacttgtcatgtttggtgattcatacatccaaatgtcaaaaacgtaaaagttccattgtggccattaacgtgcgttctcgccatcctcgtatatcgctaatgaaatctaaaccaataaaaaaacttcaatcttttttttcttcacaattatcgatccaaatcaagattttcttgatttgaattccttgcgatgaaactccttccgaatccatcactaaccttgttccctttcttcactccctatacttcaaagcatattttcagacccatcaaagtctccgtctccgttcaaactcctccgccggatttcgatttccgcaacgacatcgcgtcggaatcacgcgccgcaatcgcgaaaacttacccggagttgcttgacctcgctgataacgggactctgattcttctccagaaacagagtttcggtcctgttccagcttggcgcaaagagttcgttgagccggaagcgatttggcttgtgggcacttctcatatctcgccggaatctgcttccatcgttgaacgcgtcgtccgtactgtgaagcctgataatgtcgccgttgaactctgtcgtagcaggaaagtccaattctttatccaaacgaaattcgggtttcgtgaaatttgatgactttattgccaactgatgaaattgaattagccattgtgttgtgtaacaaattgcagagcttggtgttgatgttgcagagctgggattatgtacacttcaagtgttggaggagaggttgaccaaaacttaaaatccggagagttgtcgttgaccgggactggctttctcggtgctgttggccggagtttagacttgggtatataaactaatcaaagctttttatttaccattgctcgcttttgtacttcaacgttgatgaatgtgtgtgtttgggatgatcataggagggcaaactgcgttggcattgcgacttctattggcggttttctcttctaagttatcttctgttgctgaccgccctttcggggatgaggtacttttgagaaaacctcaagagttagtgtttgtttttggacattcagtctcttcttgattgctatttgttgcagtttcgtgctgctcggaaagcatctgaggaagttggtgcgcagctggttcttggagatcgacccatcgaaataactgtaatgactataccaagtaccaactgatcgtttttgtagttacatatgggtttaaaaccaatggaatctacattgaacttataacattgtagctccaaagggcttggaactctttgaaatggggagagaagtttaatctggtgatggctgtgactcgggtaatcacatcgtcatcgggtatatccgcagcggagcttaaggttttgtttctctttcgctaactcggtttcgctttaattcaagaagatgataagataagttgtaacttttcggtttgtgtttgcattgcaacaggaacaagagaccgatgaaaacagtggaagtttgcagctttacgaacggctaagtttctcatacccggcactcctaatgcctcttatacacgaaagagataccgtaagcataaaaaccgaaacaaagcgacactcaaaaaaaccgtatgctgataagacttgaccaaataatgtgtttttttgccttgacagtatcttgcttggtcattgaagagaagtaaggcagtgaatgggtgtaaaacagtggtgggagtgatcgggaaaggacacatgaatggtgtcatctacgcgttggtgtcagactctggggatctccggtttagagatttggtgggaagaggagattcatataatggtggtactggtactacatcgaacggttggattcaaaaggttttaaagagcttcgtaagagacacaattatagggttcttgctatgggagttatatgaacagtatctgatgatgaatcaaaacctttcatgatataactaaaaaaacaagttgttgcatatttaaaaaggaaactggaaaaagaatctaaatgagtacaatatgtatgtatatgattcttcttcctctagattttgttgaggcaactacaaagtcttatatgaaattgatgtatattttgcagaaatttcaattgtaaacataaaatgtttaggtaaaaaattatttgtacttctctagttggtaacgaaataaaaataaaatatttttttttttaatatatatatatatatatatataaatataaatatatgtttaagattcattatctggagagagagcctcgaagaaagcaaataaaatctagagaagcttgtttctagggtttcgactctcgacggccggtacgatttttcaactgcttgttctaaggtataatcaaaatcgagttcttcagatattgaattcgattctctctttggtctctctcttctcttgttcttcagatttaaattcgatagctttttcattttcttccgttgaatttttcttgtttcattaggtctgttgaaattgtagtttcttcttgctttgttttctcatatggttgattttttttttccagatctgaggtttttttcatcatagcttgaaaaaatccatactttctgggcttcctttgtataaatatgaaaactttaatgaaaatctgttgtggtatgttatgggttgtgacttgtgatgaattgaattttgaatatagttgtaaatttgaaatcttgaagtatgaaatttgcattggtttgttaatttgtgatgaattggattttgattattacagttataaagttgaaaacttggaagtgtagatgattacatttttctgtggtttggttcctgttatgttcattgttctatgatcttaattatatgttttgttattgcttctcttctggagtgtgtttatttgtatattttggtcaaatctgtgctctgtttagtatctcttggatatcttttgatacttaggttgttgagaggagctataaatcgtttctgttgtctattttgtaggaatcatgaagcctgtcttttgcggaaactttgagtatgatgctcgtgagagtgatcttgagcggcttttcagaaagtacggcaaggttgagagggttgatatgaaagctggtaagtcttggttcttgtttttctttatactttctcttagtttttctgtttggttgaattgaaatggataaagaagtctcgtaaaccactaccaatccgatgaacaacaagcgaaattcagtcaaatgcattgttcttaaaatccacttacgtgcgttcattccatgagactctctggaggactgtcctttcaaagtgtgctctctagcctctgcatcccacattccgtattccctcggttcgctaccatctgattccaacatctgccaaggaacttgaagcaccccgcatgaagttcatagcatacctcagaagagaaaagatcgagtaattttagggtaaaaccgccatactcaacatttgattttggcgcaggatttgtttcgatcttgggatgcccattctcccacacagcccattgatggacaatatggaaaatccatttcctgcccaaaagagtcaacctcatccacgcaatggcactacgttcccataaccccgactttagttgcatttcattcctcttgacttttctcctcttcgagatgcacatgcctctttggtagacttataccaacctctcacagcagaggcagcaaatcaaatggagtttgcgccaccacgtttctgttcacaattccgtctcatctcctcctcattttcagttcttcttctttgacatattaattccataatgcaaggtctgtaaaactacttatagtttgtagagattttaggttcaaaacttatttgtcacagtaagtagtaaaggctgttttgatactgccgtggaagggagagtcttcatattagaattcctcttggaggaggttctttttcttggtttacttgataagattgttctcatgttctgactttcccttttggttctctccccagggtttgcttttgtctatatggaagatgaaagggatgctgaagatgcaattcgagcgcttgatcgctttgaatatggtcgcacaggacgcagactccgtgttgagtggacaaaggtagaatcttgaatatcattttaaaagttattatcaggacggatttagtgatggaatgcaaattctaatactgggtatagaatgaccgtggaggtgctggaagatcaggtggttcgaggagatcatcttctggcttgagaccttccaagactctgtttgtgatcaacttcgatgcacaaaacactaggactcgggacttggagaggcactttgagccgtatggtaaaattgttaatgttagaatcagaaggaattttgcattcatccaatatgaggcacaagaagatgctaccagagcactggatgctacaaattccaggtttctttctgtccatctttacactctcatttgtcccaaatgttttccttcagctcccattgacctttttttgttgttgttgttgttacagtaagctgatggataaggtgatctcagtggagtatgcagtgaaagatgatgattcaagaggaaatggatacagtcctgaaagacggcgtgataggtcacctgataggagaaggcgatcaccaagtccttacagaagagaaaggggaagtcctgactatggccgaggtgctagtccagtagctcacaaaagggaaaggactagtcctgattatggtcgtggaagacgcagccccagcccttacaagagagccaggcttagcccagattacaagagggatgaccgtaggagggagagagtggctagcccagagaatggagctgtaaggaaccgaagcccaagaaaaggacgtggtgaaagcaggagtcctcctccatatgagaagaggagggaaagcaggagtcctccgccatatgagaagagaagggaaagcaggagtcctcctccatatgagaagaggagggagaggtcaaggtcaaggtcgaagtcaagccctgagaatggtcaagttgagagccctgggcaaataatggaagtagaagctggaagaggatacgatggagcagacagcccgatacgcgagaggtaccacatcccaagctatctttagatcacatttgaatggtatcaatatcatcatcttacttccagtttttttttgtggttttgaaactgaagcagcccctctcgttcgccgccagcagaggaatgattggagatgcagacagatgattgtgttggattcacaaacaaaagatgtctctcaaagtagttgtatccgaaactgaagtcttttgctatgtcatgtagtatttagtgtgttattttgggtctttgttaagtgttttgtaaactttattatgactccattcgaaatcgcttgtcgtagtattggttaaaagattgctttttagtttggattacaatatccgactttagatgtttacgagcgcagcttatgttttaacatgaaaatagtgctaaagatggtcgacaagatcagaagttttatgttagccatgaaatcctttataatgtaggtctgaattgtgtcaacttgtcaaccctaaattttccatttcaattacattcgcctttttgcgcttccactttttttcaacttcgtaatattgtatagaacttttttgtctataaaattcttttgcaaagtgtaaaatactaaacacaaaagtagcacttttcttttgtttgcatttgggttttcatttttctgtttttttttttctgttaatggttccgaatagtaacactcataatggtggaataacattttctaatgagattatgcaagaatcttactaaccaaaaaaaattgcataatatttactaaaatgtaaaaacgtatgatttgcgttttcgcctaaaaaattcatataaaaattcattatgcaaataaataagtatatagttgtttatttcattatgagatttttcattctgcaagtattttcattatgcgatttatgtcattagatatttatgcagtgtcaccattcagagatgttgtggagccgtaatgttttgttgcctagagcaaaacaaaaaaattaagcccattaacaaacacatctataaaataaaaactcatattattgtcattgaaggatttgagctaacctagaagcttattatgtatacgctttctctcttcctcaacaactatactattgacgttttcacttaaaatgatgctccaaaagttttatacgttggatgcctaaaacaccagtttcacgtgctttaattcaaggttaaacgaacggacaaaaccatagtaagtaacatcaaattcatggcaattgtcagtggttagataatgcacctagctaggaaccaatatggtagtaatactttttgaaaaaaaaatgtattatcttagtactattttatgtgatgggtaacaaaaaatgaggaagttaggcagaaacattactataaaggataggtgtagtaaaagtgtggttaacttattaggctaaaactactagaagaagtaaagaaaaagagtgtgtctcaattgttgagacatgagagtctagaaacgtaactcccacacacattatcttatcgatcacactaacaaaattcaagcactgaacgtaatcttaacgtactaattctatcttcaatggatcttgacttgattgttttgattgagacattaactcttaagctttgtttcttcccaacaagtttaatagtgttcatgaaacatgcaaggttaacgtcaacaaatcgtccataaatactacaaaatgtctaataaaagaatgatatagctttgcaagtcaaattgaatttgaaagggctttcactgtatgtttctctgcttcaaattggaattgaataatttgtcgacttacttagattgaatagagtatatgataaagtaaaataaagaattaatatggaatattaaaacaaggagtgtgacggtcccaattaaacatggaccgttggatgtgtaagccgtaaaatgatgatgaatcccatttggcttcaactccgcttgttgttgcttttcacccaacaagtcgcttcatttcttttgactttcacaacctaattacggctaaaaagattaaagacaaacttttgttttgtctctttttaatattctttatgtataacaaaatagtaggaatctattattgtgattatcttcggaaaaaggaagcaaaagagtatatcacttgtcatagactcatagatcacaaagtttacaactaataatatttcattaaatattgtctttgctggaaagatagattgagtaagaaaatgataagatggaaaaagggaaacgagaagttggttacgaatttatctcttagaatccaatgaatttagttgatattcattgacacatcatctcgtacgtgttactattgaaattctttcttgttttacatttagatattgaaatgttatcaaactataatattcgtttttactaaaatctttgtcgttttactaaaagtcaaatgttgatgattcgttttcaaccaaatgaagaaatgttataagtgaaaggaatcgatattatccttcatctttcaactttaaataatcctacacactgtttaaatattgaatttggacatagtaaaatctataatttaacctagagcacaaagtaaccaatacgttttactactagatttatcatcatgatcagagcaacacgtgttataaggagtaaggttcttcattacaaaacatccagaatgagatgagatctaccgaaaggcgttttaaatatttgactcaatccactttaagaaaaacatcataaaaacagcagaaatagacaaataaatgtattaattcatgcttgtattaatattcttttgtcaacatatggacagccgtatagtcccgtagtaactacaagagaaaacaattatataggacaaaatggtacggcagaaaattttgcacgacgagttgcaatcgtcgacaagataaacatgaccacctcccttttcaattccaaaagtatgatatgagtatctaaaggttaaaatacgtatatatattttttattatactttagtttctatcgattagaatatagatgtcagtaaacggtattattgtttgttgtgatatatatgagttttttttccgactacacattagtttaaaagatcactgataatccaaagtaaaatccaacttgtaaaataacgtgtcaatttttttttgaagtgttcacatataattggattaaaagtgtatacgtctctaaatgataatttattcgactaaaaatgatgggccatgtaagaatttagcaaaactagtaaacctgaaaggtatcattacaatttacaaatgaaccaatataaacacgagagaccgatgtaaagtctttgtcatcaaacttatatttgtaacaaaagaaaaaaaatctgttcaggtaaggacaaagtagatttgcaaaacatcacaactagaaaagagaattcaaataggaaaatgagaatgtgtatgggcatacgttaagtcccttttcttcaatgtgttatgcaaggtacaaattcaattcaatgaactgaaatattaatacaatgaattagactcaatatattctgtaactttctcactctttcacgcactagttaaggaattaatggcttacttaaaaaataaacaatcacataatggtaatttaatgtaccttgcttcatgaggagttaaccattctgattgtttacgcacggtgctgatgatcaatttcgcaatgtatagatacttgtatacaaaaatcaaagatattaccagaatttttttcttaaattatgtttatatcatttacctttgtttttttttaaaacaaaatttcaatagaggttttgtcgattaatatcaaaaagaaataatttaaacttgaatgtattatacagtagaaacatcattaaatagcattcaaaatgaataaaatttgtaacagttagttcttgtgttagtttatgtatagaaattttagcgaagtatagttgttgacccaaaaaaaatgtaggaacatatatagttttctttggtcccaaaacgagtttattttttgttcttcagtgttgaacactattttgctcgaacatgtctggtcaacgtccgaccagccaattccacttcatagtttgcatattaacgaacttccatctttttgctgattacagctttcattataccgtttagatttttctttttttgcctaaataaaaaaatatgaccctaaacattcgtaattaatagaaaacattaaataagtacgatacaaaagactgaatctctataataatagattgagaccatattcttgtgagataaataaaagattgagaccatattcttgtgacaattggtatacaattaggttacaaatattctaatccaaatttaatttcgagaacataatcgtgtgagtaacgataaacaatttcattttgtttacaaagatatatgatatattgcactttttaaaatctaatatgcttacttttttgagctgtcattaatccccaaactccactttgggatttttttaaaaagtctaattcaacgcgtggggcacaccgtgtgtaaacttcgactttgaaaagttataaacagaaaatgatgttttttaaaaaaacagggaaaaaaagagaagtttctatttgaaataggttcaaaacccactggccaagtactttgttagtggcatgtttatcatgagaatatatttgacccgtcccttgtttcagttttgctattacgttccgtgtcagttaatttaaaactctaatcatatcttatttgattaaagaatatagtgatgatgaaaagttatattttgtgtacttgaatgtttgagttgggcctcgtctatcatatggcaatatctcctttaagtgtgtgaacgtaaattaccaatttcaaggtcctcctcttaacgtaaattatcccagctctcagggtttttcagcaagggaataatataacaatctaattagtcaaaaattggatcaagtgctagtaaattatgcttggtttactaatctttcctcattcttttttccccattttgatttatgaggatcacgtttaatgtaaggtttaaatttctcaaaccagagctggttgtcatcgtttaaatgaatctatatgcatgtattctattccattagaaattatacacacgtagttaactgtaattagctatagttaaatccgtacacaccgttttttccagtttgaatcagtatagtgatacatgatataagtatataacatgcgtataatcaacatacatgatttagacaaaatatattattattctaatttttgtcatatagattttgattcacattataaactgtatatattgacaagaaaaaaaaaacatttgacaaaagaagaaaataataaacattttttgaaatcatgattttgaggtgatagtctatttatactaatactaatgatactatgtgtcaatgcatcactaatacatcttcagattgagtagaaaccgtgtatatggatttaactctagttaaacaacaagaacatacaaatttgaatgtaataagcgtgtaaccatttgacttgaaaataaaatacatatgaccaaattgaaaataataatattaaaatccagtgcaacgaaaaaaataatatgttaaaacaataaaacccactcactactttctctatataaagccaaatgcttcaaccaatcttcttcacacctacaaatcttcttcttctctctctctccctcttcctctgtcacacagatattgacaaaaacaaaaagaatgagtcaatcaaatcgtgtcagagacgaagttacattacctttactccaaaaaacctctcatctgaaaaatcactcctctgttctctctgttttcctaaatgaagcaatctcaatctgcaaaatctcttacccattggtcctcactggtctcttcctctacgttcgctccttcgtctctctgtctttcctcggtggtctcggtgacgccactctcgccggtggctccctcgccgccgcatttgcaaacatcaccggatactctcttttctccggtttaaccatgggcgttgagtctatctgttcacaagcctttggagccagacgctataactacgtctgcgcgagtgtcaagagaggaatcatcctccttctcgtcacttctctccctgttacacttctttggatgaatatggagaagattcttctaatcttgaaacaggacaagaagctcgcgtccgaagcgcacatctttttgctttactctgttccagatcttgtcgctcaatctttcttacacccattaagagtttatcttcggactcagtcaaagactcttcctttatcaatctgtacagtgatcgcgagttttcttcacttgccaatcacgttcttccttgtaagttacctcggtttggggattaaaggaatcgctttgagtggtgttgtgtctaatttcaaccttgtcgctttcctctttctctacatctgtttcttcgaagacaagctaagtgttaatgaggacgagaagataacagaggagacatgtgaagatagtgtgagagaatggaagaaactactctgtcttgcgataccaagttgtatatcggtttgtcttgagtggtggtgctatgagattatgattttgctttgtgggtttctcttagaccctaaagcaagtgttgcttcaatgggaattctcatccaaatcacttctcttgtgtacattttccctcattccttgagtttaggagtctccacccgggtcggaaacgagcttggttctaaccagccaaaaagagcgagaagagcagccattgttggacttggtctcagcatcgccctagggtttacggctttcgcgtttactgtctcggttagaaacacatgggcgatgtttttcactgatgacaaagaaatcatgaagttgactgccatggctctgccaatcgttggtctatgtgagctcgggaactgcccgcaaactacgggatgcggtgttctcagaggctccgcgaggccgaagatcggagctaatattaatggagtggcgttttacgcggttggcattccggttggagcagttttggcgttttggtttgggtttggatttaagggactttggcttgggatgcttgcggcgcagatcacgtgtgtgattggtatgatggcggcgacgtgtaggaccgattgggaacttgaggcggaaagggctaaggtgctcacaacggcggtggattgtggcagtagtgacgacgacgccaaggaggatatggaggctgggatggttgataagtagggaggaatgagtcatgaggaggtctttaacaaaaacaaattgactttgttttgaattagttgataacttttttcttttattgagaagagattcgttggaggattaatgtaaattttgtagtgtaatgataacacaatctagagattcgtcgttgtattcaaggtttttaaattcataaggtcaaattttgctcaaatcgcttaaacctttctttattcgacagaattcagttacattgtatgttttgtttagtgtaacgatttttttggacgcagaataaatcttgagaaaataaataaactaaccattgaccttactgaagaaaatcaataaccatgggattgtgggtgtctttgttaattcaatcaatataacaaactaaagtagcacatgcggacgaaatgtaaaaataatgggggatttttttttttaatatgcataaataattatataactatatttaaataactgcaaataaggtgtgtacaaggaattaaattcacatatgtattataaccatagtcgacaatttcaaatatacatgtttgattaattagcttctagtgatgcttcgaggcaaagtatatccctctatgtgatagatcatttacacatcaatttcttccgtggtaaaataaaatagataaaacctttgcgattattaaaaaagccataactatgggatcatggttagtttgtgttttcttttactttggaaactcctgatttaaatagaaaaacatttaacataaaagaaaaagcctttatttacacacagaagtttagccaatcacttacttctttccaaatgctgctcacaaaaataagttttttcatattttcattaggataacgtcaaaaatatcatttatttatttaataaatcttttatcgctaattttattttctattttttatctttttaatatcgtttatcgttacatataataactttaggcaaatatatatttaacattaattatttttttgcacatgtttaagctattcgccaaactaacatgtcttcactaatattggcatatataattgtcaaactgttataattctagaagttgttagttcgaatgacatttgagaagagactatataaaatgttctggagatggtatattgttccaaaggatatacggatataaagccataactttttttagacattaaaaacaagaataaaaaatttgtcaaaccattggtccgctggtttcactccatcaccaaatgacaaatgattcaagtgatatcatgtgtccaaactttaggttaacacagaacaatgagaaatctttaaccgaattctaaactcatgatacatgaacttgtctccaattccacattatgcatcataaaatggtttgttaatcgttatcctacaaaacaacctaaaagctataaacacttgaaaaattttaaaaaagtaaagacttttttgactcataaaaggactaataccaaatttcatagttccaattttgaacaaaaaaacacaaaaaacacatgagaaataataacttaaaaaatctaagaacatatgttgcctcataaaaagaccgatacaaacgttagaaaccgccaaaccggtaacatattgtacatcagctaccagatcgttgattaagaattaagataccggtatagtcgatgtagcctgcctatacagactcataatcgacctgaaccccttattatgtgcaatctaaaacaagtgttttaaatcaaaagactaactacaacaatttttttaatctaataatacatttgttgtttgctattataatataagtatttgattaataaaatacgaaatagagattcgtatccactaaaactagtaatataagttgtgggaatatcctcccttttaagtatttcaaagggcactacaaattttgtctttacaaaacaaccaaagtggataaataactccatgaggcacttcaaaagtttccatacattagtttatttgtacttgtttcttacgaaatccctgtcttcatgggagattcacttatgtgatatagtttcatttctaattaagatattcattattgtttgcagtaccctataaactaatcaaatgatgattaaaattcattaaaaaaaaaaaaaagagtgattaaacaagaatgaaacgtgggttatgatccttagaaatgaactacattatggattagtgtattaatttatctatttcttagatataaactaaccaaggaattacacagcaccttttttcttaacgtggcagcttacaagaactgagaaagatttggttaggagacacatgccaagaatcactcatgttggagttttaataatttaacacgtacaactccaaaattttaatgagcgatagggggtacttaattacttcctaggattgaagagccaattacttgttatttattctgtcaaattgctaattcttattgaggtttccacgtgtatacagaatatttgacattaatgcactgtagctaaaacattatggagttaataatattaatagtaattttcgaaaaaggtttcaaacccagttatttgatatattgtgaagaaaggtctcacatcagagatgaaaatggatttgagtaatacataaaagacatgagttaatttatttattgccaaattgatttagaattggaaccccataacaaattaacatgatatcaaaacatgaatacatgttgatccgttaatacggtccaaacaatagctcgatcactccatgtatgaatggttcaacgaaagctctattccgtcgaaataagtaaaaatgcatttacatgtttgatgctccacctaaaaggatatttgtagtaagaattaggttatatatcgaattgttcaagttaagtcggattttttctaatattttgagaaactggaacgtcagttaatcgtgcatttgtagtaagaacacatacttttaggattttagcttctcttttcattttgtcttggatttaatatacttcgcctcgttaactgaataagagtatatataattttagagtacatatattataacttctaatgtatgtaatgaggcagcaataattgaagttgatgagataaaaactgcagataatattaagtatcatatatatgtagtaaactaaagtatcaatgtagtcacatgcatttgtaccttatatcagccaaattcaggagattctgtctcctcgacggagattatgaaacacatctaatatagtaattattaacaaagcgaggtaaccatttgactaattaagaatcattataatatatactatttgactatagagcggcctcaaaaggccaggccaaacactgaaggctatatcagttttgggacaatggaagcgacgacgagattttttagagaatggcacaagttacatgaaaagctaatcgactaagagaaaacccaatatttcaggagcaaaagttgtgtgtaaaatcgtacacgaatactctaatttatgtgtggaaaaatgtttcacaactgcatttaactgtatatataactaaaatgtagatttatttaccccaatctatcgaaaacttatacaattaaccatatttaactaatatatagtaattcaataaatgaatgatctaataaaagttattcgtaacacatgtgaaactgaaaatagcatggcttagaaaataattcctaaatcctgatgatctatgagattttctatcaatgtaaacttttttagtctttggatgaaaataaaaccaataaataagtaacaaaatgccttagacatagatggtcgaagcgcgcaatactggtatacaagttatgagtatgaaaaaaaaagaaaaaaaaaatattatgcaactgaatacttttctatttgttaacagaaatatcgtcaattattgtgtatgcatgcctcttcatccaacaagcaattatttcaattttacaacatccaacttttttgtcagacaaaataaatcttggcaccacatctgatcctgaacaaacaatacttagataatatacaaggtctggtcagcatgtagttgctgtcgatgtaaacaatttattctaagaaaaaagaacgtaacccgtaaaacatacggattcaaatgagctgaaaaacgtgatgatgtcaagaaaaacaatcgattagccacattacacaaattaactcaaaatgtacacacgaaaacgcctattgaaaaattaggaagtcaaatgagtatacagtgagctcaccaataagtgattataatcgatcacaattctcgatacttgacacttttgagcaatattgaacaaacttgtaaatccttgatgatgaaagaagtaaagtctagatacattattttcatagttttgagaaagaaagaaaaagagtctcaatagatcctaaaatcatggttgagcagtatatatacttggggttttgaatcattatttgctattttggggttgaaatttatttggcgatttattggttagagggcatttgatgcaaattggcttaattagatctagtgttgaggcttttgctctatatgaagaggtattactgaaaatacgggtgctagttgaaatagaaatataatcctaataaaaatgtatcattttggtttccgaaattatcaatgatacaaagtttattaatagaaatataagtagttaattacactcaaaagttggcctttgtgttgatggattagcttattggcatttagacatataattttctcgtagatcacaacatgtatatgtagatgttaattgtatactacgtagtattcgaatcgaaaacagaaccataaatgtatagaatatacacattctcggattacgcacgtgccgtcgtatatcatcgctccatttacagataacatgaatattaatattggtataaacgaataagattcaccgaggttgatccctacttatgtaacaatcatataataatgtagtgcctattagaaagagcttatagtattagatttctcaaattattgaagtcaaatcatagaatgaacccacacatatgtggttaaatggcggttgagaattgagaaaaagttggaaggaactaatccaaattcgagccatcctaaaaacaaaaaataaatttgtgtgggaaatatgagtttaagtctttccaagcaatttatctgatagttaataacaaacgatttttggttatctttgatattagttggaaatcatttcaaactcatgataaataggatagtagtttttctggggaaaagtctaatctaaaacattttggtgtatttctatcagagttcatcgaatcaactgatataatttatcaaataaaaaaaatcatagatagagattggtgggcttgaaggagacaagacatcagaatgaagaaagaggctttttgctcttcgttccatggctcactttggtcttttggttagcctcaatagtcacttttaatgcaaactcattatcgtcctatcgaaatgaccaaaagccgaatattgatatatttgcgtttttgtacagttaaaatttaccaatttattattggtgttaatatgtaaggattcttgattcatttggagagacagattccttgttagcccaaaaaaaaaaaagcttcatggacagtcttacattatactccatgttatttgtcaaccaagagctgaagtctaagatgcagttttgactttgtttgatattttgtacagaaagattattaaatgtgtttctaactattatcattattcagataagacatatcaagttaaagggtcttgtcactaatttattgactcttcgttttatttatcaacttagaatttataatcatatctaacaaaatatttcaaaggacgtatcatgtacggtgtgcatgcaacccaacccaatactcatgcatttgactcttccttatggacgtcaagaaaataacgtttgacatcgtcaaatgtaaagggttaatgtatgtactagtcttcaaacacaacgatgaaagcaaaaaaaaaaaaaaaaaaaaaagaaaaaaaaaaaacgtatctctccattgctagttttaaacctatacttaacctatacttcgatacatcaatatattgtaaccacgtatctctccaaattatttttttaaaatcaattcatatattaataaattaataattatagaaattaatcgaatatcataagaaaatttgtttcttgttacacattgcaaattttttaatttctcatttctataaaattgattgctattccatctcattctcctaaaatataatatataaattatataatagcaatgatattgattgagtgacaacgaacattgcaagtgctaactttttttttttttgcaagttctaactttatatagctgttaatagcgtcacgcaccatggtccatggtctacggtccatggtacactattaaagtcttcatatctatctttttagccatgtcaaacgtttcaactacctctaatttcggcacgaaaacatttaaattacgtcaaacaattacgcttacattttttgaatacatgttaagtttcttggttttcgagatgctgaatttcgaattcttacatataaaaaaataaccaattattcgttgggttacttcgtaatgtcgtacgtattagttagagctttgatcctaaatgtcccaaaaaaaataacaaaataagtcattcttgaacagttgaacttatatatacatccattgtgaatcttgtcatatgtttataaaattttgattgaaacttacatatgtaaacagcgacatgaactcatctggttgagtaaatatttcttatcggtagatgtaatttttcatttcaaaattcgatttgttagtagagtaaaatagtcatattcaagatcaaagaatagaatcatatttgttaaatgtatctccaaaaaatgtgattatgaaattcaatttttccactacctatataatataacacggtctttaaagaaaacaaaagtcgaaaaattaatcaacattttgaaaatagtaaaatgttgagatcgagatctacctcgaattcaaagaagtgaaacaagaatatctacttgggaacttgaattacgttgtgtactacagattcaatcaaaagtacaacattaaactctttctcaacttgctattgtagtattattcagtagtactattgtactaataaggataaatttgtccgctaaaccctctctgtaatctcgggtggttaccaaactaaacgcaagaatttataggccttggcccattttaaagcccacttcttgatttcttttttcccaagtctccttcccgcttataaaacctaattttaggttctcattgcgtcggttaccactttctgtcttcaaacaaatcttcgccgttgggttccagaaacaaggtatgatcatcgataatctttctcagacgttgcgcttcttaggttcttttttgcgtcaactttcgattgttgttgtcaatttggcttgtctttgatttaggtttctttgtggaatttatcgattttggtttccgtgacacataattctttgaacttctcaatgttagtttttgaatttgaggacgatacaactgttagtttcatattgaactgtatctaatatctccaagtatagtaagttggatttaatttgggttttcgatatttatctttcagctatctataatcatggttcttggagatgccaataccaatcagaaccaatctgttagaagtaatccgttcttgttatacgatgctgatcagcccggtcaaagccttgtaggagacgaggttcttactagttctaattaccatatttggctccctctaatgacattatttttaagagtcaagaacaagattggttttgttgatggaacgcttccaaaaccacctgccaataatcaaacatctgctatgtggtcttgttgtaatagcatggtgatgtcgtggattacgagttctgtatctgacgatatcagaaagagtataatctaccataacactgctcaagcaatgtggtcagcgcttaaagataggtaccacatgctttagaatttatcagatcaagacacagttatggaacttcaagcagcaagatatggatatcaagatatggatttcacaaggttcattacattgtggaacgagttaaagtattataaacctcctatggtgtgtaattgtggaggcgctaaggaagctttggaaaaatacgaacaagagaagtgccttacgcagtttttacacggtgtgaagcaatctcataggcaaacaatcgatatgattttgacgaaggagcctttgcctgatgtatattgggctttgaaatgcctagagtgtgaggaatctcgaagaccaattgatgactaccggacgttatttatggagaggaggaggttctaggctttacaaaaacagaacttccttctatcgaaagaccaccggacgttccttggtgtgacagatagtctttttttcttgctatgttctttagcgatcacagcatcaataaaccctacattacttcttctataatttactttttgacttgatgaatacgttgtttcattgttatctaccattctaatcatcagattgggactaaaacattttatttagatggttttttaactctcaaatgtggttatttccaatagtgtgacttggagtcatctttattcatgacagtttttgctttaccgcattgatatttttcgttaaagagacagatttatacatctttgtggctttgaatctgttacttattgatacttagtcaatgtctaatattgatgacttaaccaagaggttaggttggttttagcaaccttttacgttactatctttgcattcaatactctgtctaagaactaccacaagaacagaagccatataacttcactgacatttgtcgtcattatttgctttaattaccaatctgaatctgactactactattcctgctgcatgcagttgaaatataatatataataacaacacaaaaacaaattattatcttccagttccagatttggatttaattccacctgtatgatatttattaaaaaattcggaagcccactggcttcttcaccaatggtgggggtggtttcagagtttatttatttttatagacttagttgtgttccataaccattgttgtgtagacttgatagataactaacataggtactctaagtctctaaatttataattaagaatctaagttattaaagaatgtgtttaaatcctcctagtattcaaaaagtatgacaaaaaggtgtttctgttattttataaatatttataacagactaaactgaatcacaaggataagtctgtaaacatttctataatagatatatttttcaataatatttcatggctttcgaagacggccattgaatatgagaagaatcatattaagaaaaatcatttaattttgattattaattgaaaaccatttccaaatagcattccacaaaaagcatatttattttgatgaattatcctataaatcaaaatacacacaaagattcgtcgatggaagtctacttcatcatatagttgaatttggatttttaatatagcattcttttgtattttatgacattttatccatattgatcaaactctcttttcctaaataaaatttcatactgtccactgtttattattccaaacaaatattcccattcccattttcattggcagaattgtctgtctattcaacaatgcttttcacttttgcctcgtagaaaaatagggccaaattcattttcttaatctccatttagtgatggtaggtttttcaataatgtcaacatccattattatacgacaacttctccaaacaaatcgaaagtttatttttaattaaggtagttattttgacgatatatcatttaataaaacaatatttaattttgtgattcttttttttcaatttattcaagaaaaaggctgcggacaagcttttgataccccagttcatgtgaggagatgcatatgtaatgtatttacatatcttaaaacaaacaaaaaccccactctttggtttaagaacattgtagtgaattaaaatacttatagtctagttgtttcgttttgtttgtcaattcttattggccacacacacactctttgatattgcggtattcacgtgatgattgtatcaagattagtcccaaatctgatctagtagatacatacataaatgtaataaagaaaagacttcactattgattgcgatgcttctttgataattgcttctaactacttacttgttctgtcctcttctaccgacagtcgaccatttattttagctcctaccgattttttttagtatgtttgtgtgatttcgtttgatgattatatctttggtccacactccacagcacaaccctcgagttggtcgattctctcgtggagacaccacaaccacttaaatttaatctcttagggtaatgtatgatatcatttcttgccattacttggtcccattatgattctccttagaggcggtcaccaagtttgagttattcttgattattgtaatgtataaatatggttttctgattcactaattaatgtatcatccgtgatacgtaatagttgtactttcataactaatctcataatttttcatctttttacattgattatatgcaatctatcataatgaattgttaataattatgtttacttgcatgaaataagtgataatttggatatgattgttggtatatatgcgcctctttttattaatttaatcacgagagtgaatctgtactttacgtcaactatttgtatgattattttcccaaatgattatattatcatgtgatggcgagatataattgacttaatctaaaaattatttattaattgatttttggtggattctattgatgggttgattagtaacaaaatagtaatgaaaatttaaagaaaaataagtgatatgaaatagttagaaaaacaataaatatatctaagaaatagataagtgatacattagttttaaatttgcttaatgtattatgaaaatttacagaactcagtattttttttgtctacattgtacatcattttgatcatataagttttctaatgattatccacgatttgcattgtaaattgttgtgttatcgtttaagtttttgctacgaaaatgtcaatcaattttcaacctttacaaaataaaatatttaatggaatattcgaaatcttgtgcgttgatttactatagttatgtccatttaggctaaatgtcagaagatgcataaccatggtccaaagcaattcagcagaagcccacaattttggtagacgagaggcaagtcgatcccaagagttctcatcttaacacaacttaacaaaacaatatttggctctatatgaaattctctatttttcaactcttttttccacatttttgtgaacaaacgatggtccaccttagatatgtataattttgcctcattttgacaaaaagaaaaaagaaaggaaaaaattgtctcattgacaaaagatgagaaaagaaaggttttaacttttttttagcctgaaatgataataggacttagaagacccactcattgtcaacttttttgaatctttcaaagttgaacaaaaaaaaaaaaaccgacagagagagaaatagaccttctcctccatctagaaggtttcagtcccttgcaacaaaagtaacaaacaccaaataaaattccaaggaagatgcaagaagaaaagaaaacacacatgaatcacaggttttttcataatcatttctctgtagcgtctctgtttattttcgagaacgataaacaaacgccacacaaaaatctataagtacatcaaaagaatcataatgatggtgacgaagaagaagaagaagcctgaaaaaaaaccaacacttccacacaagaattatataagcatacaagataaaagaaagaaaaagtttcacaaaatgtgaactttctcaatcaaagaattcccaattaaacctgggcgggatcgcgttatttttcgcagtagtcgagctcaatggcgtcacgggatgatgatcgaatgtttcccatttagcagaagaatctaacacaaatggtccttcccctgaattcctaggctcctcttcaatctcttgcttcttctctttgtattgtatcggcatgtccatgagcgattgtatcggtttctgttcttgtctctcttcattgttatgttcttgaatcggtgcaagtctctgagcagtacttgactgtttctgttgcccattagccatggagtttttcaccttcaaggcatcgagtgtttccacataattctgcactctcttcacctaaacaaacatagaaaccaaacgttacaactaaagaacattgcgaaaatcgaaaatcattggtcctgaaatgtttttgattacatacctgcatctttctttgtaacttgacatctccttcagctacaatcgcatccaacttaatcaactcattcatcagcaattcgataaccgttacaagatctttctccgcaatcttccctccttttttagttaccatctcaaaagccgaaacctacacacacaaaaacacacataagatccccgcaatttcatcaaaaccaacctagaaagtaatggcttggcgggcagggcattactcgtccgccgagcctatcaacttcaaggctaatatccgatatcgctttagacgccttttcggttttagcaatcttcctcatctccaaaaaccgtttctcttggctaagcgggtcttctataagcaccatcttagatttatctttcactcccgaaacatcgaggaacgccttcgaatccctctctttatctttatacattagcttctgatcttgatgatgaatacccgttggtccagtcaacatcttctttagctcccctgcatcaattcaaagatcataaaatctctaattcctttccaagtcccaaattccatagattgttacaataaaacagagactactactaaccaaaagaagcttgaggactaatattgatctcatggtagacggcaccgtacttgattctaactctgatcatcggtggtggtggaggtccgacaggatccaaatccgggttacgtttctgaaccaacataccaccaggtctaatttccaaatcacgaccgcctgactccctgccgccgccaccaccaccgccgccggaacctctaccgccattagtcatacccgccgtcggaagatttgtcggtttgtttctcatcatcttcatcataattttttttagctaacaaaaaactattcgtctctttcccctcaagtaaacggatctgaagatctttttctgagaatcaagacaaagacattggagaaagacaagagaatgttattacaagaaatctgagacttggaacatcatcaacacaactccaaattccgacccttttcgccacgtgtactacaaagatcaaagcagagacctttctgatccaacgaactaaaccaaatcactagtctctctctcttctctcttcttcttctttgagcttccaagaagaatctgaattgacttcagatcgaaagttttttaactcgagaaaaagagaaacgggattttggattcccgagaaaatcggtaaattaggaaagagtagaagaatcagagaaaagcatccggattctctgttagagtttcttagtttcagagaaactgtttgggaaaaaaaagaattaagtatttaagagaaaacgaataataacgagtggccagctaattctgcttcttgtttgtgcctgtgactttatatatgttattacatacatgtatacatttaatttgtatgtatttttttgtcggaatatattttgctttgtctttgggtttgcaactttgcattggatttactatttttccgaactgacaaagatataatttgaaaatagaagtgttatgttgattgggtcaaaaaaaaagaaacaattagtatgctgattattatagttatcttactgttcacttcagcttaaccttttgagttttgatcattgggaaaatgtcgtatttgttgtggtgggagtaggttcgagtggttaaaaatttacaaatgaggcatcactatatttaattctccataaaagatcaaacaatttgaaaataatttgtgattaaataacaaaacaaaaaaaaaactagtacatgtatcaataaattagataaaattgtactaaaaataataataataatttgtttgattttcctgtgatataagcaccaaaatatagaggttgagaactgaataacagaaatggaaagtgcagctaacgaagcattaaagcacctaatggcttcaatacgcttatatgtataacaaaataaacaaaaacttaagacgaattggggaaatgttaatgtacgacgaggtgcaggtaaagcattagaagacgagtcgtcctgtcgtccacgtgtggtgatggctaatgacaatttgggaaagttcaaaatggatgcaatcatttgactcgctgcgttggtctttagcacaaccatgtggttcttatcctacgacacgtgtccgtgttcgacggcgaaccatttgggatcgatcggtgattcttttctcctcccggtcatttactatttaaccaaacaccacgactcctcgttttatgtggtatggtaaattcttgtcaacgttagtttcaagactaattttggttcatcttcatcttgctttggttcaacgtttctttcaagactaccattttataaaatttaattatgcaaatccaatctccatcagccattatctgttgaaaaatacaagaaattatttggtattattaaaccaaaaaatctctatgtattatttactaattaattagcttctaccttttttggtagagaaaaatggctatgaagatgtagtcatgataaaagttatatgctctcttcattttatttctatttgatgtttaaggtttttgtacaccaattaagaattcatttaattttagtaaaaaaaactattgtcatttggctataacttgacgatgaagaaaaatgtgaaaatttgtcattaatcgttattatttcataacaagtgaataaatttagtttttaactattcgaaagtaaattgcaacaaatttgctacttcatggatatagtttttaatggatatgctaaactaagttagttttgttttagatataccaaactccaaacccataatccgggagatgcaaatcgaagactttctcttattttctcttctttgtttttgctattggatattattccgttttttgtttccactctctttaagtaagtgagtcagagtgctttatataattgttctgtagagaccatccaacttttggtcaatgagccgacatgttgtgcaacttttacatctctagtaaactttttcatcctccagtacaaaattgtcccttagtttagatcgatgattagtccgaatcggttcaaaaactcgatgcttctacatgatttagtagttgtgattgaagtctagcatagtgttggcgcgaagcaaaatacgaaatttaaaacaaaagcaagtacaatgttatctaatgtagattttacagcataaaagttgagaagaaaaaataaaaaattgttttacaaaaatcagaattgcgcttttctgccttttgactttgtacttttttatcttgtttactctctctctcgggtcagtcagattattttgaacgtgcagccaccgacacttgcggcacgtgcgacctcacacgaacacaagttccgagtggttgttcctctgcttcgcgttacatggatgctgacggtgtgccctcatttcactttagccgacgctgagaataaatggccggtgcttggatttattcaacactttctttaatttgccttcttaactactgattattttattgattagccattgaattatgtaaagttgtacaaccaacattttttaattaagtggaatcttttacgtactcacattatggggattcttcttgattttttttttgtcattgatataaacaaaacacaattgagtagagagacgttttacccgaccaattaattattactataatggcagtataataatgttttttttaatacattatgcatacaaatcaaaatttcaaaggcgtgtataatgtgtgtgtgtgtttcacaataaaaatttataacaaaagcgaaatgtgaacaaattttttgtattagttaaactctgtcgtatgcatggattaattagctttcaggtcataatctatttggttagctttagttttcggtcaacaaacttcagatccactataccacaaaaaaaaaaaacaatttattgccattttatatatatatatatatatatatatagtataagtatagactagtcattaagtttggatcaccaattatatcgaggtcaaaaaatattgtatgcgattgaatttatatttcccactatcatagttactataaaatcaatattttagtactgtgtacagtcaaatatctttttgaaaaatatatatgcaaatgggaataaatttagattttgtgttttttttttttttttgaatgaatgcaaaattttattcaccaaaaaaaccatggttacatcaagtgcttcttgtttgagttgttaggctcatactttgtcctagctatgccaattaaaacctagtggaaagccaaaatacaaacaaatcatcatattttgggtttccttgtttctgaagaagggtgattcggttgcgaacgtttttgtcgatgttgtttccaatggccaatggtgtgatagggttctcctcaccgtgtcggcgattattcctttctctccatatggtgtgtaccgttatttgaaatgtatatctcagcagtagaagatgtgaggagcgtaacaatgcggtcccaagaagaagtgtaatgaccttgaagtaggcctttcatgagcttctcccacacttgtgttgaataagggcactgaaagaagaggtgatttcttgtctctaccggttcagcacagaatttgcaggtagtatccacttgtgtgttccatgatctcattcttgcacccgttgttagtctatcatgaattgcaagccaagtgatgaaagagaacttcggtgtagcttccgagaaccaaatccctttcgcccatctgcagattggtttttcaactctcagcattttccaagtttcatttgaggagaagttgtgtttaaaacctgtcttccatttccatagaatcaaatcttcctcttcaaccttcctcctcacccttgtttccctgatgacctcttccactctatttaaagtctccactctatgccgtctacctctgtgagaggccaaaacgtcacccactgtggcttcttttgtaatacccaaatcaatgcaccctcgatctccaaaagtatcaaataagttccccaaagaggaccatgtatcataccaaaaggatgtccctctgccactttttatttcaacctgatagaaatcctttgccaagtctctaagctttaagagtttcctccacatccaagaaccttgagatgaatttcccttgactgtccaaaacgttttttccgaattaaataggcatgaatccacttactccacagagacgttggtgctgcaaataaacgccaaattagcttcagaccacaaactttgtttgtctctttgagaggtcgaagacctagtcctccttctctaatcggcaaacaaactacatcccacgatatcttagctttagaaggatttaaatcaggcccactccagagaaaagcagaacaaagttgttgaatctctttaatacaagcgtcgggtaagctgaatgttgaagaccaaaagtttgtgatgctcatcaagaccgctcttatcaactgcaatctccctgcataagatagaaatctacacgtccaagagcttattctggttctgattttctctactagaggaagataatcatgagctgacatagctttagtcatcaaaggtaaccccaaataccgtactggcagcttacctgttgcaaatggaaaactcgattgaatggcagcttgagtagtagggtcaatccctgccatgtagagagtagatttctcaatactaattctcaaacccgagcattttgcataaccatcaaaaacagagataatttcctcgatagattttgtgtttcacgttaatttgctttatcaatttgccattgttgtttagctattaaaaataataattgcgtttgccaatgtaatcaataagtgcaaatgcactttgaaacaatatatcaacagcaactaaagctgatatgatatatgccaatttcatgtatgaccactgaatcataggtgaatgtgaaaatggagatgaaagagaagctaatgaggacaaaagagggaaacaaagcaaaaacggtggtatgaagcttatatgggtgtaaaacattctaaatcttaaacacaaccatatcttataaagttataatgaagatgcatgcaagataagatacaatcagagccgttgatcttgaatccaaaatacatgctctttgtttgttagctacatacgtacatatacacatataattatgtcacgtacttatctcccgacaatttcatgtgataatcatcggatcttccaaaacattcttacccaatccatctgttgtatttcgtcttctatgcaaagttgtataaagatgttcattaaaacatttagttatgtcttctcaagtcccacaagaactatctataaaacaatagtcccacaagaactcaaatatagatgacacaaataccacaacttcattatgtcaacggtccaaagacattgtaaatggtcgaggggtcgcatgatcatgatgtgtcctctgtctaagaagaatctcttcctagcatcgatatagaattccaacaaatcttggtatgtgccaaaagtttgaaatgaaaactgatagaatgatatcagacaataaaacgtaaaatagcccattgaaatctgcagttagcgcattcaatcaagacggacaatctgttaatgggctaagaaaagcccatttgtctaaattcttttattaaaacgacgacaaaagattttatcgtttgtgtttattatatcttcgtgaagatgtgccgcacggaaaagaaataaaccctaatagcctatgaatgatgcgagagagtatgaaagggaaagattgatcgtgaaagggaagatgaaaggagagaagaagaacccggagatggaggccgaaacgtcgctgactcgctgagaagaagagatcatcaccaccgtgaaggtgaagtattgagagagggagatctggtttacgacactaaggagaggtagagatgacgaagaagaaaacgcagccaagataaagtgaacaggagagaggtcatcggaacctcaccgaagtaccaccacagccaccggaggtcatcccttgcggagcaaccgaagctcagaacagatcgtcaaaggaagacaggaggaatgcgggctattttgaatatgtgtgtttggggagagcgatttctcgtcaaaatagtggaacttagatctagagtgaggcttttctgaaaagttctcgctgcaagaaattcaatgcatttgggttgaggaggctgcggttgaaatgctccaaagaggaggctgcggtttgagacttttctccgggttcaagtttcagagaggatatctccttagaggagtaaggtttcagggaaggtatctccttagaggagtaagcatgatgcaatcggcaaataagattacaagttcaaagcgcagataatcttctaatcaaaagaccaagattagccggtttcataaggcttgaggagagggttgatcgagcaagccgaagcagttttatccaacaaatctaagagggttcagatgcatcgcccaacaaacaacatgggacgggatgagtaagcatgatagtgggaaggttcagactcattatatgatcacataaaagattccgattacctctctcctgctttggtttagttttgccttggtttgcttctgtccatacctttgacctcttgtgtcagctaagtggtagtaagtgtccagtgtaacttcagttaagtggtgtgtttttttctttgattaagtaattttgctagaatagcaaaatttataaactaattaaagcatgaagcataggtactaacctagtttaatattaaaaagaaattaacatctctaatggaatttaattttcattttagttgtaacaaacatttttatacaaaaatttgggatattattagtaaaataaattaatgattatacttttgaataaaaagttaaaaatgtggtatttcaacatagtttctagtaataaaactcttatataatattttttttgtcaaccgatattaattagataaatctcaaaaaaccatttctaaaaaaactcttatctaataatatttgtttgtttgaatttttagaataatttcaattttccagcaaaatattaatcattgaatttataatacaatgtaatcgaaaatgaatttcatccaaactaaataaatataataaaaagtaaaatgatttttttgaacgcagctttcgttgtaaaacaagaatgttattacaacttattattcacgtcgccatccccacatgatttgggcccgtacggattttaaatctagcccaatagaagtcatctgattcttaacaccacctactcatttaacgtggcagctcaggacatcacacgtgtcttcaaattagggttttcttacgaccccttcccatacattaaagccgccgccgcccaatctgtttctctgtgacgtttccagatctgaagcttgaagtggagtcctatcaggtatttcactttttctctttttatccttttgctcgttgtgattatggtcgagttttgtgtgagaaacgtcttttgaaaagcagaattctcaaacagctttgggatatagtttttggaactccaagttttaatttaagcctaattttgaagatgaattgtcagtataaatctttgatctgatactctattagttagtatgtgaatttctttttaacaattttcttattcatgcgagagctatcaataagtattagaacaaagttttatactgacaattcaatcttacctgattttcaaaaaaaagtatatcttgaaattttgtcttgggtagagtctttgattttgctagatagtagcattaggtgttagatgtttttattcagaatttgaatgtttgctatgaactatctagattaatctacttgtggattagactactctccacatgttttgggttataatgatgtaaatatcaaaacattgatggagtagatggggtggtctagtcaactaaggtattctcaaaaattgaatggtctagtccgcactgctaatggatgaccatctatatgtttagtaccttatatatcaaatgatctttcatttttccttggacaataatggctatggtcattacagtctcttttgcttcttcaaaataattttaagcaaatctgagatgttgtgagagatcattactccacccaactctaactcatagtataagttttactatgtgcagttctcatcttggaaaaaaaaatgactcaaatcaatttgcccttccaaattgggcaaattgtggaggttaaatcttttatcagaggataccgtggagcttggtttcgatgcaaggtaatgcggctatcaatacttagtgtaacctaactcttggttttgaagcaagataattggactcattgagacaacctttacccaaaatttttatatcatataggtcattccttgataggagtaatgtatgtacaaatgaatcttgaagactagttgtaagaactacataccaatcactaaaactacatgttaaccactatttgatgtagtgtctgttgattccacaaagttcttatggaactcttttgttctttctcctttgacattccttttgagttgccatcctcgccgcaattccaacaacctttgtttttcaaggtcctaacttaatttacatgcccctccattgttcatcttcctcttttgacttccaaaatatgatttcttcttagcaacctttttcttttaggtctccatctcaatcaacctttctattcttacagctcgagtggacccgagttcaagactcgggcccatgtctctattttttcatgtggagattatatccctgtcaagtcctcttaaatctaaagaccaatcttctcactcttttggaggtgtcttacacaccaccatactaagagctacttggttaattcaatgattttttttggaatctcaaaatcttatatctttttacatagaactcaatgaacctttttgggttggatatcagtttgatgcaaccacatcaattcttcattgtctcttttggcatatctatgaggttgagccatatatatcccttcatctagttctccatgagaaaatgatgttttaacatctaactgctatggttcaaatatttgggcactaattacttatgaaaacatgttttagcacatgaaaaaagatttcattgtgattcatctttttttgcacactctttcataacaagcctagtttttaattcttgaacatcctgattttcttttggcacatccatatagagattccgttttcttatcattgactcttcctctttgtccttgaatggatttctgatggcagccttgtaattagattggtatagctgatctctccatttttttatgttagcaaagcaatatttacaaaattacttcaaatctcgtaggagctttaagatttcttctcattatctctagcaagttgagtaatctgctagttctaacttagatcctcaactcctcttccttaatagcactcgtagcattgtcatcagattcaccaatatctcctcgtaactctgatgatgttcacctgtagctcattatagaattcatctttaacgttgtcatcatattggagatacttttctgtgattagatataactagtcgaactaatgtaaaatttcgactgtcttttttgtttttgatggtttattagatattggatataagcaatgaaaagggtgaactaagatacaagtttaagtatctcgactttccagatgaacgttagttttatcctccaagtatatatctatttcggttttctaactattgtaatgttttgcaaatgatatatgtttcagctttagataatgcactggtctttgaaacacctaaaggtgggacagaaagtcagctaatgcttcgtccaaaatatccaccactttatcttgaaagtgaatatcttaatctcgagagtgacaacgtagaacctcttgtcgtcgttcatgattcttggaaagttggagatttagttgattggttgagagatgacatttattggtctggagaaattgtggaaatgagaggtaggagagcatgtcaggtatgaaacatgttgctgttgtgaagtttgtcattgttctttagttttatggttttatcagttgtctacgagtaactaaaatttgacaaaatttttgttgtttttttgcagatcgaattgcttcctaaaccagaaggggaaggagatagttatcaaggtttgtgtaagaatttgcgtccacggttggattggtcagtggaagatggttggaaagtgccttgcactgcggttagtttttcatttcttgtatctgctcctgttcttgtttctgagatttactcaacagatggttaaaattttctggttcttgaatagtttggtaacctcacttgtcatagttgctgatcttggtttgatcacatgtgttgtaggatgggaaaaaatgtgctaagatcgtgacatctaagaaagaaggttagattttttctaatggttatgtgtttattgaattcgtttggttttcttgaaacatatgtttgacttatattttacatttagatggtggaattggagatgaatgtgaaactgcaaaagagcaaacgaagaaaaccacaaagcaagtggaaggcaatgaaggtcttaggcttaatattatggaatcggatggaattgaagctgctgtgttggacatagaagagcttatcgttcgaattgattggtttaaaggaatattaaagccggatgttggagaaggtgcaaaatgttcttggaagtatgaagattaccgcccatcttcctctggaatgtgaattcataatggtagtagtaggtatgtgatattcagtcccttactgtcttgtggtttgttttataactcagatagtaattatccaaattaccttttatttgatgcagaaaaaaactgaagttgttgatgaagaaagtagagtaaaatggtagaatggacgtacgtgagtaggaggaagccaaatatattagtaggttgacgttgtttatatctttttgacaaactctagaatgcttaaaactactagtttcagagtttgtacatatgttttaggattttattggaaacgaatgacatgttttgtgcttttatccatgtccaatagacaatagtaaaagtttcaggtccatatggatacaatcttgaatttttaaaaaatcttcatgtggaaattggaacgtagtgaatccgaggaaacgtgagaccatcttttttgtttcattcacaatttgatcagcggtgggtgataagactcatgggattgccggattgcacctcacatcggtttaacatacacgcttgatcatctaatcagcgagtttgtactttggacaaaaaacctcaacgtcttctctcactcctatccttgagagacagaggcgacttctgatatactggaattcgtattccgaccttaccacttttgttgtaaatgtattgtttccgattctaataagattttcttttcatttgtcagtttgttttctccggcttgtctcttcttacgagatctcaatcggaatcccgcttgccatcacttgatctccccatcccatcgttggcttatctccaatctttaaccaaagtaatatcttcgtcgactactgtgaagaggacctcaactaggtctgaggcggagcttctgctaggaatcatggtttagatgatgaaaatttgaagataccttcttgcagtatcttcgagatggaagcggtggaagtcaatcggatttgcaatggcgaactttgcagaaggagtttggtggtggattcgtgaagtcaaaggcggagtttgcaccggatcgtagatcttgggtggcaccgaccttgtctctctctcctcctcgcgtatcaatatgtgttgtacacgcgacacgttagtttcttaatcttatcatatttgatttttttttgccgttaaggtttattatttattgcaaattatgagaattgttacatagacgattttacaacggacaattccttccaacccttattagatccacgacagcgacaactcctcttcttcttctctatgcctttgatggacaccttcaatgatcttctctgcttagaatcctgacgaacggctataattgtgcatcgtttgagatctcctgcacacttacctctattaatctgcaaatttgctaataaattgtattatttgggattcgaaccccagaccgtcatctaggcacatatcgcatatgtccccggtgtcggatgaaagagaggccattaatcatgtcctatttgagttaggccttctctgtttgtgaacttagattacctttttggaaagcgaaggaattaagaggccgcaaagaggtcatccggatcttctgttgaattatgtggtttatcagaatggcccgtaactcaaaggtatttgagaacaaggatacccatcctgctaacacgtttcaacatgctttgaaggaagcagaatctttccaagtggcatgagcccgcaagaggatcctttctccacatgcatgtatcccatcattccatagagacactcccatttgacactctagtttgctaggtacatggatcttgggaggatacttgcaccttaacaatattggttggattgtccatattggtttaaagagctttcgcagttgacaaatatatccaaagacctaatcatcaacaacataccgaaactccaaacaccgatttaaaatgtaagagcatatcaatactgaagaatgagaaattgtaagataaaatagaaaaagaaaatcatctcatacctcgtagtagtggaatgatcagccaaaagatgcaacttgatggttgagcagagaaagaaaggtaaccgattgtgcggtgaggtcatagactccaactagacagaattgggattccaaaaggacccagtgtggccgaggaaagctcagtaatcgccaatgcatgtattcagttacatcattatattggtcttttccaacttgtttggtgttttaaacttttgtgtaataagacatcaaatatgtaaggtagagagactagagagagttgatcatgtaattaccataaacccatggaggactaaccggaacgtacgtgagagaaacttgtatatcttcatatctctggtaggtactaccgaactggttaggattttcacccaatgttgcttcctctgatcgttagagatcgagtattagactgtgggcttccaacctaaaaccaattggcaataggtggagaggctcatatcttatatataccacttaagatcctactcaacttccgatgtgggacattgtccctaatacgccccctcgagatgatggctcttctagccattgatctcgatatgtttgggcatggatcggcgggccaagtattgggccgaaccgatgtggatcgggttgagtatgtgcggatcgggctctgataccataaaacatcataaaaatccaatacagagttttgataggaaacacacaaaaacataagacaagctcacataaaaaatctaccaaacatttcttcttccatggccattcctaagcgaaagagatccaagactcgaagacacatcctcaagcaaagcttcattcatggcatctcttagattcatctcatcagtagcatcatggaaacatccacgtgtcctagactcacttatcagtgttgcccaaatcgaaccacttagagccaaagttgtctcgttcccaatcacccataaacagtgtcttgctcgagtcagtgccacgttagctctttgacggttgttaagaaatccgacttttccattaccgttacttctaacggtggagatgatgataatgtcttcttctcctccttgaaaaccatctacggaccgaacattcaaagtgaattgctgacctgataaggaactgtacttatctccgattttctcttggattgctctcatctgtcctttgtaaggtgagaccactccgacactcaccttcatcctcctttcacatgaaactttgtaaagatttgatataatttcagaaatgacagcaacttcaaccatgtttttgggactatgtccatcaccaaactcttcttttccacgtccaacattgataaaagaaaatgagtcaaacatgtttcctttaagaaacctcttttgataaatactttctttaacattttcagcatctttgattctcccaccataaaactccttgttggggaaacgactaatagaaggatgcattcgatattgaacatcaagcaagtgtttgttgtgaccaagcaaaaccaatctctcaaacaagcttcttccgaatttcgccttttcacacatctcattatgaaccattgcaggcaattgaaactcatctcctattaaaatggcgtgacgcagtcccggaagttgcaatgcagcaactgattcacattccttaagctgagccgcctcatcaaccacaagcagttctacatttcctgtcctttccacgttcatttccgcagcacccgaggctgtgcagaggataatatccgcgttttgaagacaaaatttcctaatatcttcgttttctaacatgtctggaatctcaaaacgttttggaagtaagcgtagagccttgaggcaatcatcactgagtcttttgaagcaatcaaatctgaaatttccttcctcgaaatcaaccctagaagaattctccctcaagaaatatctgatacgctgaagagtttgacgagaagcaatcattttcttcacatcttcatatggaaggtaaaccttgggaagatgtgtatacaaatcaacgatgcatgtcttcacttcttcacttaagctattaaaattcttctgaacgaattctccaaaagtaggaatgttaacaacaacttcttccctttcatcttcttcattcattctttcaacttcttctaactcgtagacatgtctctcatactttccctcggggttttcaagaaactgtatcagtgactctaatctctgcatccatccagaaaatggtgaaaacagtttaccaagcttaccaatacgctcatcaagaaacacatcgagaagaacatgatcgttcttgttaatccccattctgtcccggtttccggataaaatgatattccctagcctgtaagtagcattttccgctgtcgagttttccttaaataaggataagagccttgatgtaacttgtacaatagctgtgtttgtaggagcacacacaactgtcttgcaccttagtttgagaagggcaaagagaagagtcgcgaccgtctttgttttgcctgttctaggaggtccccatatcagtttcacactgttcttatgggtacagtttcttgtctcaaggcagcccaagattgcatcctcttgggaagagttcaatttcgttgaacggattatatccaaaacaaggtcagatctcccatcattttcagaacaaaaacattgttctgtaccctcagtattagcctgaagcacactcttggttagagtcgatatgtcagcttcgttgtgcaaagcattccaaattcgagtgtttgttgttaaagtcattagaaaaacaccgaagctatagttctcaagaggtgatatcgatctagacaaatgaacagagattttaagattttaagatcacctctatagttctcaagaggtgatatcgatattagactgtgggcttccaacctaaaaccaattggcaataggtggagaggcgcatatcttatatataccacttaagatcctactcaacttccgatgtgggacattgtccctaatatcgagaactctgatcgcctgaaaccgagaatctgattctggactatggaaagttttgaaatttggccggaaaattgaaaccctaaattttttttgttttgagagagaaaacccctaaaaacccaagctctgtttggtgtatctctttcttgggaaacaagttcttttattgcattttttttccctatcctcgtattttccatacaaaatcaatgttaaattttaagtttcaattttgtccgcaaattagaaaacttggcaaagtaaccttcttagtgtaaaatttttagaatgccctcaaccaaattttaaagtgtttaaaaaaaaaaaattaaagtgtttaaaaaaaaaaaaaaaacacgaagagccaagtaaccttatccattcatacgcctcaaacagagacgacagcgtttgaagtagaagacaaaggacagtgcaagaatctcttatcaacatgagaaaaccatcaagcaaaaaaaagaaacacaaaagctatctccgaggttagagcaatggcagctgtgaactgccatttcttccagctatcacgacatctcaaaccttctaggccttctttttcctgctctgcttctcaaccttcacaaaacaacattaaggtaatcacatcaccatcaacatcatcagaatcaggagtttccagacaatgcagctttgatatgataatgcttctaatttccctattaggtaatcataaatggagctgctaaggaaataggtagagcggctgtggtggctgtgactaaggctaggggaatggagttagctggtgctgtcgataatcattttgttggcgaagatattggcttggtgacttagcttaaaacccatctgtatactattccaactggttggtttatctattgattgactccctaactctaatgttcttgcatagctgtgtgacatggaggagcctttagagatacctgtagtgagtgatctaacaatggtgttaggctcaatatctcaggtgccattattttcttaaccctccctgtctctctgttctcaccagatttaaattctacggaacaacctaaacgaatgtctttagtagggaaaagaagtcggagttgtgatcgactttacagacccatcaacagtgtatgagaatgtaaaacaggtaaccaattaacttctctttttgtcaagctcatatccagtaatatggaaactatcactgtgttaatgatttctgaatctatcaaggcaacggcatttgggatgaagagtgtggtgtatgtacctcggattaagccagagacagtatctgcgttgtctgcactatgtgacaaggccaccatggtgagcacagggtgagatgagatactcgcagattattcattacgttccctttctttgtgaggtcgagtctgtcctgaagcaacaattgttagacgagagatggttcactaaaatctaatttcgtctctgcttgcgttatagggatgtcttgtagcaccaactctatccataggatctatacttctccaacaggctgtgatcatggcctccttccactacaacaatgtagagctagtggagtcaaggcctaatgcagcggtatgccataaacaaaaaaaaaacaattttaatttcctagaattctgggttttaactttgacacttgtggaatgttgatcaagactaattaaggcatataatacttcaaagaggctagttaagaaagaacaatatagagctttttcatatagagcgcatatgcagcttttgacattgaatcacaagaagtgacttaaacgatacctatgaaatgcaggatcttccttctcctgaagctatccaaattgcaaacaacatatcaaatcttggtcagatctacaacagagaggatagttcaactgatgttcaggtaaagcatgaataagcttgcagatatggaccagttagggatcctgtacatattatacataaacaaagctgagttttccacatatttccaggcaagaggtcaagtaatcggagaagacggggttcgtgttcacagtatggttctaccaggactaccatctagtacacaagtctacttctcaagtccaggagacgtaattaataatacttgacctcttgttagatcactcaaaatcaaactgaaaattggatactctattttaaaatttaggctacatagctcattaaaattcttctgatacaaaatgctgtccacaggtttacactgttaaacatgacataattgacgtaaggtccctaatgcccggcctactcctagcaatcagaaaggtggtacgcctcaaggtaacatggaaacaagcaagaattctccatccattaatctcttactgttatctaatcacttgccattattctctttggttttccagaatctggtttatggcctcgagaaatttctgtaggaactgaagtgtttcaccagtcaaagataacatcatcatgaacagctcatgtcatcctgcaagacatatgaagttaggaaataggttgatattttctttcatcatgatacgagtgttcaatatttaaggtgagaacactaacaacgtcgaacagtatcccaaggatttcatattaaacaactactacattactaatagatttacggcctggaaaataagatgttcaatgcttttggttactgatattttgaagtttaggttcacaagtaagcttgtatattaccagtgctacgtagtcatccacaagtaacatgacattcagaagtcttattactaaatcagcaaagaaagtaaacagttggctttggtccaattaacgttctatgaaatgtacaaattcctcccatattcagatggaacagcgacgaagcataattaccaagatgaaaagtctgtcaaagttgagactgcacaattttaacttcaacgaagcccaccaaaacagaacaaaataagcaacaaatcctttaatccatgggaacaatctaacctctgaatttctcagccatagctccaatccaggctctatctttatcgctatatgcatatccagcagtagaggccaccagcaaaaacccattcactttctgcggttcatttgtattttgtacgagaggttgcacaaaaagagaacgcgtcccatcaggaagtatatccaaagatagtgcagaacctaaaataaaactgaaagttaacatatatttcaacaccatagaaacaaaagagtaatattccatgcattcaggtatacaatagatcgacaatgctgaacaaattcaagaccgtgcgattgaagaaaacacaatacctgcatactgagggaaataaagggtctccttcacatcagccaagccaatctcatccacttttttcttaaaccaatcatgaagttgagcctttgacatttgatctggacaattccagtacccgcgaacacaaagctcgccttgaaccgatatcaactgaacaaaatacaatctttctcaactaaggaacatatcaaagatcaaacaaacccttatccaagagagtacaccataccacagctatagtacttgtattcctcaacaaaacatacgttgcccatgctaaatcctctttcaaagaatctccaatatttgatgatatcacaaaaacctgctctccttcttcagggagacttctctgctccactacagaaccctaaacacacaaccaaacaacaccaaataagtgaacaacaacaacaaaagtttttcttcacagaatctaaaagttatgaatttaccttaaggaattttccaatgtaaggtaaagctattgaaaatgcagctagtgataaacccaaagcctctgatctctatcaccaaaaaattcacaaaaaatgctaaagttcatagctttaaatagcaaaaacactgtgaagcgaaattgttactaattaccatttgagattcactgattggagcagaagctgagaagtggttaagaagaagaagtgatccaaagccgtacccgatccatctcggtagataagattcgtcaaacccaggaattcctacagacgcagacacaaatcaatttcaaatctttctcgaaaatagttgggaaaaatctgagctttgaagtggggaaggaagaaaataccaaaagtgaagcgaagaacagagagattgagttgttgatcagatgtctttgattgtggagaatcgttctctgtacgagcgaagattcgtgttgacctttgggcgcgaggttgtagcgcgaatttaggatggaacgggaaattacaaatttgaatactcatctctctctctttcagatgtcttcgagtcgaatagtttctgtatccgccattgatgatttctcgaagaacctctctgctcagtaagatagaggcccattaagagcaggcccagttgttaacgtctccaattattaagttaattttcaaaccaaaattgttacttttgtaactgattttgaaaatttcacaaacattttatgtaatttatttacaaaacgggattgctaaattttcccgccatctctaatgttttgtgtttaagaaatcaaagttcaatagttccacaaaatgcaatgttttaagaaattatggaatcatgtaaatatttcgagaatctagaactattattattgtttttacactaattatgtatataaaaaggttagaacatatgatgagaaaaaatgtttcttaggataggatatatgatcaacacatgaatctgtaggttgtaagactttttttttataaatcatatatatgaaaggaggttaactctctcccacaacttgacacatcagcacataagagcttgccacctagacttcataaaataagtaatacagaattagtaattaattcaacataacaactaaaataggaggatataattaatcagaacttgaaccatcactctttctacatttttttaattcaatatatcctctttaattttaagatccacttaagtggctaaagtgatcataaaatccaaacatgctatacatattctttgcctaaaaattagacgattattatgtaagaaactaaataaatatgcagattaaatatatctaagcttttcgagatttatactaagaaaacaagtaatttgaaagatgtttgaggagttatccttataactaatacgtaagatataagattatgacaagaacttactaaactttccaagaacatcaaattgaatatgattagattgaatatgcatatacatggttaataaagacatgttatatatttagtgtaagaaataaattgtataaaatttcaccgtctcacaatctaaacatataaccaaaaaaacaagaatatataaattaaatgaaaatctagaacaacaataaaaaacaactcaagcacattcgtttttcagatgaactaatatagtttcaaaaacaattacaaatcatatttatgtttcaaaatcgatgcattcaactctactttatatgaacatacattatataaaataatttgtaaatagtaatacataaacccgcactacgtgcgggtactcatctagtatttcttaaagcaaccataatgtcaactatcaaaattattagtaaaatttagggttccattaatttatgaagttggtttaatgtagtggttaaatggattgataggaaagtttagatggagagtttaagacctatctcaattttatcatttttttttgctttgaatatgattttggacccctcaaattataggtaaatatttaggcctttttcttgtatttttgtcagcatctttttttagaattgtttctttttctatttttttatagttatcatatcgataataaatatgacattgtagcgtatggcgacggaagaggcagagtgttagcactcatttgggcgatacaagcttcctatggcttcgggcataagaaggttatttttgagggagataatcaaaccatcacccgaatgataaacacaaagtcatctaatccaaggctacaacactttctcgacactatccaaagttggataccaagttttgaatcgatagaattttctttcaaacatcgagagcagaacggatgtgcggatttcttagccaaacaagccatcaaagagaatactcaatggtctctgtttcattcttgtccttattttctgagtccatatgtaaacaacgattactcttaagttctaaataaagttataagttggaaaaaaaaaaaaatatgacattgtagcatagtgtgaattttagagttccattggagagattttagtgccaaaattacactaaaatagtgttttagagtcccattgaactttgtcttaggctttttaggtttaggcatgataacatggaatccaccacattactttttatttttgtaactctaacacctattttttcgtatataaagaaaaaagtgttagtaggtgtgtagaatttgttattcaagatctcgtattcaaaaatctagattaaaattcagaaggaaaaaatgttgttaaaggaaaaaacaaaaggagattatgaaagaaagagctaagtaaattttgtaattaacctcatgatcagaagtgttactttgtccaaacctcacctaagtaactaaaatacaaatgaaagtaaaagaaaaaagtgaaaaaaaaaatgatttgcttggactttttaatcaactgaaatccacttaccaatatataaacctcatttttttcaaatttttttctctaaatttctcaacttcttaactctgaaagagttttacatctttttaacattcttctactattacatattatacgacatctctaaatcatatatagtacaatatcttaacattctcaactagaactgcatctgcaaaaaaattcacatttttacgtaatcaatacagactttatgtattgacaaaaacacatatcctaaaaaaaatcatatctttgaccccccaaaaaaaaaactaacatatcaacagaacctctaaaaacatttaatcggaatatttgtatttccctctatactcaaatggacatatgatcacacaatctaaacataaaccacctttggtatgtgtacaatctatctggagcatagagaatttgacccaaacgggtgagttctgattctctacgacgaagtcacccgcatgatgataaacccacctccccgactcatccaaatgtcgttccgacatagcgcattggccatccgatgtagacaactgaaaccggaccggtttgatgtcccagccatgaacttggtccaaactacatgttttcctcccacactttctaataggtttgcctaattgtatcttgaaaagtaaactgtattttccgggtgcaaattcgaatctgatttttccaactgcttctaaccaccatatttgccggagataagttattgatccaaatctgaatgaacaaaaagttcaataaaattacaagttaagaaccattgatcatatgaaattaatcataatgcgagtgttggtccaactccaagtggaaaatgttgataagctctaactttagttaaactatagactatatgtcacttaattatgatatcacaagtggaggaaatattcgatctcatctaatagacttataaataagtacttaacactttttttttttgagtcttatgtatatgcagtacaaatgaaagaaattagtagtgttttgattggtagataaatgtcaaagtaacaacgaggcctgctaatgatagacttagcacaacttatctaccaatcaagtgtaatatatatcaaatatatagataaatatattcatattgaagtcatacagtgggttaatgattatgcataaatatatttatattctacttgttcctaatttcggataatattcgaatcatatatgtggacagaatctggatagaatttccaactaaacattataattattaaagaaatatatgagatatatatataatacatgtggggaaatagaaggaaaaaccgattgttgaaagaaagccatccaattattgggtatgatcgagcaaatttgggataagagaaaatgacacattcatcgacgacccaaaactttccctattcactaaacaaaccagctttttgagcttatctaaaaattctatatgtacataaatacattacctgtaaatttacgtattcatatatctatatatacattgtgtacgtcattatacatttcgtatacgtgttgattaatatcttctatctaagattcttagagaaaaccaaaatctaacatcacctgaacattatttaattttcactttatagttccctcaattatttcagaaaaatatctactataagaagtttatgatacttgagcaataatacatgagttatgatatttttcttgtttctaagagacatgagtagtatctttcagtttatctctagatctggtttatggaggaaaaaaaaaaaacgtttgagtagtttctttttttacgtagttaataatactatgtttagaaattcttaccgaattgttgcatgaaaagctattgttggttactttttttggttactatatacttttatgtctattcttagtaactcgtttaaattaatatgcaagtataaaaattgacttttatgttttcaggtttcttcgtgaagtgtgtaattacgaaatgtgtaatcatcaactttgaccaaggttatggcatgattatatgatttgtagccaataataacattgttatttcttgtttacattatccaatgattacaattgaaagggaaagaaagaagtgttgaaaaagtctttccctttatactagaactaatgataggtttaaagcacaattaaattctcaaatcagcgagagtctaactttaaggtattactaaatcaaagtggatcatggatattcgatatatctcgagattaaatattcgataaaaatatagccataccatgtcaaaattactgatttttcttacagactatctaattcgtgtccggcctaaaatgttttgactacgatgaaaacaaaatgagaaaaaaaaataaaaatgaaaagaaagagagaggtgtaaaaaaggacctggattcatcggaagaaatatgttcccaatatcggcgatcatcaatgccggttatcttcattgcctttggtgatatcgccaaaaacactttcccacttctcttgtccaaccatgcttccttctcaatattacaatccaaacatttacttttatattaatattaatttatcaaataaatcgcaacctttgttccaaaaaaaaaaaaaaaaaaattcgcaaccaacttttacaatatttttatatttttaaaaagataggaatcatcttttttttttttttttcttttgtacacatgacaaaccccgatcgcccgaattttaaacgtagcattttgatatgatttgcaagtcaaatccaaacataccggaaccacttatctataatatgaaccagattttattcatatttttcaattttatttcctctgcattccctaaatataattggtaatgaaaccgagtcacgaaaatatctttcaaactagtgatgcatgttatcctccattcatttcagtttttcttattttaatagttcctctttctatacaaattgtatttattgttattaaaaaacatcctacgaccgaaaaagatgcgaaaagcttagattataaagaaattttaaacccaaaatgtaacgaaagtgtgtttaattcaaaagaaaagaaaaaggtaaaggaaaagtgtggaaaatagtaatagcttttatgtgttagttaatatatttaggcatgatgggaataactattatactttaggcatgaatttctaacattatcaatggattcgtagaacatattctactgtctctagaagcttttctaacacttgttattggtcataaaatgaaataataggataaattagacatattgacaaaaaatactccaaataatatatttttaataaccactctgaaggaaaatattttaacaccccaaagaaaaatctaaggtggacgtaattggccatcaaataatcaaaagtttctaaacacagaaaaacaaaaaaaaaacataaattaatattatttgacaaaaaaaaaagatggaaagtatagaacctttgtgccggtgtcgaagaggtttggtcggcaaagccttgcatagatc

SEQ ID NO: 882 - DNA, 48420 bp, Arabidopsis thaliana
tctttcttgcggtaaataagtttgtcttttactcctacttgttgttgatcttcaagaattcttcggaccagaaacttgtagttactaggaagcttgtcttcccacacggcatcggatctcgacgccctatgaaatgatttatttaccctagcaagcaggcagatctccggtggctccatgtacatgaacattgctgttatacagttctcaggcacatcttcgaggccgcataactttccggcaaaaggttcggatcggacgatgctcgatgaagccgcccccatatattggtaaagattagatgatatagtatatatgattttctctttgatctttccttttctttgatctgtatgtattcaagatttgggtttgatgtggtggagaagtagaaaatatatggatgaaagagatgggtttgacatatttacgattcttttgttctttgtctaatgggagaagttaatggctttcttggttttaaaggagagagagagagagggtattgtatgtgggaaggggaaaataaattaatgtgaacagaaactatttaattgttttcttagtaagaatatttgtgatttggtgcagcttatagatgtcgctaatctatcaacaagttccagtgttttttaactagattattcgatgatttattatgactttgtcgtgtatatttgttggactactcgtttcgcagtgctgacaaatattttatttaatatcaattcaaataacaacggcgtaaaaatactaaaatgaaaagaaaaatagttgaaaaagcagaagattgttttttaaaaaaaaaagaagcggaagattattaaaaggtagactattcaattgccgggaaaaaaaatcaagggattcaaatcttttaattttgtaagaattaatttcctcaaatatgtttttttttatttaatcttctaagaatacatgtagagttatattgggtggttattttcttacgatataaagaaaattacttaaggacccgtcactaagcattattataagaaaaagagaaagacatgttgcaaggattttatttggaatatattcaaagtgtatggtttcatgtgacaaactagtcaccatgaaagatgctaatcatatcacaatcctagttactatttattaagctacatatggtttgcattatataaaaaaagagtatccatgctgttaaaaaagaagaagaaaatattcatataattttttatgacgagccagcgatttgatcttcgtcgcaaaaacatttggacctcataatactacataaataagttttagacaattacaaattgaaatatatgtaaaattctcattaacataaaatacctttctatcaagatctagtgggtgcaaaaaatctagaaatagttgatggcgcttgtggccaacgcattctaaccaataggatggcgagaatttgatttaatcatttgaaatgtttcataaattagattaacattttttttttggataaaacaaagaaaatgtttgaaaatacattcacgtacatagcatgaagtccatcatcaagtgggttgtgtcatttctttgtgggtggttaaatttcttattcacggatgttaaatgtaaccactcacaaaaagtgtaactggtggaccatttatttcatttcaatagccaatgtaactataccagtaaaaaacaccttttaaaaaaaaaactatacgattaaggttcttcattattcattattctttaggccaatagagtaatagagataaatttagatttaaccttactacgatgattgaagtagagacaccttgcatatcaaagtagttaaacattggttacattcggtatttaattgattaacgtgaatcacgtgattcacgtctaaggtatagtaataataaaatagaaaatctgtcaaatctgataagctggctttcagactagtgacctacatataccatagaaaaagcataacaccaaagaaacgaggcttttgtaataattgagagtgtgacttgcggaagaatattgtttgaggaatttagaaatttgcgatttcttttcgaatgaacaaatttaaatagaacccaaggaaaagtttgcccaggctacaaatggttacatatttgaaaaaacaaaagtgatagaaaaaaagaaaatatttaggttatttatttatataaagttataaataagtaaatcttttgtttgcattagcattatggtctaaagctccgttgtgcaaacgcagcaaatctgcataaacaaaacaataacacaaaataaataaattactaaactatattcataattaattattgtaggtacctttcagtacattatataaaaacgtaaattaatttttctattgtgttcataccttgttttgctgtaaccaaagggaaatgcattcctcatggtagttatgagcacatggcaaagtcgatagcgtatctccctccttgaaatcaatgatacatatcggacaccttcaatattccacaaaccgattaaaatcccaacttagacaatatataacattgaacaaagatagaaaatatattactgtattttgtttcacaaaaattgtgtaaaaaatataaaccgacatacttcataaaacaaaatattgtagactgatcacaatattgattttgaaactattcatacatataatggtcttactgagttttttcggatacaagatttctcgttctagacgacgaggtaaatttatgagttggtatttggccaattctcctcttcgacaatcctttgttgactgctccgatcgattctcctaattgattcagttcctaaatcatccaaacaagagttaagccatcataccttttttatattacaatagaaattgatagacaacattattaattatgtctaaatatatacttcataagtcatattatcaggatcgatgttaacatcaggaggaagagaatgagtactgtcgtcagatgaatcatgagaagaactgccaacatgactttgttgctgggtagatgtcgaacggttcactacagattaaaagtgaaacgtacatataaaatacgtttcgcagatataaaaatactacaatttatctttaatgttgagaatttaacgtttaacatataccatttaggtcttggaattgatgggtaacatcgtcagttaacgcatcatgattcgccatgtcttgtgttttggatcaatttcgacatgcaatattagacattaaccaaaacgcatatataattatataaccacattaccgactgagttattaaagtaattattcgtcaaaaaaaaaagagatgcgaaaataaatatatacacttacattcttgttcttgtagcgatttagcaaacttttcgtcatcgcttaaggagattagagaatctacacagcaaaaaaaatgtaatgaaatatatatagtcatttttttaaggtgtacaaaaaaatattggtaaattacatattatggcatagttagtacacaatttacagttattgaactttcatgtgactcaaattaatattaaaactaaagtaagaggcttttttttttttttgggaaacatgtattcttcataataaatgcctcaattcctttcataatttgatttattaattttgaaagcataacaaaattactttccatattttgccattctcttgcgacggcttgatcatctgcaattacagaacggttcactacagattatagtttttaaaaagaaaaataagaagcttatacctaattgtcatacaattgggatgatattgataacaagttcaatgttactcagtaatgattctaattagatcaatgattcatcaaaacgaaaaacgaaaaacacactagaccgaaccgggtgggacaatggttgacattaggtatcgttataaacaattgttgatgaaactgccgaccaatacctgtttgatcatcatcatacagcaaagatgccgcaaaggcttcatccatttccatttgtttcgattgcatcatcactcgcatgttataacaaaaaaaaaagacgacctgagagtgagggattgaaggcaaagattgatttaagctttgtcaaaaggattcagatagtttatatttctcaccactcaaccattttatagtaaccttaattatgtgggtttatgtttttttgtagcctttctttggaagttactttttgtcattattgaaattgatgaggaagattgcaactcacattgattagatcaaataaagaggttattagcacgccaaatatatttgcttcatgtgtgtgtgtgattaagggatcatttgatgcatgtataatctccattaattactactgatatttccgatttttatgtttgctgtaaaataattgtctactattttaaagtggagatttcgttttgttttttgaaaaatcaaaaccacacctttttaatgagtcaataattttgataatacatatatagtactagttgtgatagcactattatatcattccataccaacaatatacctaacaaaaaagttttgaaagaaaaaaaaaaccaacacatatgaaatatataaaacttatgcataggcacgagttttcatctagttaatggtaatactttataactatagggtgaatatatgattggacgataacttttaataaatgtcaaaaccgaacattatagatcgttggtccgacgagatttagtattatggataaacctcggccttgcaaatgcagcatacctgaaaatatagaaatatacataatagattgattagaatacgataaatgagaaaatgtatattacacaatacatggtagatatgtacacttgttttttaataaatatttagactgaatttatgttcataccttgttttgtttcagccattgtgaaatgcaatctttatgatagatatgtttacatggcaaagttgtaatcttatctccttttgcatactccattagacatatcgaacaccttaaatattatccaaaccagatcgaaccaaaattagatttatggtctaaaccaacacttatatttgaaagcaataacttgattaatgtgattttagtatcaaaacaaaaatccaaaagtgggacaaaaacttttgaaccaaaatgaaagatatagtaaaattatcttactgagaatcatcggcaacaaacttctttttcatatgcaaacagtaccaagatttggttttagtaccatacttatgagtccgcaatctagagatcctctcttgcgataatcctttaccgacatctccaaccgagtctcctaactcagttaattcctgttaactcaaatcaaaagaaaacaacactgatatattagatttgttttctggaccataagccatatgtataaaatatatggatgaaaatgttgagttggcacgttacatacctcatacgtcatattttcgggatcattgttctcatcatcagtaggattgtgggaaatgcttgaaggactatgagtatgcgtataacgacccgagaagttctcaccatcgtcatagtgaaaaatggctctactagactaaataataatccaaagcaaaagtcttttcagcaaatcatcaatttactgacaattcgcagggttaagaaaaatatagaaaataatttatttatttcggttaatcataagatcataagtttaatgaaaataaagatatactcattgatggtgaacaaaatatattaactcattgatttatctatgtatagagtccctagctgtatatactcgattaagaaaactacgtaagtttttgtgagtaattaattaccgatggagcatcacgttgaggtatgtatgaacgattcactggagattgaaggaaatataaaagtgttagcgggaaaagtatcaaacaaagctatgagaaattatttccgtcgttatacaatttaatcatgcttgcatttttttctttctaaacaaatagaaaaaaaactaagtaacttgatgtaattcaatttacgaaatttatatttaatgtataccttgcatggggtggtactgatggtgatgtgtttcttggatatcatcttccgtattatttgccactaggtatgataatacagtaaaacattgtacatcattttcaattggtaaaaatgactaaattattgatcaagtaagtgaaaattatgaaattaaagaatttggtgaaaaatatatacttacattcatcatgttcttgcaaatatcttgcaagtttttcatcatcgcttagagagggctgcagattagctgcaaaacaaaacaataaaaattggaaataccattaaacgattcatacgtccctatttcatggttttggaatatgtatgttaattatttagagaacattagagttggaaacttccacacctaggtatatactaaaacgaaaaagaaacctcaaattattacattataagatgatataatctttgatgtgtatagtgatttcaaacttagaacaaagtatataaattaaaagcataaaagatatattaccctccaagtcttgcaacgttcttgccaatccttcatcgtcatgtaagcaagagtgtacacaagcttctgtaaaatttcaatacaaattcgaggtggttatcgttatgtgacataaatcccacataattaattattagatcattaaataaatgacttcagaaaaagatcattatagaagagatagtaaaagtacagtcattgctttgtaagtcacaaagatatattgatagtgaaaatttaaaactagttacaaagaaaattataaaatattttgctattgaaaactaaaacctatatataaaatgatttatgtaccttcttctttctgaatctccaaagcaatagcagcatcgttacatatcgatttattttgatattgttgttgtatctcccgaccaatagcataatcattaaccgtcagttctgataactcgttttgtaaatagactgcaatattttcatcgacagacgactggtttacaagccgagacatagatatttttgtcgaatttcttaacgaaggaagtgatgccttcgatgaggattgatctctatgttttctcttaatcacaacaagagatttataccataatctatctcatctctcgatcctttcaataagaacttgaataaagctgtctctttcgagatatgatggtaattagtgaaggcaaacagaagattatatcaatttaaatgcttttcgtaccacctgttgaatttgtgtgattttgaatttttgaatttttttctttggctccacagattttctatttctctaagtttatatggtaaaattctaaggctccttttcaccacgttgacttttatttattgctagaaatactctatatatataaaattgggtttctttttctataatgggttgtatgtttctttctaagttcttgacatataattttgaaaatgattactaaatctgtttataaatagtaaacaatcttttgcaattgattatgttttaaatccaaacttttgcaattctttaacttttaaattatttatatatttatttaaatggtttgattagtgattataaccataatagtttggtggtagattatgtatttgaataaaatttaggataaaatactctaaaataaaacatagaacattgccacatggattttgttatgttaaatatcttttcaaagttatatttattttatttttccataaaaataaataaaataaatgtacccatcataattagaggcttgaatgatttaaacgtaaccaatgtttgtagacaaacgaaccagaacaaaccacatcggtatgagaaactgttttttcgcatatgatgtagtggtgatcattcaccttgaccggtcatttgactgttcccgatgacatcataaaattaatcattcttctcttgctctccttcttaaacctacgtgattagtcatttgaccgatcatgcctctcctcgtctccaaatgtaagtttcctccactattcatcttagtccaaactcatggaaaatgtccattctcatcctaacttaaatctacctataaaataccaaaaatgaaaataaccaacttttagcagtggagataaaagtacccaaaagattttaagatcaaatatcattttatgtcttctttcaatcaaggtaaactataaaacaacaatttcgttatgaaaattaagattgggggaagagggaaatcaaatttaaggtttgagttcttcctattttggggattttcagctttgaaagtctgaatcctgtatataattattatttttaagttaacgtgtcgactctcgaccaacagtaaaattctgaaccattaaagttgacatttcttggactcagtttttgcatcgttaaagaagattgaatatctatgtgatccactttaaatgttgggtttcttttgttttggaaaaattgtaaaagttcaaacattttctgatcatttggacaaatgtttttgtaatattcttcccttcactttcaataagaaattgtgttttcgagatgttaataattaagttttgtcaaacaaaaatgttaaaaaaaataagttagctggatggtagttagattcagaaaataagaaatatcagtagaggtgtcgtcgtgaagataagtacaaggctacaatctaacgataaatagcactactagtctactaacaccaagatccaagcacatcaaaaccaaaagtgatatacagagagaaataatgaccaaatccggttctatcattaccgtcctcttcatcgtcttcatagttatctctagtaagttaacttactttgccttgcttgaatgtatttggtaatagctttatgttattgcaagcagaaaattcatgatatgcgttttctatatgttttgtgtttataacagaacaaatagaaagatagtgattgcttgaaagaatatggaggtaaggtaatatatgttggtttcccctggccttttgtgcaattttgatatttctgtcatactgttatataaagtgtcacaaagacaagggggctgatggcggaagatgccaatagggacaggaagaaggtcatactaagttgacgtgcttatgcgactattgtgactcttcgccctacctgatcaaactctaagactatctccattgcataacttcatgtgtgttttaaagattaaccatagttaaaattaaagacattctcttttttggatgtcaaaaatgttttccttgaaatattttagacacccaaaaaggaaaatatctttaattttactcatgattaatctatttttaccatggttgctcttgaagacatcaatgaaaagttatgcaatggagatggttctaagcgttcactaaaacaatttggctgcaaatacagatgcaagctaaggaccatacgtttggatctttttttttcttaaactatattaaaaattcaattcaattggacttgggcgaagactacagcaaagaactaaaagtctagttacaaaattggtgaatcggcatttaaccggaaaagaaaagaagctcgccgcttgttaatagatgccaacagaccgaccggagccttaaatccggcgggttcgagacccaccgcttggatcttttgttatgttcttgtacccgttctaactatgattttatgtaataaataatgtgcatcttttgttatgtttttgcttaaattttcctcatggttttatgtgataaataatgtgaattgtccaagtaatgtaataatgaataaatgaaaaattgataagtatcaagtgtgtggtgttttaatggctttcaaggtaactagtattataaagaaaaattgttatataagttgctcttaataattatcttgaattctcacgaaattagaataacattagatcaaaaccctagcttcatatattgttaaatcattactatcccacaagaattagcattatggaacaacctcggcttggcattcacagcatacctacataaacaaaacaatatcatcaacatcagaatatttaggtgagaacatgttttttatgtaacattcatctacatttttacttagaacaaatattaaaacttaagttaacatttcatcaaaaaaaggactaattaggttcataccttgttttcttttaaccaatttgcaatgcaatccttatggaaggcatgtttacatggtaagatggttatcttatctcccttctcatagtcggctatacatatagaacacctagaatatcacacaaacaaaatcaaccaaaattagaatcctagtcgtgaccacaaattacatggatcaatcaaagcctaaccataaattatatggactaaccatacagaatttgaagccacaagtagaaagatattaaaagatatgatcttactcttttctatcaggaacaaaagttttctttgaccaccaccaagttttgcgactgtacttttgagttggtaacccggagattatattttctggtaatccttctttattgactacctcggttgattctcctgacccatttccgggattgttgttctcaatagcagtttggttaacaacaagggtaggctgatcctgacgcctatcaccatcgttaaggccacttgtgtccctactagtctgaaatttagttaaaagcaatttttttgccaaatttaatcaatttttccatgaacaacttgtgtgtgtgtcaattcttaaattttagaaagaataagtaattcaaacgaaagactttatataaaagaaccttgtatagagttggaattaccgaaggaacatcggactgaggaatgttcggaggattttctacagattgaagaaaacatagaaaattataaaagaacgttagcattaataattaaaaaagcaattgcaaagcaacgaaaaaatcttgtgcatattaaagtccaattataaatgagctatagctaacaaaaaaaaatgtgatggtaaaaccctacagaaatggtataatttttagcgtatgattatatatatatatatatatatatatatatatatatatatatcatgaatcaccttccatggcatgcaaggtttttgctgtttcttcatcttcctgtaattgcaacatttttgcataatcttcatcagcttgtatggacatcgcttctgttaaaaaaaatcaatacaatacagatgattatactcatgaaaaatatcatgatatttaactataatataataaattttatataaaaaaggagtaatcattttataaaacataattcatacaacaattaacacatgtggatatacttttcagaaactatgtaattgatttaccttcgttttgtttgattttcaatgcgatatactggtcgttaatcgttaggtataaatcatcaaactgcaaatctaatgcaattgcttcatcaatggcatcctgatttagagattgagacattggttttgatgacttttagaatgacagaggctaactgatcgagagagattgtccccaagataatcgatctctaatctctatgcatatgttatccaatatatatacattaaatcattcaaaccgcaatatttctcatttatcaaaatctattcacaaatcttttaataaatatacatagatttcctgacagttaatttagtatatagtgattttaaaaggttttagtttttttgtatgatcctataaagttgatcaatgatcacagttgttaaataaaatgacagatattgattttagaattaaatagattacaacacatgtcaaaccattaaaaaaaatattaaataaataactataccttttagagaaataatagcattttagaactaacaaaacaattaaggttataaatgtattatgacatataatattgggaaaataatatactatataaggttagtagtacaattattgaaaagatttaaaataattatgattaatcagattgtgatatgtgtataatttattaaatacaataaaaagaaactaaatacagcaaaattaaatcatccaatctttgttgcatggaaactcttcccgcattgcgtttcccgtttcggaaacggaaactctcgaaaactcgataaaaacttacaaaaacgcattttctagaattttctgtttagaaacacgatggaaactcacgtttctttttgttgtatttagtttttaaacacgataaaaacattataatttattaaatacaataaaaagaaactaaatactgcaaaattaaatccgttacattacattaactgttaattaatcattatgaccaaacaaaaactctatggaaactcacgttaccataaccaaattacattaactgttaattaatcattattgtccgatgagaatgagcattaatatattaataaacctcgcgtttgcacacacaacatacctgcataaacaaaacaatatcactaggatgaaccaatgtttgacaggtagttcttaatttaataatgacaaatttatgctatactctgttttctttgaaccaatatgaaatgcaatccttgtggtaaatatgattacatggcaaagtcattatcttatctcccttctcatagtcgactaggcatatcgaacacctataatatcacccaaaccaaagattatacgtcacattaactaagagtaaccataaatttacgtgaaataataaaaaatgataagagttacgtggattaaccatagtgatagacacattgaatttaaaacaaaaatgatgaccaaaaacgatatatagtgacaagatcgtactgagaatcgtcggcgacaaacttctttttcttttgccaccaccaccggaatttaagttttttcccatatttatgagttcggaatttggagattttccattctggtacgcctccactttcgtctcccactgatgcttctacctcattcaagcccttgctcattcataatagtgctaatgagtatcgataatatacatgttgtattgttagagaaatcttaatattatgtatgcattaagttgacaaagtacaaacctcattgtaaaaactatgtaatgagatatctgaggaactacgcctaagtgtatgctggtccggggagctattaccatagctattatagccataaaaccttccactcgtctaatatttaataagaaagcaaaacgaattttcgataaattatttatcaaaatttacataaagaatgtgtgtttgttttcagaacttataaatggatataacaactatagtagattcattagagttaccgatggaacatcatgtaggtgaaagaacggagtagaacagtaaggactatgatattgcgattgacgacaacatggacaaccatggtactgagaatttactataggttacagggtaaaaaaaagcatcagccattagtgatccaactatttgaattagaaaatctgtatgaaatttttgatcaagtgtttttgattcacatttaaaaaataaaagaaagtttattaactatttttgaaatatttattaacaaactatatattataaaaaaaaacatcttatctcaataatttttctaatacaccttaattttacttaaacaaaaatgatggtttagaacaaaaaagaagtgaaattctaaattactttagtttttttaaaattttcaatctttaattatcatttttattaatgattttattgcaatccatatttttatattaaaaaagttataaaaaaggttctacatattatatatttttactagcaaactatatatttccattttcaacaataatgtgatttttcatacgttttaaactcaaaattatataagcaaaaaaaatataagaaatcatgattaataaaatgtttaaaatattaaatcctatggtaaaaacgtgcactaaactaattagactttttaatcaactctggtgtcaaagttaagcttgaaaaataaacttttagtctgaaagtccctatattgttcgagctcaaatatatatagccgagctttatttcttagaggatcaagctttggtcctaactaacatgtctagttcgatccgagcacatcatagtttataagtaatttagatacttttgatatatatagagtatataatttacctatacaagcttgacacccgtgaaagttataagcacgattgcgaaacattgatttcctttgaagtggccaagagagatcgtcgtttaacgattattggtttataattaagtaccttttaatcaaaatataaaaggactagtcatatcttgatttttgcatctcccaacaatttatttataataaacatatttagctttttcttgagagcttgtatcaatttaaaagtttcttatagaacacatgttgaatttgtgtaaagaataaattgtgatgatactatatatggatatcacatcatatcaaaatcttaaatgtattataaatataataattaaaatccagagaaaatcaattttcttaattgaatgtttgtatatagtaatataataatttcatatgtaaatattccatttaatttggattatagttttatagaaagaaagtattttgatacctttttaaattttatctcaaataaatttgttttttaataaatatattgtgatttcagtggataagttttatctttcatcacttttagtttgttaataataaatatgaatccagttagatctcctctgatcactggctttcatctagaaaccaactaagagttttgcttctcattgcattggaatggtggtaatctacaattatgggctgactcaatttaatttgcaatgtcaccaccactgctcctcttctatctagcaaacaaatacttaattgcatttcgaaaaatcaactagtctgtctccattatcatatacataaatacaaattaacatcagaaaaaatatacatacaatctttgcacagagtcacattttcttaaaatgtataagttatttcatccggttcttatagtgaataccatatgtatatccatgtatataaattgatatttcaattaacattaaggaatcacaagcatgcatattctctcgctcccacgcaaacaaaaagtgcatgcagcctaacgtgatctctatcgttaggtagctcacaaatgacgaacctaaaccctcttcaccataaatcaaatcctcctccgctctatataaacaacaaaaaaaacactaaacacttaaataaatcaaacaaacactccacattctcaaaatcatattttcatataacttataaaagataaaagaaagaagaagatggcagcttcgtccaagtactcttccatgtcattcatgaaggtggcaatgatggtggcgctggtcttggtggtggcagccactgtggtggatggacaaagctgcaatgcgcagctgagtacactgaacgtgtgtggtgagtttgtggttcccggagctgacaggaccaacccaagtgccgaatgttgcaatgctcttgaggcagtgccaaacgaatgcctttgcaacacgtttcgcattgcctctaggcttccctctcgctgcaacattcctacactttcatgcagttgatatggatcctcatattaattctagacgctatatctttgtaagaacatacaatataacgtttcaaatacatccatatatagtttcatatgtttaataaatgtatctaaaagcttttttttttggtatttaacaggagaagcatgtatgggaagtaaaggagatggatatctaagaataaaaactcaaagtttgagttttttttttttttttttttttggtttttgttcttcactgcaaaaccaatgggtttcgaataataatgaataacaccgaattgaaattataaatggtttgagttatattatcaatttataatttgtatacatgcaaatatatcttatatcacgcctttcaaagtagtatgcatgtttaattaattggttattggtgtgaccaaacgaaccttttggttcttatacattcgtttgataattcaaaaattagggcctaggggtaacgtactgtaaaattcgcattataaattccccacacatcagatttgaaagaatttcgtccaaacacacaactgaagaaacatgtagtatctaaatttttaacatgtcgaattagagaaatcaaggtgatgttttgccatctcaaatattctccaagaattttgcttaaatgccaagaaaatttgtaaaaaaaaaatatatatatgaagaccagagccagcggtaaattgaccaaaacatccctagtagtctacctcaaagcgtgtggaggttgaaacgctcggcggatatcacgagctcgggccacacgctcatctctagtctcttttacattggctttacaaattttaaaatgaaacacgaattttatcgatctacaaaagttttgttttatattctatggtacagttacctataatgaaaaaattaaaataatataaattggtgaagagtcaaaatgtagatcttttaggctttttagctcaaggcttgtttttctctgttagaaaaagttgctgttattgttttattgtttctccctaattagtcaaaatcttgagggaaaatgacaaaagaagaaacccatgtggtcaaaatcgaagcttttttgtgttttggtccgagtaaactagggtttcgtttgtcttttttaacctttctaaaataattattcgaaaaatttggcttaaaaggtcaaaggtacaacttgagattttggggccatttgagttattaaaaaaaaaaaaaaggggagaggacaaaaacagagtattgaacaaaaaggggacaagtcatatgatataacaaaggaaagatctttctctttcatttgctgatctcactcgtactatagactaaggaaagatctcatttggtcgtcagtaaattttctgatttgattgaaaggtatgaaacttgatgaacaagcaacgtaaacactgagaaaatagtaaaagcagtgacaatacaaatatatgttgtcttgcattatgttcttctctccattgttggttttgtctttcttgttttttttttgtttctctataacttagattattgactatttaatttggttgcagagagggaaaatgaatggcgatcttgaagttgatatgtctagaggagatttcaatccaagtttttttcttggaaagcttaaagacgatgagtttgagagtagatcattgagtgatgatagctttgatgcaatgtctggtgatgaggataaacaagaacaacgccctaagaagaagaagaggaagacaaagtatcatagacacacttcttaccagattcaagaactcgaatcgtaagaagtttctggtttttaaaagaatctaaactttttcatattcatcaagtggtttttgaatgtttgatattttctgagtgtagtttcttcaaagagtgtcctcatcctaatgagaagcaaaggttggaacttggcaaaaaacttactttggagagtaagcaaattaagttttggtttcagaacagaagaacacaaatgaaggtactttatctgaaaagttatggttttgatagtagagttatgatttttatgggaatgttgtggtttttatattgaccagacgcaactagagcggcatgagaatgtgattctcaaacaagagaatgaaaaactgcggctagaaaacagtttccttaaagagtcaatgagaggctctctatgtattgattgtggtggagcagttatacctggtgaggtttcttttgagcagcaccaacttaggattgagaatgctaagcttaaggaagagcttgataggatttgtgctttagcaaatagattcattggtgggtctatttcacttgagcagccttcaaatggtgggattggctcacagcatttgcctataggacattgtgtcagtggtggaacttcactgatgtttatggatcttgccatggaagccatggatgagttgttgaagttagcagaattggaaacttctttatggagttcaaagagtgagaaaggatcgatgaaccatttccctggttcaagagaaactggtttagtacttatcaatagcttggctctagtcgagactcttatggacacggtatgctatactctctaataaccggtattttatcgatatatgcacactctactaaacgtctcatctttgttattggtttgttacagaacaaatgggcagaaatgtttgagtgcatagtcgcggttgcatcaacccttgaagtgatatccaacggtagtgatggatcaagaaacggctctattctattggtatgttactcaagaaccataaagattatatattttggcgacatttgctaattcaatgagtcctttgtttggaacagatgcaagcagagtttcaagtgatgtctccattagttccaatcaaacaaaagaagtttcttagatattgcaagcaacatggagatggtttatgggcggtcgtcgatgtttcttatgatataaacagaggaaatgagaacttgaagtcttatggtggctctaaaatgtttccttcaggatgcattatacaagacataggcaacggctgctccaaggtaacttctctttctttgttaggacaattttttatgtcttggatctgcgtgatgttttattgaattgtttatagttgagagtttggtcagtcttgtaaactaattacaaaggagtcgacaattagcctgagaacctgaagccttttgtgtataaaactataaaagattcttctatttctttgttaatacatatcaaagggttcacttttcaaggtagaggttgcttcttgtctgagctagttctaggctatcataaataatttatacaaaaatatcttgttttgtttacttatatcgatggaaacttacatattggattagatgaatctgatatgtacatttcttcgtaaaatgagttgttacttatagtcacaactattatttactcaatgtcacatatttggtttaacacaaataatttcaacaggtgacatggatagaacattcagagtacgaagagagtcacacccactcactttaccaaccgttgctcagttcttcggttgggttaggcgcaaccaaatggcttgcgactctgcagaggcaatgcgagagcttcacaatgcttttgtcttctgaagatcacacaggttttggctcgttctctttctttttctctcagcatttgaatcttgaaatgttgcaatttgaacgagagatattattcaagaatgttttacgataggtttgtcacatgctggaacaaagagtatactaaagctagcgcagcgtatgaagctcaacttttactcgggaataactgcttcgtgcattcacaaatgggagaagcttcttgctgagaacgtgggacaggacacaaggatactgacaaggaagagtcttgagccgtctggtattgtcctgagcgctgcgacatctctgtggctaccagtgactcagcagagactctttgagtttctgtgtgatggtaaatgcagaaaccagtgggatattttgtctaatggtgcttcaatggaaaacacacttctcgtcccaaaaggacaacaggaaggaagctgcgtctctcttcttcgtgctgctgtgagtttataatctattctgaatctctctattcattaaactccaaaaagatctctgttcttggttactgattagatcgatttgcaggggaatgatcaaaatgagagtagtatgctcatcttgcaagagacatggaatgacgtttctggtgcactggtggtttacgcgcctgttgatattccatctatgaatactgtaatgagcggtggagattcagcttatgtggcgcttcttccatcggggttctcgatattgcctgacggatcatcatcatcgtctgatcagttcgataccgatggcggtttggtgaatcaagaaagcaaaggatgtctcctgactgtaggatttcagatcttagtgaacagcctaccgactgcaaaactcaacgtggaatctgttgaaactgttaacaacctcatcgcttgcaccattcacaagatcagagccgctcttcgtatacctgcttagctaaagttgtaggacctaatcttgtttctatgtctgaaacaatttgtgagagtgtagccaaatttgagactgagtagctagtagaacaaacaaataaacaaacaaatggaccaaagtttacaatttgcaaaactgatttgtttttttgtgtttatgccattttccactgatacataaaaaacgttgggaaaaagctacagacttctcaagaaacatacaagacacctcgacgatagaaaacaagactcgctgaagtaaaacccgaccaaacaaaaagaacccaccaagacatcaacaaaccaacttgtttaatgaaatcgctacaaggcaaagaaccacataccagttgagatacagcaaaagagctcaagtcaatctgagacaagccgaggaaaagaatcactagcaccgaaggcgccaaaaactgcagagcaacaaggcataggtaatggttgtgaagaaacatctttgcacgactaaaatccaaatcaggagttttacttccatgtaatctctgataccacgaaaggactgcttcgttcaagaacatctgaaggttaggacgaaccgccatcgcttgtagtaaacccgaaagtaacaaacacaaaacccgaaacttcgcaaaatcatcactcaacatgcctacattaccaaccaacccactctgactctgactactaccactagtcccaggatcaccacttctcttcactaaaacctctgccaacggatgaatccaaagcaacgaagtgaaaaccgatacgatataattcgcatatagaatcatcctaccaaaccatccacaagaaatgatcgacaaattactcctaatctgatcagtcccaacccaaaacgaccttgcacttcttccagcaggcatataaaggaaaccaccaatacaagccatcgaaaacgatatcacaatgcaacaaaacgcatcaacagaacctaattgaaaatcaaatcctttaggaaaaacaccagcactgattataatcccaaacacaaaccctaaaacaccaaaaatcaaactcaatctcttctcagattccttagaagcagatctctcaatagaaatcttccccaaagctacaaacaccttacacaaagctataaaccctagaacaatcggaaacatcaatccattacttaaaactccatgactattatcctcaataataccgaagtacttatctagaagaaagcaagaaacagctaagaacgatatcacgaatagcgaattgtactcagtgaaatacattcgagatctgagatgatcttcatcgagcttaattcgaaagatctgagcattgctttcgtcgaattcggatttatctttggatctgtttcttcttctgacttcaacattagattttggatcgtcggtactagatggtcgtctaatcgcaggtcggagtccatttccggtgttgttttggttgagattttcaggttggatataggtacagagaccgtggaggaagatgattgagattttgacgaatgaaaggactaacgttaagaagagagatagtaggatttgaagtgttagattcctgtaacttcctaaaagctcaagcattgtttcttcactctgttgttcgactctctctgggtagaagaagatgtatgaagagagtctgaatttgtttggaatgtttgtactttcaattggtaaaaaggcccaatgggctttaattgctcttagttgtatcaaacccttattaaatttccataagaattttgtctttattcttattgttttaatagtataatataaacaatttgtagtagaacagcagccatttctcaagcgaaataccaaaacaacagcacatgctaatcaaaattgctacgtcactcaagattagtatgacgagcacgtaccgactcagaagactcacccaaaacctcacccaacttgtaaacaaccatctcaaacaacacaaacaaagctccttcatatacactccccatcggcaataaacgtctctctcccatttccaccgaatcaccaccaccgttatcactcgccatagtctgagcaggtacataacagacatccgttgcatgtttcacacaagaacctatcgctggctctgcagtaataagtataaccttagcaccgttcgatttagctacagagcaaagcgcatcgacggttgagaatcctccaggaccagctgaagcgattaagagatcagaagatgagattggaggtgttgtcatgtcgaagactaagtgagtggggagaccaaagtggaagagacgcatcgcgaaggcttttagcattagaccttcgcgtccaacaccgtagaggaagatacgagagttgttgcggttgcgggagattgcggtaagctctgttactaggagatcgagcggtggtggatatggtgaggttggttttgtgaagacagatgagatttggttgcagatttgagaagatagattcgccatttcttgagctttctcgttcgccattgatgttgaataattcagcttatcatcatcatcatcatcttatatcgtgcattttggaccacgtttacaaatttataccgtttgattcggtggttaattgaattccggttcggttcggttttaatgtcatatcaaacaaaaatacaatgacaaatttggaatatgatgtaagaacatagaacatggaagaacagaggtgacagtaagaaattgcattcaaaatgctataaaagacaatcacataattgatgggagtttttgtttccttcttaaatttctggaagattcaaattgataaaaaccaagattagttgagattgagagctctctgtgaaacatggagcagagtacacatttgattgaacagaaaggttttatattaactcaggggatgaagatgacgacgtccctgataccgttttggttgcatctaactctttgtttccgcctttagtgtgtcgtgagtttgttgttgtctctgatttactaccttttgcaccatcatcctcttcctcttcttcttcatagaatgaccctgaggatctcagttccttcaccttccgaaactcgtcgtaatgtgcttttctgtgtgcgttgaaacgttcatttttaccacttccagaacctgtggttttgcacacaaaaaaaatagatatatcgggatgacctaacaaaagaacctatatatgacagtagatttgtttggttttagaggaggaccttcttcatcttgatccattggatctgcttcttcttcttcttcatcagacgagctccagccaccaccaccagaaccctggctactatttctactggaagaagctgctgcatcattcagaacattcctcagttcttcagctcgttgcatatcatcaacacattcatcaaacgctcttcctctaggagacaaagaacctggcacaatcaatcacggattagaacagatcagaactgattcaagttaaccttacatctagagtgacaaatttccaaatcaaccaaccaattgcaggtacaagatttcccccaaaaagataagtaatcgtccaactttgtagatgaattaaaaagcagataattttcacatacaatttgctcttgctttctgtctgacatacattccatttttacatatatgtttagatgatgacaagtatgtatcaacaataaaatgcaaaaacgtcataagcatataaacgtgtatcgaaagttctgtgcatatactaagagaaaccaaataaagaaaaatagacaaaccatcatcatccatcatcgggtggtatggtgtctttggttcagtaatcttctgcctaacaggtttgttcgattcaatctccactatattagcttcatcccattgaacacgccccctgccataataacaaacatacttagtgacaattccatgagaaactatactagattatacaaaagatcacctctctttacaaaagaatgacgatgtctaagccttaaactaaagacaataaagttcacagaatcttacagttaaacaattctgctggaatatgaaaatccatgaacattaacacaataagacctccctcttccatttcctttttcaatgggtgtagtagaaaatatatctgttttacgattccttcataaaaagaccgccatataaggcttagaacttcatatctatgaatatacatccctccacaaaaatgacataacacagcccattgacttcacaattgatcttatttgaacacattgaaaaggtaccgttctgatgcagcaagcattctcaaatctaatagaaactaaagacacaagcgaaagtaaaaatttgaaaaggagaaacatacttcaaagaaatccatcaaaatcaatccaatctgctaactttccaaacaaaagaacacaatggtataactgaccactcaaaatcacaaacctttaaatacgaagaagcaggaatcagtatctacctctctcatgatcattgagctaaagtatcctaaaatctataaagcaaaaacctcctaaatttctcaaatttgctgagtaatggtttcaatcagaaagggtttaacctaaataaccaattgatatcaaaagcttatcactttcctcaatcattcacccataacatatcccgaaagacactgtaagaaaccctagcctatgtttggttctacaaagaccaaaactaaaatcaaagatagatctttcgtgacaatcatcaaagattcaaactaagagaaaacaatcaaaacaataaaatttatttacctctttggttcggtcatcttcaaaatctccagcaacttttttctttgtctcgatcgcaagtttttaagacctgttgtgttcttgattaaagaagatacgagggtcaactaaagatgcaacagaaaccgtccgtttgtttgacttttatcactgttgcatccagattccgccacgtggattacttcaaacccgttcgattgatcaagcgcgtgaagacttgagtaagggtagtttcggaaatacactttagaagtttttttttttttcctttttcctgagaacgatcgaatcgaagacggagtgtgcaaaagccaaagctttgatctttcattaattcttctcaagatcttcagagtctgtaagtatttttggaatcttatttttcttgtttctcaatcgatgtaaaataaaattcagttgttgatgattttaccatgtttcgggagcttgtgttgatctagttcttcgctctcactaggctaattttgatcttcctgatgtgcacaatgtgaatgggtcttaggtattagtgatttatcggctttttatttgatccattatctatccaaagatctaattttttctgttttgctgaagttgtaaattggaacccttttgtgaattgtgtggtttttttagtttggtattgcatagtggtttctctgaaactgtgaattagatctgagaatggagtcttgtgatctccaattacttgtgtgatgcttttgttatgcttactcaaattatgataaggaagcaaagttatgttgatgctgatgataataagctcttctcttatttttggttcatgtgaaagacaagggaagatcaaagtaattaaataagctgaagtaagaggaagtgatgttttctcttatgtctggactatggagttacatgtttagcaagactgagtttaatgtgcttattcttggtatcgacaaagctgggaagacggtaatgctttctttttaatcttttctgttacacgaatctgaaatgttgaggatacacctctcatgtacttgcccttacttcaatgtcgtagacatttttggagaaactgaagacgatatactcaatctcggaaggtcttcctcatgatcgaattgttcctactgtggggcttaatattggtcgcattgaagtctccaatgctaaaattgtgttctgggatctgggaggtcaggtgagttagagatgccttagctcatatcattgatctctcttctttgtacctaattatgtgttcctacaagtcacctataccaccaaagagaatatgcttgtaagttgatatgagaaatataggatacaaggaagatccctttgaactccttccctctctaagtttatgcgtgagccttttttgctttatagattgtttcgtcctgttgaaaactactatcggttgttttgatttacaaaccctaattgtgaacaaggatcagtctttctaatcaaataactgtggcttttcccctttatggcagcctggtttgcggtctatttgggagaaatactatgaagaagcacacgcgttgatatatttgattgatgcagcttgcccaacccgctttgaagattctaaatctgctttaggtaagtctccgaacacaagttgactccaaacagcattatgaagctaaagctaaaatataaattgtcttcaccagaaaaagccctgcggcatgaggatttgcaaggagcccctcttttaatattggcaaacaagcaagtaggaatttgtattgcgtcatttgtttcacttaaattcttcaaatatatgttgttactgatagtctttgaatctgtaaccaatgagcaggacctcacaaatgctgtatcggctgaggaactggaccgataccttgatttaaagaaattggatgaaagagtgtacatgtttgaagcagtttctggatatgatgggtaagtaaatctaacgtaagctacacacaggatccttatagcgccaatcgaaacacctttagcaggaaatattaaacgtatgttttgttgagagcaggcgaggaatcaaagaaagtatagaatggctggttggagtaatggagaaaagcaagagaaccgaatcattaagagcccgtgcagggtacactcctgtgccaaattcatagacacgagaaaggactcgcaaactcaactctccagtcaactggtttcctttgaaatacatttgtagataagaacagaccacaatctttgcatcattttggctagcatcaaattcacatgatgagtaggaactagtaatctccttattgccaccttcatatgtttactaatgttataattcaattgagactttgtggtgatgattgcatttagttactgcaaacccaataatgtaatcaagtttcttcatttgcaaactcattcaatagtacaaacagagactacattattgaaacaagcagagataatgaaacaatagagaggtttcaatttgttcctgaaacaaagaagaagaagagactcagaattctgaactatcagactaaagcaatcaagaacaaaacagagagaggttgttgttaccggaaataagaggcttaggtctggttttaaacaagatctttgttcgtataatcccaacaacttcaagctccgttgctttccctgaaacttcatcaaattgaagcttcttcaaaaccagtaatggcttctttagagtcactttagagcctacgagttcatggtaacccaccgtgaacgtgtatgttccctgcgccagcaaatctcttaatgaaatctccggcgataacagttccgattagagaaatgaatttgaaaaaacaaaacctgtgaggaatcggagtggcagagacgaccgatctcgagattctgaatagaaccttggaaggaagcttgagtctcgacgactccttgaagctctacgatcgcccattcgctacactcttcttctccacatctacacttcactcgaatctccatcttcttcttcttcttcttctccgttttcttcgaattctatatattcactttatatatatgtatgtatataaattttggcggaaaattagagatctttcgcgggcttttttcgtttaagatgacgtcaccatcatcttctcaaagatgcattcaaaatttgagaaagaaaactagaaaagatccatctttaagaagaagaaacaagatcattgggggtggttaaaggaagagtttttatgagtttttcaaggttctgtcgatacacaacactaatacatatgtatttacaacagaacatggcccgaaagaaaataaagctaaggcattgcacatggatcttacacgataccaatggcattatcaaaaaccctaatatacgaaaacacctaaaagtacagtaggctttattttgttcttgttagtccttagagaaagattgtgtaaaccttagatcatcaggtttacctacagtcttgttcgtcatataatcacagttgttttgcctacctttagcttcttgtgttgctgctgtagtagacgtcatcccctgtgactttgacttcgtatctggttcatctaacccgatcgggattgcgcctgttagagtttttatagcaaagtcgatacacgggtcttgccagatatttgcacccgggggtggactcggaaataccagtttttcagagcatgtgttaacatttcctggagtctctggggtaaaggagactcctttctgcttggtgtggttgttaatgggattagaagagatcgctggagtgttgagaagacacagagattctccggttagagttttgatagcaaaggcaatgcaaggatctttacaaagatctgcaagagtcgagtcaaatgcagaggagaagctgttggtactcttctccatcacttctgagcatgtgcctcttacaacggatgagttagaatactcattagctagtttatttctcctttgaatggcagaaccactgtcagaaggatgtggttgctttcctttatttggtgatctcagaggcgagatctgagttggtttcacactggtagtaaggttagcctttgggctagaccttcccactcttttgcctgctgctgtcttctcacactttgttgcagaagtttggcaagacaacggtgacacaggtgacatttcttccttctgcttgtaaccgtcaagatgaaaaactggattcagttcatatactatcagtggtgatttcagcgtcttcttgtctttagaaggcttcctgcctactgctttaccgatattttgtattcccactgccgaatctgcactcacacgattgttgcttgttgcagcagcagcatgtggtttctgagaggattgttcattacagctttgggctacttccttgttgagcggtatttccgtcttttttgatccgctggtagtaacatgattcacaggttgcttgcactttccggctctgccatcatcaggaggtattctttgttgtactttggttctcgtcttaaattcaggcgtcagttcatcatcaggaggtactattcgttgaactttggttcttgacttcagttcgggcgtcagttcatcatcaggaggtaatattcgttgaactttggttcttgtcttcagttcaagcgtcggttcatcatcaggaggtactattcgttgaattttggttcttgtcttcagttcaggcgtcggttcatcatcaggcggtactactcgttgaactttggttcttgtcttcagttcaggcgtcggttcatcatcaagcggtactattcgttgaactttggctcttgtcttcagttcaggcgttggttcaagctcaataccagctaaccgttttgatgttcgtcgggctacactattacttagctcattcttcttctcttcaactttactccttgtgatccgtttctcagaagaatcttgttcctcttcttccttcataacagcttccttctttggtttttgtgaccttacactggagtttacagaatctacaaatatagagaacatagaaaaaattggtgtcctcaaatctttttgttatctcagccactactcaggtggaaatattaagtcaggtatctgcacacctttttctgattttgcatttgatgaagacagatttctttttaaatctacgacgacttcctcagtcgtactggctttagtttggcttctagtaacccgtttcgctatgagctgcttttcgataggatctttcacctcttccttcttccccaaatcctcaagaacttgtgaggttacaatgctcaagtcagaagtcattttacctgcatatataatcgaatgttgacacttacttaacgtaactcacggcataagtatgattataccctggcaagtggcaaaatcagaacccaaaagactttgtacttacaattcttggaatgttcatcagaagaagataagtttctccgtttacttcttctgacatcatctatcgttttctctttttccaatacatcatctgcagatctcttgtccacatactccagacgaagctaaaatcagacagagaaaagttaagagttaaaagattaacagaaaattcaatcattcagctatagtgctttccattaaactaactataacaaaaaaggagaaaggaactcacaacagtctttccatttccggaatcatcatcttcgatatcactttctttcaatttacgtgcataatgtccaatattgccagtctcaacataccgtgatgcgtctttgaaggattgaaagatatactcacttttagggtcaatgaagaactgcaaaatcaaaaacaagacatgtccaagaagaatcacataagagattttctaaagtgagcttatgtggaaaagacacaaaatgtacttttgatcaaagatgatgttatcacaaagagagtagagggtacaaactggatctcttctggttttacggcctgatctatttgttatttcaagtttcttgatccatccttcaggtaaaccttgagcagcagatttctcaactataacctgtatcacttaaacataaagagtttttcattttaagagacgtataaatgtcaaatctttttagggatcacaaagaacaaagtaacattgtcttcaaacatataaacaacacaaaactctcagatattctgtgcttatgaactttccatgaacaacctaataccagacccttgccaatataaatgtgattcatctcaaaactttccctttgcatacgcgagaggtacaaagttttagtgcttacgaatattacagtattctctcgaagatggttacttaacaatccaaattcattttcacaagatctattactcttaatgtctaaccatctcagtaaagtaaccatataattccttttcacacgaagtaaactaagagacaaacttttaaaaattcaagaaaaacttaaaaaaaataaacatctccaatcatgcacacaagtaataagagctttctaagccacagtggaaccaagtaaaatcaattgagttcaaaatgtagctacataacaaagctttgatcaaactacatcatctataacaaaacaaaaagtcaggtcaagaccattttcagacacttaatcaactagacctcttctcttttgatcacatgtcatctttccctaaaagctaagcattgcatgcaagagaaaatcactcaaacgtcacaaaagacttcacctttttccatcattacaaaatcatacaatcagaaactaagagtgaatcaaagtatttggcacttcaataaagataactacaatttccacaaaaggagctaacaagaaccaaacatgcaaaagacaatcaaaattaagaaaagggtttaaaactcataaatcaccttatcctttctcccattcttcctcactctaatttccactttcctctcagccgacaaaccatcagagatcccttctccgttcatctctccggtcaccgtaaaaccactttcctctctctcttgtatccctgattcacaactcagaatggtttatcaactcaaaacgccaaaacccatcaagaattgtcggattcagataatggacaccgtcggaagttataaagaaggaacctttttattttgtctgattgtgtgatttggttctgtctccactaaggtaaataagaaaaatagtaggatttaatggggaagaagaagaaagggtttacacgtgtagtgtggaggagtttcaatggagattccccgatttgagaggttcaagaaaactcagtccaccagcacgcgagtcttctggcccaacgcttctcttctctgattgcaatttagctcattttctccattttattctcttgtactgtttgttgtttacttccattgttattgtcccaattttaaaaaaacttacactgtatattaaaaaacatttgcttgatttggttataaaatctaattgcaaatctatttatgatgatattttttgggaaacatttaagactttgttatcattttttgacccaaaagaaaaaaaaaatgttattattgtaaatgttaggattggaagatttatcatgagaagaaaagtgaaaaatactaatatagtcaattatgaattttcataaatctgaattaaatataatttatttttacttaatatatagttttaattactttttgtttaaatttatgttattaaatttggtatttgtatatcatgtttaaaagatttagaagtatgattttattctatttctagtgatttaattattgaaactttgatttttaaaaaagtttatgtattaataaattatttggattgaaggttatatcaatgttataaaatgtgttttaaaatctgaaaagtggttgattttttctttttaaattctgcatccacgaaacttatttttcttaaaacttatttttcttttcgaggttatgattctttttagttttttttatcaaatttcatgatgaaaataactgaattgaacatcaaagattttcagaaaatactctactgcttttttcttaactatattctagccatttacatatctaagcttgatgtcttttctatttcgtcgaaaatctatctattttacggcagagacttgaaacccgaattttgacatatcaaaaacactaacacaatcccatgtactacattatcatttgtattttacttatagaagaaaataactttttatttaaaaattgtatggtaaaaataaagattagttccctaataactatataaaaaatcttattcggtcgttttagctgtatttaacttttaaacccaagaaagaaaaaaatcaatcaaccaaggaagtagtacaacaacaagagtcaaaacccaacaactctctatctagcacaaaagcctgacttttacaaagacaagccttttcaacacactactgatcttgagaatcctctcttcaaagccatggcgttagaactatggcaaactctcaaagaagcaatccatgcttacacaggtctttctcctgttgtcttcttcactgctctagctctcgccttcgccatttaccaagtcatctcaggctggtttgcctcgccgttcgatgatgttaaccgacatcagagagctagatccttggctcaagaggaggagccaccgattcctcagcctgttcaagtcggtgagatcacggaggaggagcttaaacagtacgatggctctgatcctcaaaagccccttcttatggctatcaaacatcagatctatgatgttacacaaagcaggtgaaatttctgaatctaaaaagcgaaattaggttatgggtttgattcattgtttcctctaatcttgttttagcgtataaagacttggactttgcatacttttatgatctataaagctgtgagaatcgtaaagttgttcactttgagaatcaatttcacaaaggagttttgttttgagaatcaatttcagaaaagcacattggaaaagttgatcctttttgttacttttatacaagagaaagattcaaaggaatatgtttttgttgttgatgtttgctagtgattgagatcatgttgtgaaatatcttagctctatcttcgagtataatcaatctcttagactggttttagtgtctcaagtgttgtgtttgtaatgaaaggttggatttttattgtcttcctcaaatctcgttttactctataacaacttggactttgcatagttttatctatgaagctgtgatatccataaagttgttcactttgagaatcaatttcacaaaagttgtgcttttctatgtaatcgagcttttgagtggcatagtgttaatttacccttttgcttccttcatacaagaacaggattcaaaggaagttgtaatatgttcttgttgttaatgtctgcttgtggttgagatctttagtgaaaactctttgttaatctttgagtataatgaattgatcatcttcttatgatagtctagtctggtttttgcgtatttaaattaaatgttgtgtttgtgatgaaaggtttgatatttattggttttgtaggatgttctacggaccaggaggaccatatgctttgtttgcagggaaagacgctagccgagctcttgcaaagatgtcatttgaggagaaagacttgacttgggatgtctctggtcttggtccctttgagctagatgctcttcaagattgggagtacaagttcatgagcaagtatgctaaggttggtactgtcaaagtggctggttcagaacctgaaaccgcatctgtctctgaacccacagagaatgttgagcaagatgctcatgtaaccacaacgcctgggaagaccgttgttgataagagtgatgatgctcctgctgagactgtgttgaagaaggaggagtagagcccatttccaagatttgctctgatttgtcatagagaccagttttatgaaaaggattgtagaatctctaatgttgaagtgtcaatgataatcttgttttactttcccaaaaaataaagattgctgattaatgataagaaaaaaatgttttataaactgcatatcagaaggcgttgcattgcatgattacaatgtagtcgagttcatacttgtggtttgtgaatctgcatgattaatctggaaactaaaacattaaacctgatcctttttttgtaaattctcttcatccttttggttactactataggaagtttttaagttggtcactaaatccatatcaattgggaaatagagtattcaattgtgatcctcgatgtttaagaattggggcaaagaagacagttgaccacgttcttctgagtgttccttgcattgcagatatgtgcgctcgatctcctcagcactatggaaatttcggtgtcgtcggtatttgcaaatttggatattcttttcttggaacaacctggctcttcaaaagatttaacctttccatggattatttgatacattggaaggcacgtaatgataaggtttttaatgatacatttgagaaactgcacagctgcaagaacataagacaagtacctttgaacaacggtctttattacaaaaactggagtttgaagtcacaaattaatgttttataaaatagttcattttttttggtaaacatgtgaagattttatagatagttgatggaaggagactcgatatgttttcaaatataggttggatcggttttcataacgacatagaaggatctctttttagagttaggaatctatgcataagcctttctcctatgatcaagcatcaaagtacatcggtaactatctcaatggactgttcaaagctaaaagaaaattgacaacttcctgaacattttagccaattttctcaacatatttggaatggtttgcaagactcaaatatttgctctcttctggctttctgttattcttgtaattagaattgtcttgctaacttgttagctagcatgttgttcaccactacattttcattattttaagtatgtaagacctatagttctatatacaccatcgatttggattaccgaaccattttgatatatgtgtatgtatttcagtcgacaaaaaaaaaaaacttctaagatcagtttaaactgaattttggttatcgccttctctgcgatcatggattgggttggacctagacatatgggcttaagatacgttttacaagctgtcatgatgaatacaattattgtcttaagtgtcacgagatattgaaatcgtcaaaataagccaaacatgcaccaagatatcaacgcacatgtagttattatatagcaatagtattctaaacgtaatgaaccgtcgatgtatcgacgtgtactttttgcattcactttcttttgtcttcaaaaataaaatgaaaatcagaaataaagaggtgtaatattatccacgtaggagttgagatctacgacgaccaaactaatcgttaggaaaggtttcaaaatttgaggttcttatccaaccaacgctaacgtaatgctaatctcgtgtttccatttcttcttcctttaatgcgatgtctctctgcacccaataattaaaaaaaaagtttctttacattttttcttctaagagaatttttttggcaagttggtgacatggtgtacttcccatacttatccatatcccattgctctaactttttgttgctaaaagctaacttaaggagtgatgaagattataactcataatcaatctaaaagatagactcttaaccatttctaatcaccacaatgttcaaagatcatatttggagctagtggttatttagccatgtgcatggtcttattttgatagattacctttttggattgtttgaacaaaaacataaatacatgtagctaatttcgatatattaattacttttctagttggaaccattcggagaacagcaagtaccaataacgtgaatgcatttccatttaatatcacacaaaagaaaagttccatgtatcatgaatttagcaaattccatttataaatatttggcttaactaaaattatatacatggtttcttctacatctagtaaaaaaaaaagatagataaaccatgatacctatgtatatgtatttatattaaatttaaatataccccacattttttgttttcgtcaacaaacaaaccactttatagcttatatatacacatcacacacacatatgaatgtgatgttaatatagtttcgtgtggacctaactaaaactagtcgtaactcattcatggaggctttgttctgctctgagatacccaacaacaacatcagatcttccattaacgatctatcttcttcttcttcatatacatggccaatgatcatgacctcctcttcttcttcttcttcatctcccacaatcatgaacatagagaacattcctagatgcgactgggatctctctctttccgccgttgtttcctccgcatccaccggatcagacgctatcggagcaatcgagttcgaccctaccggagagatcatagctacgggaggaatcgcaagaaagatcagatcgtatcgtttaagctctttgttagagtcacgtgacgatcacgtaacagcttcagagagctatatttgcacgccggcgaagcttagtagtctcaaatggagacccgatttttccggtcgggttatcgggtcaggagattacgacggagttgtcaccgagtacgacgtggagaaacaagtgcctgtttccgagagagacgagcatggaggtagaaggatttggagcgtggactacacgctttacaatggctctcttataggcgcgtcaggctccgacgacggaacggttcaaatgtgggatccacgtaacggagggacgttagaagaaacggttaggcccggtggtggagcggcgatttgttcggtagagttcgatccgttcggtggatcttccatagccgttggatgtgctgaccggaatgcctacgtgtatgacatcagaagactagtggaccctttgatcgtattagacggccataccaaaacggtgacgtatgctcgattcatggattctcacacgatcgttaccggttcgaccgacgggagcttgaagcaatgggatatagataatggacggcgcgtggttcgcacgtaccgagggcatgtgaatagccggaactttgttgggttgtcggtttggagacatggtggtttggtcgtgtccgggtcagagaataaccaagtgtttgtgtacgataagaggtgggaggaaccggtttgggtttgtggattgggtcatacgaaccggtttggatctgaccgacggtttgttagtagtgtgtgtttgagacaagtggatgaagattggtgcacacttgtggccggaggatccgatggggctttagaaattttctcgggcaaacaaagctaatcagtatttatattatttttttctgctcatgattaatacaaactgtttttcagttgattttatactgtctatagttattaattttaatatgattgaatgttactacaattcttaagaagaaattgtaagtgatattgagaactttttcaatcattgcaattcgaatacacattttgtagggaattgaaaattaattctaatagtgttttaattagcgctagaaaataaataaataaaatgtatcaaggagagtgtatatattgacttgtaaaatgacaaggagaagtcaaatgtccacttgaatgagaaattctatttctatatatctttttagtttatggacctttttttttttttacatagctaagctagagctttagacgactaaattgattttgagtctaaaagatatgatatgttttgtaatcaattgaccatttaatcatgtcatgttctttagttttgtaaaaagagaagaaaaacttgtcagacaatacttatacatatacattcatgtaggttaagagggttgtttaaaattatgtaactatagtggtttgatgcaaaataaaatctggcccaaacggcatagtggccaacaaaactttgccacatgacatgactccagtagcccagaaactgggctgatccaatcagaggttgtctttatagcccatctttagatgagttttacatctcttgtcaacaaatgttacgaccaacaaagtctttttcttcaggcaaatataaaaagaaataacgtggttcagagattaattattttagaaaaacgtaagagtcaggacatatatttggaagttcaacatgaaaagccagcaaaacccatttgggtcacgacatattgtatatggaaatgcaaaatattccctctctcaaatgaataccctatttgtatattcgaaatgtattgtatacttctattatcaataaaatccaaaattaagttttatacgtaaatatgtgcagcaaataggagggaagtgttgactcacctaccaagattaattacacaaatatcctaacaaacaaactataatattgattatatttaaagaaattttgtgcatagggtttttaaatatacacattgccaactttggtatacgggatatccaatttgtccgatcgcttttcaaagattggatgattctttgcattctttaattcaattgtgttcattttctttcataatcattgatacgggacagacaaagattgttttgtcaacgttaagttttgccctctagaccacttttactcatttatatgatttggtcaaattacatcatttacacttttacatacacaacatcttgatatttttactttaatatatattcggaaccaaactacttaagtcaatttttgacatcaatctgtttgacattgatagtgtctttgagtgagtttttgtataaagagatggagacaaagtgataccaacttggttaaatcatagataatactgtgattaatcctaacatcttatcatcgtaatgaagatttccctgtgatcgcaagtttgtcaatatctatattttattaggcgttagtctttcttcatagacttagaaaaagaagagaacgtaaacaaaagatatctgaaagcaaaacaagcaaagattccttcttctctttttgtctttaattatttaaaccaagtgacttgggtttacaactaatttttgcttacatattctaccatacttttattatatagcctatctaatatacttaattacacatatgcacaaaatacaaaatacacatacatacacgtgtatacatgaaatttcatttgagtccgcatacgtataaaattatgtgtcttttattataggacgcagccccatttggctatttcctaaaagtctcaagaccatggcttttatgatttaaaacgtaatttttgtgtttgcgtttaatataatggtttctctatgactctatctatgcataattatctatatatgctcataatacttctctctgtctgtctttgtccctctctctatctctctaattcatcatttacacaagtttctcttaattaagacgacttgagagagaaagaaagatacgtggaagatgaccaaatctggagagagaccaaaacagagacagaggaaagggttatggtcacctgaagaagaccagaagctcaagagtttcatcctctctcgtggccatgcttgctggaccactgttcccatcctagctggtttttttttaatctctaaaatcttatattagactctctttttttcttaaccctatatcctatattagactcttaattctcatcattgttgttaatcttatccttaactaagagtaattgttgtgccaggattgcaaaggaatgggaaaagctgcagattaaggtggattaattacctaagaccaggactaaagagggggtcgtttagtgaagaagaagaagagaccatcttgactttacattcttccttgggtaacaagtaagaaaccctaataaaaaatacaccttctatttttgttgtctacaatccattcaggtctatgtgaaaaaccattcattaagtagatttttcatttgatttttatgatttgggtctgattaggtggtctcggattgcaaaatatttaccgggaagaacagacaacgagattaagaactattggcattcctatctgaagaagagatggctcaaatctcaaccacaactcaaaagccaaatatcagacctcacagaatctccttcttcactactttcttgcgggaaaagaaatctggaaaccgaaaccctagatcacgtgatctccttccagaaattttcagagaatccaacttcatcaccatccaaagaaagcaacaacaacatgatcatgaacaacagtaataacttgcctaaactgttcttctctgagtggatcagttcttcaaatccacacatcgattactcctctgcttttacagattccaagcacattaatgaaactcaagatcaaatcaatgaagaggaagtgatgatgatcaataacaacaactactcttcacttgaggatgtcatgctccgtacagattttttgcagcctgatcatgaatatgcaaattattattcttctggagatttcttcatcaacagtgaccaaaattatgtctaagaagagtgaatatgatcgtaagaggaacataagctagttacttgtgttacaagttacaaaaaaaatctagattcttaaatcaaacatgaacaaagaaaaaacttattatgtggaaagtccatttgaattggttttaatcatttatttttcacgacaatctgtatatacagatagaataacatttgtaaattttttttatatgaaaacaattatttgtaagttcagtgttgtttataattggttcatgtctctttctttgtctgtcttcttgttcgtccatagagtttactattgtcgtagacttacttaaacaacatttcaaagtcagtattttaacgagtaacgataattaaatagctactaggatgtttcatatatacactcttcttcttgatcatatcatggttgaaattaaataatcatctgtcataatcaagcttgctttgaaaagaacaagaataacgagaataataatcgtcactggtgtccattttaacgaaatatcctgcaaaatttgtaatagaataaagtaaaagttaattaaccataaccgaagccacaaattctcaatacattgaattcaaagtgaagctttagtcctattttgatgaaccatatgtttgatttttttttcaatatacctgaagacatcgtgagctccaaatggttgaaacaatcattggaggatctgaggacgccttttctaatgtttcttgcaaaacaaaaatgttacaaattcaagtcttaaaaaaaaaaagggggataaaagaagttcgctaatttcaagaacaagtacctaaaatttgttgtctttgtattatatcattcaaatgctcagtaactacatcgagttcttgtttccgcaatgcattcagcttcgatagattagcttgtgttctcgtgtctatatattgttttcttattctccctatgatcttaccaaacctaatgaagctatagggctttgagattttctggatcagtgctttctcgtccagcttatcaagctccttgttcagattctgcaagtaattaaacaatagctttcttggatatgaagaatcagatagcgcgatgtaacatatcttcttctccaccaggaagcttcaaaaatgaaagattaataaacgagtaaattgattattaaaaagaaaaaatggagaaaattaatgcgaaaggatactggaaagaatgatgatcgagcaagatggtcatctttggatgtaataatgagtctttggagacttgtttaagaagaaattctgcttgttgcttgtacagcaagaaactagtattgtcctcttggttgacataggtttgatcttgtgcaagaggcaatccatcttcaaccctaccaactattgttagtttcaccattatcgtttcttgaactattcagaaaattgatgtcttatataaacaagaagaggttgagaaggattgaggatgaagatattctatttgggtatgcaaagaaacatagcgtggtggtggaaagttaatgaatgaaaaactttgggggcgaaaaaattgaaatgaagaagtaaagatttgggatatcttgttcataaagacaactttaaggaaaggagaaagcatattagttttccatgtgtaattgatattttcattctgtaaagtgcaaatgtttaatccaaattttggtttgttcttcatttcgaattgaatcggttttacggatcaaaataataaatcatcaaaactatattttcttggagttattttgggacaaattgtattgcatcaaatcgaattacaaggaaaaataattagtgaaataaatcaaactttcaacaccattattagcaaacttagttatcacggatggaaatgcgattaaaaagtgggaaaattagggaagtatagagactttaattaaatggaagaagattgaagaagtaatatagctgagtagctatcgttatcttcatcggaagaaggaggagactcgaaggaaacaattaatatcaacaaagtagcaaagatcattgtgatcacagccatagaattgactagaaacgcttctaatccatgcttgtcaacgccctgaattttccatggaagtaagctttttcaacaaaccctaagaccgagtttccaacagcaacaacaaaaatatagaggccaatagagacgtgcactggacgcaagagtctttggtcggctggtgatgctttgaagaaaattacaaagccatttttcagctgcaaagttgaaaaaataacctttcaaatttcaatcaaccactttcattccacttagaatgattcaactaatagaaacattcaaaatattatttcttgtaaggctaatctggctacggtcataaggaatatacctggctgatataaagacaaaagaccacaacaccaatccaagaatggaggctatagaaatttgggatgtttaactcgttgtggtacttgacggcaaaaatgattcccaaaattctgagtataagagcaattacgtgaagaccaaagtggatctttttcttcgtttctctctcaaatggaagcgatttgtgacttattattgctgcttttttatttccaacaaaattgaaattgatcaaaacgcaaacgcaatctaagctgcatgaagtgaaaatatatatatcatctgtttcagttctctttttgttttgttaagtagcaaagcagttaagcaggcatctaactctgcgtcacgtagttgtgccaactagtcaacgaccgtagagttgacgaatcatgccacttaatgtgttacaggctcaaatatccaacctatatgagcccagcccacttatttataacaaagaccttaggccaagagtccgtccaaataacaaaaacgacaaacaaaaataggcgtcaagtaaattaagaatctttcaacattattgagagcctcattttttatttatattttttatattattaagaagcactacataattgaaaaaacgaaaatcttttaactaatttttgcttttctaaaataggacaaatggatttttaagttacatattttctaaatctactatttagcttcgagtatggtgtaatcgacaaacgtttatttatccaacaattaccatttgttgaaataattattttattttgaacacaaaaacaaaaacaaagtcaaaattagagatgatatattctttttttaattaaatttctctgatatgatattttaaagttttcaattactaatacaaccatcttttacgatataatactcgaaattaaacacaaaaatcaaatattctatattagacaaactatttagattgcacttagaaacacaattatgtaaatagcacttggcagatttactcacatttggcaagcagaataccagtcaggttagaaccgcatgcttcaaaaaatttgacatcaaaataatcatcaatgttttcaacttctgcaactaaaatgtatttgaagttttaaacaccttcttctgtagtctcagttaaagatccaactccattgttaaacactaagttttaaacggttaaaagaatattagaagtgaaatttttttagaaactatgttatgatatattcatgtggaagagagagagcacatatttatattggtcaagaatttgtatttggttatttaatgagagatttcataagttgattttggaagccttcaatgtcaaggcctcttagagtggatccataggtattttgataagaatcatcggcacatgttatgtcagtatagatgtgagtacagagcactatgagagaactaatattttcaaatacttgttcatccgaatactttatacctaaattattccaaattattcgaaaatactttaaaaaatctaaatttatttgaataaaaaagataagtaaaaatttatcatataatatttgggttggttactttgtaccgaaatcactacattaatcatctaactataagttagaggggtataaaatttattagatgggcttcaaatatattttaacattcgttccgttctcgtgtaatatccgatctaaaccgatatccgaaatacttaaaaaagattcagacaaatgggtaaaatattattttaacctactataataatcttgtctaatcggtaaatgttatttattcaacaatcgccattactataatcaattacttatgatagtaatgacgattaaaaactactatatacttattatagtaaagtcattattcatttggatcaatcaacaaaataatatggatgattagaaaataattaggattatttgggattttttcttttgaggagtaaatttgactatttgagtaactttctcttaaaacattaaacaaatcttacattaatataccagcttaacaaaattatcagaacgcctagcaacttagtggcccaagaaaaatatgtcttttagtgaaccagatttcttcatagataaaaagtttagtcataatccccaaaaatttatgaccaaattatggagagagtagctgagtaggggatatagaaaacttgttagacaaaaaattaagagatgagatgtctaaataacatttaaaataaaaataaaaatttaggagacaaagaagatgagtgcatttaagagagggacagcacatgttttcatgtgcttccaatacttacgccatttttttatccgtatgattcagcttctaatcattttataatcagctataaacaattttaatactttgtcattattagaaaatcaaaatcattaattctgatgagttggtttggtttaaagtatttcaggaaaatagtttaagattgcgaaaaaaatgaagagaaatgttgaaattatcaaaccaataatatctactgatactagaaaatagtgtatataaaattctgaaataaatgtgttatcattaatataacacacgcaacatacatatattctatggtgtgtacagctgtatgtacataaacataatgcatgatggatcatgacgactatgtggcatgcagataaaggcatttctggtttttcttgggtccaccaatactatcaataatggtgttatgtgcgatgtgtttcattcaagtacaataaaaacaaaatataacttattcccttcaaatttaatttcacaactagaaggtagaagccactaaacctcttcacactcactcatgtaactattaatttaaattaatttgaataaaccctacaaaaaagaaaaagcgtaacctactactctttaacctgacaaaaaatggaagctaattttccatacaaagttcactttatattatacaagtttaattacatacaatcttagacttttttgtaagtcacaccaagcaataaaaagggaggttggggtgtctattaaatttaaggacccataaaatcaaccacatttatatgccttactgcaataaaaagaaaagcacttttcaattcaattaataaactattaaaagttaatttcctactcaatcaaacccattaaagcagtaagaaaaaaaagggtttagatggaatctactaataactcactgattaagttttaatattaaaaaagttgtacgaatcaacctttatattgtacaaggaaagtgatcatcgcagactgtaaatcaggttttgttgttttgttttagtttcctcctacattctttggaagaaactaatacaaatcagagaatttgagaatccaaattttgggttgaagaagtttttgtttctgtagagaaaacaatgtttaagtcatggaggaacgacaagaacaagatcaaggctgtgttcaaacttcagtttcaggcaactcaggttttgtgttttgtctctttaaatctcaaaacccaattatatttctctgttaaattcagacaatgtgtttactatatattctagatctgttaactcttaagtttcaagatttgttatgaatgtgaatgtgaaaatctggggatgatctcaggtgccgaagctgaagaagactgctttgatgatctcattggtacctgatgatgttgggaagccaacatttaagcttgagaaatctgaggttaaagaagggatctgttcatgggagaatccaatttatgtgtcagtgaagctaatcaaagaaccaaaaactgggattgttcgtgagaagatttaccatttcgttgttgcaacagtgagtcaaaacaaacaatctctgtgaatatgtcttttgagtcattctggaaaaagaaaggctcaattttttccaaaatctgtttcagggttcttcgaaatcgggttttctaggagaagcttccattgattttgcagattttctgacagaagcagatccattaactgtctccttacctctcaaatttgccaactctggtgctgtcttaaatgtaatctcttttcttctcctttttgaaacctgagttagaaattgcatcaaatatgtaagaaatgtatgagatgttatataaactgtttggttgttggtgcaggtgacaatccataagatacaaggagcgagtgatttaaagtaagagtagtttttttttctgtggttgttgtctcctgttttctttgtaagagatttttgacatcaaattttgtagatttattgaggaaaataaagatcaaacacttagcaaagaagacagcttcaaaagtctacaaagcaatgatgacttagaaggatataaccaagatgtaaggttccttgttcagagagttaaataaactgtgttgtctattgagaaagatcgtgatagttatcgatcttttggtatgtaggaaaggagcttagatgtgaacacggctaagaatgctggcctaggaggttcctttgattccattggtgaatctggatggatagatgatgggaatgcacggttacctcaacgacataactcagttcctgcaacaagaaacgggcatcgaagatcaaacacagactggtcagctagttcgacatcagatgaaagttacattgagtcaagaaatagtcctgagaacagtttccaaagaggtttctctagtgttactgaatcgagtgaccctattgaaaggctcaagatggaattgg

SEQ ID NO: 883 - DNA, 73999 bp, Arabidopsis thaliana
aagctttgaggaggcaatcggagttatctgagttagaaaaacagtctttaaggaaacaagccataaaggagagtaaacggatacaggaactgtctaaggaagttagttgtctcaagggtgaacgtgatggagctatggaagagtgtgagaagctcaggttgcagaatagtagagatgaggctgatgctgaaagcagattgagatgcatcagcgaagattcgagtaatatgattgaggagattagagatgaactgagttgtgagaaggatttgacgagtaaccttaagttgcagttgcagaggacacaagagtcaaactctaatttgattcttgctgtgagggatctcaatgagatgttggagcagaagaacaatgagatatcttctctgaatagcttattagaggaggctaagaagcttgaagagcataaaggaatggattctggaaacaatgagatagatacgctaaagcaacagatcgaagatttagattgggagttagactcttacaagaaaaagaacgaagaacaagagatactattagatgagcttactcaggaatatgagtccttgaaagaggaaaattacaaaaacgtttcctcaaaattagagcagcaagaatgctcaaatgcagaagacgaatacttggattccaaggatattatagacgaattgaaatctcagatagagatattggaaggcaaactgaagcagcaatcgttggagtattctgagtgcttgattacagttaatgaacttgagagtcaggtgaaagagttaaagaaagaactggaggatcaggcacaggcttatgatgaagatatcgacacaatgatgcgggaaaaaactgaacaagagcaaagagccatcaaagcagaggagaacctgaggaaaacaagatggaataacgctataactgcagagcggcttcaagagaaatgcaagaggctttctctagaaatggaatcgaagctgagcgagcatgagaatctgacgaaaaaaacattggctgaagccaacaaccttcgtctgcaaaacaaaactcttgaggaaatgcaagagaaaacacataccgagattacacaagagaaagaacaaaggaagcacgtggaagagaagaacaaagctttgtcaatgaaagtccagatgcttgaaagtgaggtcctgaagctcacaaagctgagagatgagtcgagtgcagcagctactgaaaccgagaagataatacaagagtggaggaaagaaagagatgaatttgagagaaaactttctttggctaaagaagtagccaagacagcgcagaaagagttaactctcactaagtcgtcaaatgatgataaagagacaaggctcaggaatttgaagacagaagtagaaggtctaagcctacagtacagtgaattacaaaacagcttcgttcaagaaaaaatggagaatgatgaactgagaaaacaagtatcaaacctgaaagtcgatattcggagaaaagaagaagaaatgactaaaatcctagatgcaaggtatgtggacaataaactaactaaactggaatgttatttgcgttatgaatatttgacttaattatgatctaacacggaaagtaaacaggatggaagcaaggtcacaagaaaacggacacaaagaggagaatctatcaaagctatcagacgaattggcgtattgtaagaacaaaaacagttcaatggagagagagttgaaagaaatggaagagagatattcagagataagcctgagatttgcagaggtagaaggagaaagacaacaacttgtgatggctgtcagaaacctcaagaacggtaagaagttctagtatttgtatgtcgctgcgaatacaggtgttgtcagatcatagtagaaatcactatataacttgtactgttaatagaattcgtttctctcataaaacattattttaaacttatcaagaaatcaatattttccactgaaataagtaacgcttacataagattttgagatgcccacttccaaaatctgatcatatccactgattggtttttggttagtttccaattgctacgccgtgtttgtttctttacttccatacaagttttgtttggccagttccattcgctgtgtaagatagagactggaatgaaaaaaaaaagatgttaaagaaatcaacggtatgaacaaatctcacttctatagggatcatatataatgaatacctgttttgctcgcttatcaattggtgtgcatgacttaagaggcgagtaaaatctctcgttttttggtgaggctgaagaattctttgaccgcttctgcctcttctcttcttgaagtttgttgcctcctttatacttgaaaaactcgagtatggatggactctttctcttggtattagctttctttatgttccctggagtctccaaactaggtggagaagcataagaaggaagagattgttgttgtttccttgctctgcttctttctcgaactctgttaaggaaatcaaccgtccaaggagaactttgtacttgatttgaagaacggattgcgtttgatagtggagatccaccaaaatgtgatatttcttctctaaatggaagctctgttgttggaactgcagatcttcgtgttaagacctcctccaaaagggtcctttggcgttttgctggatagttatcagcatagccacgcaaagaagtgttgttatcatattttgaatctttctcagtggcgtatctttcagaactcgagtcgatgtcagccgcctttgggaagttaggctggagagatccaaagaaagataacttccttgaagattttgattttcttggaagttcctcttcattaacatcagaaactattcgagcaaacctattataaccaggagaaggcgggaagtcttcctcgagatacttatcagctctgtcaattacttcacctttgtagtctgcgatgaaattctccgagttcctattgtcatgcaagttaaaatctctcatcaccggaaatttacatcctctgttctggctcatgaatttgtctttaactgggaaactccaatcttctaattcaggaattccaggaagactgtcctccactgaaaaatcaggctgatctttctcccaaaatgtgtcctttgatgatgaaccaggtcctgacttcttgtcaaatctctcaggatctttagacggccaagagtcattgggatgactgatcccagaaggtttgaaaggtgcatctgagaattcagtgacagggtcaaaatgaaagatctcatgatctttcgatgaccaagaatcatcaagttggaaatccccagaagacttgagctgtgtatcagcaaattctatcgagggagaaaaatgcaccaagtcgtccatatctatctcatctttctcagcaatgtactgtttcttttttgagccagaatggacactgacatggtgtgtgtctgagtcaggtccagaagataccgaagaagagctgtctgtcattacagatctggagtcctcccttgctccgtatctgcatactgaactgaatagatcaacactctcttcaggtacatgatacttttgcgtcctttcaaccttgcttttatgtgggagcttcatgaattcgagaagtgacccagaagatgacagaattacttgagctgtgagtggattcacggaaggaaacttggtgagaaatgattctgctagagattctgactcgggcattttgacatggagtttggacaacttaacagaagatttgatacacttcaatataatttcatccgtgagattagctgacgatgagcaaaacatctgtaaactgattcctaggctaccagctgctgcatacagttcatcagaggagtccattacggcagccaggaaggcgggttccccctcaaaaacctgtacgaaaaataacaatcgttctttaagttctctggactcagtctacagtttagaagaaaatgttgcagagactttagtatatgagtgagtattaaacatctagtaagtttgtaatcatcaaattagcaaaaataatagaagatgattcttaaagtgaaaggtccacatatatactgcaacgttcccacaaaagaacggcaaaaagcaaagtttggtggaatttaccataatgcaagtgctgaaactgaaactcaatgacgtcaaaacattagttgcgatatctccaatccatgaaagtgaacttgaggaagtaccaatagttgcagccgacttcttactaacagtttcactatcataccagagtaggcaaactgcaggacttaacatcaggtccacaggtagatctgaatcgcgctccacaacttgcactccttctttttccattgctaacaccttctggtatgtacttcttctggatatgatcatctccttatcgacagtttttgtgttcacaacaatcacagatctttggtcagagagaccctgttcaattatcccacgttttctttcagattcttgaggcatggagataaattcagattcatttgtggtttcggaagatcctgcataacacactttttcaagtggaacaaagttcaacacttcttccaaccacccagttttcgtctcaacttcgtctccctacaaaagagataatagtgtacataggttctcgtatctgcatattctggaacatattcaaacaaagcgttcaaaatatgcagttatggaataaacgtgaataccactgatgtgacaacacaattttaggttaaagtacatactaatgttaaacttgcataattttcagtgttgcaaaaccaatcaagatcatatgctcatgaaagtactatttgtgatacagattgatctactgctctgaatttgaacccttcacacagactcttccatcgtaatatacaatctaccaatataacttgtaagaaaaggttgaatgtttctcacctttatcattttgagactataaggtactgtaacacctgcacagagttgcccgcatgcactgggcatatccagctccacttttatgaaatgaaaggaaggaaaggaatccaactttgaaggaaaagaatatctgggcgaggcatttggacctccatattctacaatgacgctgaaattctccacaggaaaagatggagaaatttgccttagatgaaaaagaaaggactagttagcttaactactcccaaaagacaatttcactaaaagatattgaacaaagaatcgataaagctatgttttagcatgcaaagaacaataatgcagcaatttcacgagcagagaagtaacaacattttgtggtatctcttacaatcaccatgctaaaagactgaaaatgcttttcaggccgcaatatatcaattctttggttccctttctagttcccaaaaaattcaactgtgaaaagctatgatcattgataatgaggatatggctataggaagaaataatactcactcgtaagagataattagacagtctgaaatcggcaggaaaccaagttctatggcttcatgaacatttggtcgatttccacttggggagggactgttgaggtcattgtaagataaccccatggacatcagtagcctcttcagcgaggaccaaaacactttctcagccaaaagtaatgctttggagttcccccgggcaaattctgactgtaaaatcccctggataacagctagtgatggatgtgatcttgtgatgtctgtctcatctgatttgtgttctgtttcaactgctgagtagagggtgtgcaatcctatcttcatgggatttgagcttcgacataccttgttaagatagatatatgccacatggataccgaagaaacacatataccatgtcatctgtttaattgctaatagtaatgcaaacgtgaaagtcttatcatccgccaactgtgttttgtggacatttgcctttcttatgcagtcaataagctttcctttagatatgctgagtaacttaagtttatcttctgataaattctctgattcatccttcacaagagttaaatagctcttcacaaattccccaacaagagcctgaatattttctgaagggcgcacactgtgaagtatcatttcctctgtcttcgggtttgggtgcataccaccagatctacatgaagccttcgagtcaatagacatacatttatggttggtagtcttagcagcttcgactctagactcgagattatcttcaatcacagccttcttcggatccatgaaaaaggttaagtcatcaaaagcagacattgatttgaacaacagcgtagccttcttagcattatcatccactgcacaatcccttgctcctgttttttggaaagggttttccaataacccatgcgaagtattaacaggagcatgctcatcaaggttagatataccatagaaaggttcagtgcatttctctacaagtggctcgcagaaagcatcttcagagaaaatgaaatcataaacccatttgtctccttctgaagcttcccagttataatcaatgttgaatgtaactatttcttcaaacggataatcacaatggttgtggtttctttcctcaagaaggttccacggcaagtatatgtcatttgaggcagacaaggattgaggcttgatctttgacaaaacatcctcataaatgagctccagagatcttgtcatctcataatcatgtaaaataggagtaggcaaagacttgaaggcatcatctgtgaaggcaagttcggaactgacaactaattcatcgaaatccttgaagttcatctctttactgaacataccgtaacagatttctggttcaatggctttttgaagacaaaggaagatatcaaaaacatcagagatatccacatccaggatctggaattcctcataagttactggtacagccacctttccctgaaattcctcagcatttgatatttccaggatagtcactatatccatttcagaaaattcatcctctggtaccacatcagattggccactcttgttcaaatagcaatccgtagagagtacatccaatagatcataatcctttgagcctataagctccttagaattgataatgagagaactccctgcattagtgtcttggggttcaatcgtctcaagaacagtaaatactttatcaagcacagataagcttgatagttcgctcaagtttacttcatccacttctagaaggggaaatctggcatctttgaaccatggttgaatcttgcggaagcattcattttctgctacagaagtgttgttctctgtaaagtaatcagaaggaatgtaatcaacagaataaatctgctcttgaatgtcctttgagttctgcaggataatatctgacccctcatatttaacctgcaataagaagactagctaaaatcagatgatgccaagaacaggaaccagctctaccactctacagcaaaagcaaaaactactgttgtgtgtgccaactaaaatcaactcagggatttaccgggtcatttttgatctctagaacttcagagaaacattggagatgatcctcactcgtgcataagagcttgttctcctgtatatcaaaagatgctttatctcgcaatgaaaaagaaaaagctgaactagttcaattagtacaatgcttacacagcttgagcaataccatctcaaaatccaactctggagtctccaactcaataattttaggtgtagctttatccgcaatggcatctccgtcatccttctgcaaatagatcataacttcggttttcaaactccggtaagattcgcttaagctaccaaaatttccaacccaagtatgaatataagatctaagcaacaatcagaaatggaaactgagaaaacacaccacaaatttcgaaaaatctacaaccaatctcactataagaaacaaaggaccgttgacagaaacagtcagcgagactcaggaaattcgaaatttcacctccaggaactgataatatctagatcgaaggaactttacctcgtctgagtaataaactccgagcgaagagtcgtcgatttcaaaaactcgatagtccacactgacgcggtcgggaaccacgtcggaaaggaacttcgacaaagcagcttcaataggcaaatttccgatagggatactaacattttcgatcgagccaaatcggagacggtcttcttctccgttgtagacgatgggtgccgggaaattatcaggagccggaagattgaggaagcctagggtttcaaatacgtgagaaggtggagtagagaagtaatcgatgttgagaaatcgagttcgcatcgtaattttctagatccgtcttgggagctcagactgtatcagtgatgatgatgatgatgaagaagagaacgaattttgaaattggcggttttgaatttttaagaaattaaaaaatatcccccgtcgatttcaagagggagatggagataccaaagcaactctcgccacttgtcgtcttttaattttaattgagtacgttatgccgttttaaatgttcaaaacagcacacagttgatagctgaattgattttttcttttgccgttttgttatatttaaacaacacacagtgcatttgccaaataactacatgatgggccaataaacgtggaccgactaaaactaaataatagaagatacatcgataggcttctctaaagatcggataaaagataatgtcgcatagccacgtagagagcaactggctgagacgtggcaggacgaaacggacgcatcgtacgtgtcagaatcctacagaagtaaagagacagaagccagagagaggtggttcggccatatgtcatcgttctctctataaactttatggaactttgttctgattttctcagagacacgaaaagaaagaaaacaacactagaacaaagagggtttgattgattcacttgaaaaagagaaaacacagctttggaaaatggagtcacagttgacacgtccttatggtcatgagcaagcagaagaaccaatcagaattcaccatccaggtatatatatatctatgacagaagattctaatttgagaacttttctcttaatttgccttatttattgtgattcggatacagaagaagaagagcatcatgagaagggagcatccaaagtgttgaagaaagtaaaagaaaaggctaagaaaatcaagaacagtctcactaaacatggaaatggtcatgatcacgatgtggaagatgatgatgatgagtatgacgagcaagacccagaagttcacggcgcaccaggttaatttctctgtattaaagtcctcgtcaatcagcagttatatttttttgtgtattaacggtttttctgtttttttatgtgtatgcacagtgtatgaatcctctgccgtgagaggtggtgtaacgggtaaacctaagtctcttagtcatgccggagaaactaatgttccggcatcggaggagattgttcctccagggacaaaagtttttcctgtcgtgtcttctgaccacaccaaacccattgagcctgtatcattacaagatacctcttacggacatgaggcactggctgatcctgtaagaacgacggaaacatcggactgggaagcgaaaagagaggcaccgactcattatcctctcggagtgtcagaattttcagacagaggagagagcagagaggctcatcaagagccattgaacactcctgtgtctctgctttcagcaacagaggacgtgactaggacgtttgctcctggtggtgaagatgactatctcggtggtcaacggaaagtcaacgtcgagacgccaaaacgtttggaggaagatccggctgctccaggaggaggatcggattatctcagtggtgtatctaattatcagtccaaagttactgatcccacgcataaaggtaatgactttggccgagactttttttagggtttatgaatctgtaataactcttgtctgttctgtttaaggtggagaagctggagtaccagagattgctgagtctcttggtagaatgaaagtgactgatgagtctcctgatcagaaatcaagacaaggacgcgaagaagactttccgacgagaagccatgagtttgatctgaagaaggaatctgatatcaacaagaattctccggcaagatttggaggggaatcaaaagctgggatggaggaagattttccgacaagaggtgatgtgaaagtagagagtggattgggaagagacttaccgacgggaactcatgatcagttctcaccagaactatctcgtcccaaagagagagatgattctgaggaaaccaaagatgagtcgacacatgagacaaaaccaagcacctacacagagcagttagcttcagctacatcagccataactaacaaagctatagccgcaaagaacgtcgttgcctcaaagctaggttacaccggagagaatggcggcgggcaaagcgagagccctgtaaaagatgaaactccgagatctgttactgcttacgggcagaaagtggcgggaactgttgctgagaagttgactccggtttacgaaaaagtcaaagaaacaggatcaacggtgatgacaaagctacctctctccggaggtggaagtggagtgaaggagacgcaacaaggggaagagaaaggtgtgacggctaaaaattatatatcagagaagctgaaacctggagaagaggacaaagctttatcggaaatgatagctgagaaacttcattttggaggaggaggagagaagaagacaacggctacaaaggaggtggaagtgacggttgagaagataccttccgaccagatagcggaggggaaaggacatggtgaggcggttgcagaggaaggaaaaggtggagaaggaatggtggggaaagttaaaggagcggtcacttcttggctcggtggtaaaccgaagtcgccacggtccgttgaagagtctccacaatcacttggcaccaccgttggtaaaactccctcgtccttgtgttacacgtaatgttaagattttgatgtgtgtattatttttgtaattttactcaaaatgttttggttgctatggtagggactatggggttttcggattccggtggaagtgagttgggaggcagtggcggaggtaagggagttcaagattctgggaactgaagatttggggttttgcttttgaatgtttgtgtttttgtatgatgcctctgtttgtgaactttgatgtattttatctttgtgtgaaaaagagattgggttaataaaatatttgcttttttggataagaaactcttttagcggcccattaataaaggttacaaatgcaaaatcatgttagcgtcagatatttaattattcgaagatgattgtgatagatttaaaattatcctagtcaaaaagaaagagtaggttgagcagaaacagtgacatctgttgtttgtaccatacaaattagtttagattattggttaacatgttaaatggctatgcatgtgacatttagaccttatcggaattaatttgtagaattattaattaagatgttgattagttcaaacaaaaattttatattaaaaaatgtaaacgaatattttgtatgttcagtgaaagtaaaacaaattaaattaacaagaaacttatagaagaaaatttttactatttaagagaaagaaaaaaatctatcatttaatctgagtcctaaaaactgttatacttaacagttaacgcatgatttgatggaggagccatagatgcaattcaatcaaactgaaatttctgcaagaatctcaaacacggagatctcaaagtttgaaagaaaatttatttcttcgactcaaaacaaacttacgaaatttaggtagaacttatatacattatattgtaattttttgtaacaaaatgtttttattattattatagaattttactggttaaattaaaaatgaatagaaaaggtgaattaagaggagagaggaggtaaacattttcttctattttttcatattttcaggataaattattgtaaaagtttacaagatttccatttgactagtgtaaatgaggaatattctctagtaagatcattatttcatctacttcttttatcttctaccagtagaggaataaacaatatttagctcctttgtaaatacaaattaattttcgttcttgacatcattcaattttaattttacgtataaaataaaagatcatacctattagaacgattaaggagaaatacaattcgaatgagaaggatgtgccgtttgttataataaacagccacacgacgtaaacgtaaaatgaccacatgatgggccaatagacatggaccgactactaataatagtaagttacattttaggatggaataaatatcataccgacatcagtttgaaagaaaagggaaaaaaagaaaaaataaataaaagatatactaccgacatgagttccaaaaagcaaaaaaaaagatcaagccgacacagacacgcgtagagagcaaaatgactttgacgtcacaccacgaaaacagacgcttcatacgtgtccctttatctctctcagtctctctataaacttagtgagaccctcctctgttttactcacaaatatgcaaactagaaaacaatcatcaggaataaagggtttgattacttctattggaaagaaaaaaatctttggaaaatggatcaaacagaggaaccaccactcaacacacaccagcagcacccaggtagattctaatttcagaaacttatattttttttaagtgacaatcctctgaatttacttaaacttattgtgatttatggatacagaagaagttgaacatcatgagaatggtgcgactaagatgtttaggaaagtaaaggctagagctaagaagttcaagaacagtctcactaaacatggacaaagcaatgagcatgagcaagatcatgatttggttgaagaagatgatgatgatgacgagctagaacctgaagtgatcgatgcaccaggttactttcttttgtagtttcattcaacttatgatctaaaaactattggttattcaattttgcgtgacattaacggtttggtatctgtatatgcaggcgtaacaggtaaacctagagaaactaatgttccagcatcggaggaaattattccaccagggacaaaggtgtttcctgtcgtgtcttccgattacaccaaacccactgaatctgtaccagtacaagaggcctcttacggacacgatgcaccggctcattctgtaaggacgacgtttacatcggacaaggaagagaaaagagatgtaccgattcatcatcctctgtccgaattgtcagacagagaagagagtagagagactcatcatgagtcattgaacactccggtctctctgctttctggaacagaggatgtaacgagtacgtttgctccaagtggtgatgatgaatatcttgatggtcaacggaaggtcaacgtcgagaccccgataacgttggaggaagagtcggctgtttcagactatcttagtggtgtatctaattatcagtccaaagttactgatcccaccaaagaaggtaagaactttgaccttttaagattgtgtttttctttagtgattatgaatatgtaataactctgttacgttgtgtttggtttagaaactggaggagtaccggagattgctgagtcttttggtaatatggaagtgactgatgagtctcctgatcagaagccaggacaatttgaaagagacttgtcgacgagaagcaaagaattcaaagagtttgatcaggactttgactctgttctcggtaaggattcgccggcgaaatttccaggtgaatcaggagttgttttcccggtgggctttggtgacgagtcaggagctgagctggaaaaagattttccgacgagaagtcatgattttgatatgaagactgaaactggaatggacacgaattctccatcaagaagccatgaatttgatctgaagactgaatctggaaacgacaagaattctccgatgggctttggtagtgaatcaggagctgagctggaaaaagaatttgatcagaagaacgattctggaagaaacgagtattcgccggaatctgacggcggtttaggagctccgttgggaggaaattttccggtgagaagtcatgagttggatctgaagaacgaatctgatatcgacaaggatgtgccgacgggatttgacggagaaccagattttctggcgaagggaagacctggatacggtgaggcatcagaagaggataaatttccggcgagaagtgatgatgtggaagtagagactgagctgggaagagacccaaagacggagactcttgatcaattctcaccggaactttctcatcctaaagaaagagatgagtttaaggagtccagagatgattttgaggagacgagagatgagaaaacagaggagccaaaacagagcacttacacagagaagtttgcttcaatgctaggttactccggagaaattccggtgggagatcaaactcaagtggcgggaactgttgatgagaagttgactccggtcaatgagaaggatcaagaaacagagtctgccgtgacgacgaagttacctatctccggaggtggaagtggagtagaggagcaacgaggggaagataaaagtgtgtcgggtagagattatgtggcggagaaactgacaactgaagaagaagacaaagccttttctgatatggttgccgagaaacttcagattggaggagaagaagagaagaaggaaacgacgacaaaggaagtggagaagatctctaccgagaaggcagcatcggaggagggtgaggcggtggaagaggaagtgaaaggaggaggaggaatggttgggaggattaaaggatggttcggtggtggtgcgactgatgaggtgaagccagaatcgccacattctgttgaagaggctccaaaatcatctggctggtttggtggtggtgcgacggaggaggtgaagccaaaatcgcctcattccgttgaagagtctccacaatcacttggctccactgttgttccggtgcagaaggagctttaagaatatgagaactgagattttcaagtttcactttggatgtttatgtgtgttttgtttgacgtctttgatgtattatggtataattccttgtttgtgtgaaaaaaggacatttggttaataaattgttcggctttggattaagaagttcctccataccagctactaggtctaaagtgggtaaaatcattggatttattcccttcaaagttcttagaattattcacaggattttacattatgagctagtagtgtgacttgttgaggtgttgtctctatcgttaaagttctcgaatatttctaggatgagagcatatttgattttgttttctatagttgcttttgtttgttttgggactccctaataactcatcaaaagttatacaaaaaagaaacgaaaatatttttaatgatatttcattgttaaaatccactaaatgacaattacataagcttaaaagatgacgaatgtgatgtttttgtggctaaagttagttctttaagtgaaaacttgacattgaaacgctcattatggaaaattatttgttgattcaaaaaggccaagaaacacaaccgacttaattaagaccatctccattggtcatcaaaataaagagtctttaaatataaaattaatagaaataagaaaaaaaaagaatttaaagaatcaaggtgagaaatgtgtcttcctatagacatttaaaatcttgtaatggtcagtttaaagatcattccctccatatgtcttgttgttagtggtcagtttgtttttgatattaaaatattaaatatgttgattttgagacataaaaaaaataatttagcaatgaggatgctttaacttgcatcactatgaggtgtatattgtttctacactgattttggatattcaatttcacaagtttagtgatcggtttgataaagctaaattctgaactacttattttcacatcatcatcaagtattatttctttttttccatcattttgacaagtcatgctcatgagattagttaagctttatccacatcactttagtttagtgtaaatatattgatcatcaacttgacatttattttgattaggtgcaaaaagatgaaagatttgttaatttaaagagttttgcttatcttgctcctgtgatggtggacaaaaaaaaaacatattttacattcatctttgattattaccattgtgataacaaacaatcactgaatattgtattttaaagtgaatagctgtttattgaaaattaggtactgacagtattacaaacgaatacctaaaattttaggtttatatttgttatgattttttcatgttttcaataaactttacatgtactaaaatttatgatataaataattgttataaattatgccactgcggatgaaggttatgttgatttatgtaataatagtagttttaaagcagtgaatgataacttgctggactatataggtttttcatgcaagtcctattactctcatctcatcagttatttagaatgatgaatttccagagccgccatacttttgtacttccaaagggcttctactcaaaggttgatgggctatgcgtttcatttctgtgaaaataacaaagttggataagagaaatatgattttagataggaaaaattagcactaatggtttcaaaagaaacaaacttacttcatttattttattattttaatttatattatcatgaggttctaaatctttacccataaatattctttcacaatggaatattttattgtaacataaaacaaaaataaaatatcactaaatcttagtgacactaactttgagaccatgttgcatgcgaagaagaacggaaggaactggttttggtttgtgcccttcaacgaccttaatgtcatagtttctaatgatttcgaccgctactgtcttcatctgcaagaatgttaatcttttccccaagcaagttcttggaccagcgttaaacgccaaaaacttatatgaagactcttgtctcaacattccactgtctgaaatccatctctctggtcgaaaatcttctgcgtcatctccccaaacagatttcatcctgcctaatgaataaatagggattactaccctccaattcttatcaactttatgaccacttggaagcacgtctggctttgccggtgacttgtggttgaatgggactgatgggtatagccttagcgtctcacacacggcaccgtctaggtacacgagcttgtctaaatctgccggatcaaactttggcatcttcttgttaatctcttgtcggatcttggtcattgcttcagggttcttagagagaagccagaaaaaccaagtgagagctgagctggttgtgtctcttgccgctatcacaagacccaaaatagtgtctctgatgaatttatcgttactcggtttcaagtgtttatatttggtcgtgtctatagtcatgtaatatgttaaaacgtccatggcctctccttttgagtcatgaatcccatgatttttgatctcctctcgtttagctgatatgatcttccctagcatttgatcgaaaacgtcgagacctcttctcatcttcttctctattcctacaccgatccaagattggatactccacaggaaagccggcttgagatgtctatagaacatggcatctgcaactccatccatcgcatcagcgaactcaaccttaggcatttcaacggagagagattttggatcatacccagccatcaaagtagaagatgtgtcaaacaagaatctctggaacaaatcttgcaagtcgacaagaatgtgtttctcaacagcgttatcaagaataggaacaagcccttgacttaatttgcttacgcttgtactcaccgaaaaactttggaaatcttgatggctgaaaatcgcatgagacgagtttctcatatcctcccacaagcccgagtcaacgttgaaaatcccatctcccaagaattcaaagatcttgttaaacttcttccctttggggtaattcacgaagtttgaacttagaatatactggatattcaccgggtcaacagtgagcaatatgtctgttccactaagccatggccctatgaaacaacccgtcatattttctgcctcaagagcctccgtaacaaagtcgtagatacgagggatttggaagagcacacccggaagcatcccaaggaccggccagttcatgaccatatgctttggagttttcttgtggagcgagaaacactggtagacaaagaagaaaatgaatgcgatgaagatttcaagtaagcctatgatcatcgccattattgcacacaaaaatgatttttttttttttggtcaaacaaaataatggattttcatatgagtgagttattcatacaagaactcgtttgctatatataacacatgtgtatatgtcatttcaaatcatagtattgctctgtgtaagaacatttaatcactggtgtttagaaaagtcagaaaaggagtcttgtatttgtcaattattgaagatgttaagtggtgtggagttcactggcataatatttttttttttttttttttgtgtgtaaacaacttttcaatcatcctttattttgtacattttacatctatattacaacgagaagtaatacagagataactctaaaatctctttacgattcgagtatattttttctgaagatattaaattttcatcattatttatatgataattatactattattgtaacacgttaatcaacatgattattctatggttacaaacttacaattagaagttataactatataattataatatctatattattttgtgtgcaaaatcgttaaaattcacttaaagtgaactatatgaaattttttaatagcattgaaattcaaactcaaaaaattatgtgcaatatagtagtacataattgcaaaaatcatcatatggactaaaacaatttagacatgtgtagtataatcgtcgagcatctaatgaagaaaaaaaaacacatgttaaagaagtatgcaccatcaaaatattttggtgtcggtaccaactttcacaactactaaccacaaatcttaatgtgcaccatcatttcatagtccaaattaaattttaaaatacagggaccaccggtttccatatttgaataaatttaaaccaaataaaaccaaacttctgcaaaataaccaaaccagacaatttcggttcaacatatggtctagatttctcaataccgaaaaccgaaacaaaattacgcaaaacacagaaaacatttcgaatctaattcagtctacatttcccaaaacccttttttagcactttgctccgttttgaagtttcctcttcttcacggataagttcttcctgccttttaagcgcaatagcttctttgtatgcaacctcaattttgctgctcagagatattgaagtacaatacataagcacatcaagttagaacacaatggcatactatatagaaacaaattatgcattattacctaaagatatggtcaagaacaaatatctccacagttcgtctaccccactcatttaaacatatctcataagcttccttgttgatatcttcttcatccttgtcctcctagatttgcatccaagcaaaaaaaacaaaatttatcaatacaagtaactttctagtggaaaagtgcataagataaacaataacgcggataatggaattaagccgaccttaatacggttttgaagagctttatcatctttcggaggcaatggctctggagcagccctctctaggagtgcagccctctctaggagtaacaacacatcatcatcaactaatacgaacatatctctgtccactttaacaaacggagctggcaattccttgtcatctaacagttttgggctagctttcttgttcttagtttggacttcaagatccttcaacccattatacaagcaatccatcgctataggtgatgtaacaacattttccatgaaaaagtgttttacaaatccttttaggattacgtccattttctctctagacatctcacgcctagagtttttgtccattcctaaccagaaaacaccgaagctgcaaccaagaatgcaaatttataatggtctctagagacatggttggaagacaatatattaatctaacatggcatggtttcctcaaaagaagaggtaactacatttatggaatctggaggagttaagggtacaagttgaaatgtgaaataccttgtccatttggccttgtcctctatcaacttctcaagcttgcttcttctctcctccacaaagcgtaggaaaatttgctctatatttcgaaaatacaccctaacaatttctgtcttgtaaccataatcaaggaagaaaggtcggtccaccctgtctctgcaaggaccaattatatggccgaggaaatgaaaaaatataacatatgaacatgtggagatgtaacttgtaagtatatggtagcatggaaaaatggaccgtgcatgtggtaatattttgctcatagagtcggtcttgcattacctgatcacctgaactttagtttcaattgtaagacagccagaatcatctatgaagccatcccgtaacttcggtaactccataaactttttccatccccaatcatgttctttcttccaaaaccggtgcagcgtatctacaagatcatgaattcagttgtctggatatcgaaatggaagcaagcaattaaagattcgaaaaatcacctgaaaacttagacttctttggatctttatgcatcacagatatagtaaactgagccaactgactccagcctggtgtccaagatagcaaaagaatatatatcactaagtatccagagaaagaaaacaaggaccaagcagaccagtggaaaaaaatacaaacctggaagaagttcatcatggtttgcaacacagagaaataatgagagatgattgctaacatcacatccttctggatacattaaaatatgcctgacacattgaagataaaagtaacaacacaaagccttcaaaaccatttccagagtttttttgagacaaaaattaaagatgagaaagatatgcatgccatgtaccaactgtagcctccaatttcaaaaacactgctagcgaactcccttttgctgatttgtgaaaatttcttaatcttccatgtattttttccatataactcagagggtttaagacctgagaaaaataagaaatttcacattaaattagctgaaaaagagaagtatattactaaaacacaaaaacaaacaaacgggtatagtatctattaacatatctcgaaaaccttaatcatttgtggacgggatagtggggacgtttttgacgatattcataaaaaaaatcatattgctaaaacacataccatactcatcatccacatcagtctttgccattctaaaggatgattttttcgtcaaagctctcttttcttcaactacgaacaaaaaaaaaactaacgattagagcaaataaaattagattattgaattctgtaattccccctaagatgcacaattctattataaatttatcgtaaaataatattatatgatttgaaaagttctaaagagtaagactagctgaaaaatcaattgatttgatcaaaaactgaaaaatgaacaaagaacaagcacataggtttggattatattcaacaatctgactccctcaaaactgtatcgaattcatagcttaaatcgaaaccctaagaacccccatcagatcatggatgggcaataaaccctaaattccaatcttaaaataaataaatagattgttaaaaaatcaaagaaggaccagaagttcatttctattatgaaatcaacgatcggaaaatcataaccactctctcgtatttaaaaacaaaattaaagaagaagaagaagatagagattaaccatagaaactttgattctgagtgtagagactctaaaaatccatctctctattcttacatataagatgattgtgatcgataataacgatgaagtgtatcctaaaagatattttgtttacctaataaaatatatgattctttacctaaatagatgattcattttttggtatgagagtagattttgttttccactatgagaaaggggtaacgatttttatgtaacaaccccaaatatattatagggaaaatatcttgtctatttgtttattaagcttatatttttttccgcaattaataaaaacaagtagggacccacaaaatcaacctaaaaatatgaaagtaacgaaaccatcgcttatgtggtggggtctctccaagcaaaatcgcatgaaactttttaattgtatcgtcgtctcacgaatcgtagaggagcgtctctaactacaccaacaaacacatttacatttttccaatcctcaaaaaatttctgaatctttacgcaaccaaaactattctctatcaattttcaccatcttcttttttgttcatcgatccaaatcaagaaaatgggggtggctcaagcaatggaagccctaaccgagcgagcaagtttgatgaaagagtctttgcataagagccagaccatcaccgataacatggtcggaatcttaggttctttcgatcatcgtctctcggctcttgaaaccgcaatgcgtcccacacaggtcctttcttcatgatctctctgttttttggatttttagagtctcaaggttgtggaatttgagatctatcttctgttgaaattgaaatgtgattctggatttggtgataaaatggttggcttcttcgacgtttaattttgggggtgtgattgtgtttgtgtagataagaacacattctataaggagagctcatgagaatattgacaaggcattgaaagcagctgaggttatattggatcaatttgatatctctagaaaggtttggtgttctctttacactcaccatacaagattctccttttatttgcttgtctttcaagctatcattctgttccccttaggtttcctcaagttaagtgttcttaagatgataactgtagacatgttttctctagttgaagttacaactgaaacatttgtggagaatgcatcatgtgaacagagtagcaaatgtctgctttctgatgctgtgaaacttaggatttaggacccaatccagttagatatcaagtactctgttcttgttaaggagagtttttttgtcttcagctaagcctaagatcgttttcttcgtgtgtgtgtgtgtgtgtgtgtatggcatattaagctgaataatgattgatcatttttttttgtcaggcggaagctaaaatattgagaggaccacatgaggatcttgaaagctatctggaagcaattgatcaactaagaggcactatcaaattcttcagcaacaacaaaatgttcaaaagtgctagtggagttattagtcatgctcacggtttactttctaaagctctatcaaagctagaagatgagttcagacagatactgcaaaactacaggttcgtctttcgatatgacagacttacacttgtgccttattgaagaaaattcgttttgcttgtgcaaggatttggtctaacacattacttttttgtttcaatattttagtaagccaatggaacctgatcgccttttcgaatgtcttccgagtaatcttcgaccatcatcagaaggtgaaggtggtggtggaaagactcatgatccccatcacaagagcttagaaaacgctatttttactgtcccaactgtcattcctccaagggttctgcctctgcttcatgacttagctcaacaaatggttcaagctggtcatcagcaacaacttttcaaatcttacaggtccaacttctcagttttctttcaagtagaacctctatagtcacacatattagttttgtaatccatatacgttttcgaactttattagggatactcgagctgcggtgttggaacagagtttgaggaaattaggagtggagaggcttagcaaagatgatgttcagagaatgcaatgggaggtattagaggccaagattgggaattggatacattacatgagaatatccgtaaaaaactctctcccacaaaacaagaataccttactagatcgctactgtttccttcgtttacacggcacttgcttttgttgccttgagacaggtgaaactgttattcgccgcggaaaagaaaatctgcgaccaaattcttgatggtgttgagtctctcagagatcaatgttttggtgaggtcactgtaaatagtgtagctgtgctgcttagtttcggggaggctattgctaaaagcaagagatcacctgaaaaactgtttgttctgttagatatgtatgaaataatgagagagcttcagcctgaggtaacgtttaatgtctcacaccgtcaaagaaactatgtgtattagctagcccctctaattgtctttcatttatagattgagttgctctttggaagcaaaccatgtgctgagatgaaagaatccgcgctgaatctgacaaagcggttagctcagacagctcaagaaacttttgctgattttgaagaagcggttgaaaaggatgctacgaaaaccgcggttatggatggaaccgttcatccacttactagctacgttataaattatgtcaagttcttgttcgagtaagtaactttacttagaccaacggacattgtcatttttgttggactaatcagtggtttttgggatatggaaacagttaccaaacgacgttgaggctactttttcaagagtttgatagtaaagatcctgatagcgagcttggagctgtaacaacgaggatcatgcacgctttacagaataatctggatggtaaatcgaagcagtacaaagatgtagcattaactcaacttttcctaatgaacaatgttcactatatagtgagatctgttaggaggtttggttctgtttcttcggctccatctttcttaaacagaaccagaaaagcctaaacataatcctgagttagagttacatttttcacaggtcagaagcaaaagatttattaggtgatgattgggttcaaatacatcgaagaattgtacaacaacatgcaaatcagtacaagagagtttcttgggcaaaggtttactcaatcgttttaggtttatactttaaaaatgctttaaaatgtattttctgattagtcttttcttctgcagattttgcagtgtctcacggttcagtcgagtgggagcggtccgatagaaaactcaaatatatcaagagcatcagtaaaagacagattcaagactttcaattctcagtttgaagagcttcaccaaagacaatgccaatggacagttccggacagcgagttgcgtgaatctcttagacttgctgttgcggaagttcttttacctgctttcagatcgtttcttaaacgttttgggtaagatcaaaaacacttttaaacagattttgtttcgcgcttgtcaagaaagagttaaaagttttgtttctttggttgtgttgtgtatcaggccgatgatagagagtggtaagaacccccagaagtatataaggtttagtcctgaagatcttgagagaatgcttaacgagttctttgaaggcaagacatggagtgagccaaagagataaatatgtattcatctttgtttttccattttgttgtacattctcttcttctttgtttttgcaacattactctttaatatttataagttcttttgtatttctccttttcttgaaggttttttttttctcctttcagttttatttttcttctaactgtaaagttgatgaagctgtcatgttttttctaagctgtaaaagtaaattggctaatatccatatatactatttcaatgatgattcagcgttttgcattttatcattgtatatatcatatatatatatatatatatatatatatgtaagtttaagtctacacgtatacatgttatgcatgcagtagagaatgttaaatcttctttagagtataatctcgttcaagttgtataacatgctaagtcaaattacttttaatataatgttttctgtttataaacagtagacgtcgcatatgatttgtgtcaacaaaaaattatagtctggaaagtggaaacttaagaagaattcaaacgagaaaaaggtcatcaaggacttaagaagaattcaaacgagaaaaggtcatcaaggacattagacatgatttaacataatgccaattagctttatatatgttctagagttgacatattctgtaaaacaaaattgcaaacatgtagtagtgtttatatatatatatatatatatatatatatatatatatatatatatatatcattattcattaattaatgagttcgttattcgtacatgttgtaactaaatctatacatagttaggttcctaaatgagtttctattcgttgtagaaagtgtgactactattcttttagattatagttttgttcaaatggcattaaagaaataataacatgctaagtcaatgtcgtgtaaatagtgtcaaatgaggaaaaagtaatgatgactttgatgaacgttatataaccaaactagtccttaccagatcacacatatcacaaaatgtctaatgtattagacaagactaatcttcatgagctctcgattgctccaaaaatttccactcatgatgagaagctttacgaatgtactaaatgcggtatcttcttccacagggattccgtcgagtccgcaacagagattaaccctcacgaaaacctaggagaggtaagagcggttgaagacaaacccaacaatgaatctatcaaggtagacgaaagaggaacatgcaactttcatttcatagatgaacatcatggtaaggttgatggtataaacacagaatatgatgcgtccaagttcaaacagattctggaaaattacaggttcgtctttggatatacataatagcttgtccttaattgaagcaaacaaagaagttttaacaattatttttgtctccttcataattgtttagcaagctaacagaacctaatcaacttttcgagtgtctcccaagcaatcttcggccaccgtcagacgatgaaggtagtgacggaaagagccatgatccacaatcaaatggcttaggaaaaactgattatacggtcccaacaatcatcccaccaacggttttgcctgtgcttcatgatttagcccaacagatggttaaagctggtcatcagcaagaacttttcaaaacttacaggtccaatttctatttaacttctaacatttaatagaaactcattttttcattggatatgataaagatcattttcatagtgtttattaataatattttacttttcgtaatatttaagggatattcgtagggcagtgttggcgcagagccttgagaaattaggtgtagagagacatagcaaatatgatgttgagagaatgaatcaggacgtcttcgaggccaagattatgaattggatccattacattcgaatatctgtacaaaaactcacttccaaaaaccataatataactatatacctttatagatatagattgtaatgatatccttgttgatttgttgacgttgagacaggtgaaactgttatttgctgcggagaaggaaatctgccaccaaatacttgatggtgttgagccatttagagatcaatcttttgctgaaatcactactattagttttggtatgcttcttagtttcggatatgctatcgctatcagcaggagatcgccggaaaaagtgtttgttatcttagatatgtatgagataatgatagagcttcaaccagaggtaacatgtacagtatcatacaatactgcgagttcatacatagcatatatgggtaaatgtaaacgcaaaacaattgagaacatattttggtgtatccaaccaaatttttatagttgaatgatttcgatcgttatgaaatttagttctttgtacttttaactaggaaaattcatgtaccattttaaagtatattaaaaatgcttgaatatattccaataacgatgtttattcaaatcactaggttagtaacattgatttctacaagactttattagttatttattttcctttgattgaaacttggaagcatagtttgagttgatctttggaagcaaaccttgtactgagatgaaagaagatgcactgaatctgacaaagctattagctcaaactgtgaaagaaactattgctgatttcgaagttgctattgaaatggatgcgactgaaaccgttgttatggatggatccgtacatgcgctaactagctacgttgcaagatacgtcaagttcttgttcgagtaagtacttttttcatacaccatttctaagtgatatagctttgcagaacttaacgttgcttctggaacttgaacagttacgaaccgacgttgaggcaactttttcaagagtttaatagtaatgatcctgataccaagcttaaatccgtgatgacgggtatcatgagggctttaaggaacaatctggatggtaaatctagacagttcgaagatgcagcattaactcaactattcttaatgaataatgtgtattacattgtaagaaatttcagaaggtttggctctgcttcttcgcctcgaatatctctaaaacagaaccaaaacctaacaacatgttatctcagagagactaactatttgttcacagggaagaagcaaagaattttttgggtgatgatttggttcaaacacatagaagaatcgtacaacaacacgcaaaacagtaccagacaatttcctggaataaggtttgaaaaatttgctctctaagatggtaaagagtcttttttctgattaaccatttctttatgtagattttacagtgtatcacggttcagtcgagtaagagcggtctgataaagaatgaaagtataaaaaaaactttagtaaaagaaaaattcaagactttcaattctcaattcgaagagcttcaccagagacaatgccaatggtccgtttcggacgttgagctgcgtgaatctctcaggcttgctattgcagaggttcttttacctgcctacggatcgtttctcaaacgtttcgggtacatatacaattcaagaacacttttatttcaaaattactgttgtttcttgtccttcaagaaataaaaatatgttgttgtgtctcactgtctcaggccgatgattgagagtggtaagaactcacagaagtatataaggttcactcctgaggaccttgagcgaatgcttaacgatttcttccaaggaaaaaacttggatgtgagcccaaaaagataatgtttgtttccgttacattctctatttgcttttgcaacattgttatttatgatcagatcttttctcttttgttgttattgtgattttttttatttgtaaaacttatgatggctgtataagacaacgaacgttgtatacggttgataatgtggttttattgattgtggcattaccgtgtaattttaactactgtgttgggtctacaaaaataaatccgtcgacagcagggttcgaacctgcgcgggcgaagcccaacagatttcaagtctgtctccttaaccactcggacatatcgacaatttgatgaaattacactttgaaaaagatatatctttattttttcaacgaaagtgagctattacacgagaaactacatggtttgcaaagtataaaacccatgtcaatttaaaatgtaaataaaatagaaaaaaacagtcaagaacaagaatgaatgaaaccaagatcgaaagttacataagatgaggaaattgtttgaatgacaatgattatggatatataattagaaaagcaaggagatctagagagctcgacttttgatgatgtcgagactcatctcgctcgggtcagtggcttgtaactccacctgaataccatccaattccctcttgaacctgtcctttgagctcgcatacaccatcttcatccttactctagatgaatccggtgacctaacgtaacatacatatacatatgcacagtttatccataaccataatctaaatataacatgaaaaaatgttcaaagttgtatttaccatgctatgaagaagatcttgctcttctggatattctcagcagtggtgaagtcgaagtcataaacggcgtagcggcattcatttggcggtaggtaattggtgaaatcgtcgtagttctcttgggggcttcccagcttttctaccaccacttgttgtccatctatcctgaatattatgaacctatagtttctcttcgcttttagctccaaaaacttcagcttacactcgtcctccaccgccatccccgacgccgcgttcgccttttcagttcatatatcagtcaagataaaacaaaatgtcacaacactgatacgtcgtttaaacgttatacatttatgcattttgcgtttatatgtgattttttttgtttcatcaaattatagaggacgatacattttcatatttttgtaacatttctcggacgtatgtctttaaggaataaaattgggttgcataaaacattcatcgttaacatttacaataaagttcatggaaaagaaattccaatcactcctctaggaaaaaaactgaaaaaaaaaatacactagttccacaacaaaatgtattatttgcaagaaaatgaatatatttctctaaatttcatattctatccatctctatcatattcacatccatttattattcttgcatttgccatttgaatcctttgttttatttggacaaaagagaaacagcagtaataacatgtcaacgtaaagaaagaaaacaagccagccaaacaatcgaagcagaacaagaaacaaagctgagatttctaaacacacaacttcattacaaagaagaagaagaagaaagataatagaaaacataccattgcgtttggttgatgaaggtaacacctaagacaacaaagagaaatgggacttctcgttatttggttttttgtcctcttttgtgggacgagagatgaagaatgaagaaaaagagaaatgaaaaatttgggggaataagagattcttaatttgatttgaagaggccaatggagacgaactcggacaaccattaatacctctccatcttataacatcaaaccacacctttttttactctctatccttcaaattcgcctaaccatatcctttctttccggacgtttttcacactaattttagcatttcttacatccttatcaaggactatatgttataatttggttctaggtgggttttattcggtttagaagattatctgtaacagaattggccgtggttccattacatagcattgttcttaataaaatagcatttttttgttcttacacaactctaaaagggagattagaaaacaaaacttctgatatatcctacaaaaattgatgacccttttcgatcctcttgtgatcatccaacgaaattgacaatctttggaccttgtttctttttcttcacctcgacactcttctgagctgaaacatcagaggtattgatcttcttgctgcttaatggattcaaactggttcaatagagattttaaaattggttctttgttaaccacaaagctattgaatagaacccatctcatatacttggagatctttggttacatgaagatatatccattaaagcaaggacttagatatatatgatactggattggttcatatgtggattcctaataatactttactaacattggttcaaccaaaaactgctttcattaaaggtgaatcaaaacgatggttttggagtctgtgatgcaattcagtccaaggaaaaaggggtacaactatgcttttttcgttatggttggaagaaatgttaaattggtccaacaagactatcttccattgcatataacatggagactttcaaatattgaaaatttggaattttggtttaggattcaccaaattctggaagatagaaactaaaacctgccactcgtaattgaggtcgtttattacatgtttaaaaccagaagacctcctacaaatcaagttcatacgtaatagtagctaaccccacaaaatcataactcaggaaatgtaaagtcttaacaagaagaaggaacaacagatcatcatccgtagatttcctacaaagctatcaacgaattcaaagaaactatcaagtcacaacaactgtatcttcttctcaataaaagaaagcgcaaacagattgatcaacaagtacccacaacagatcaggcagcttggacatgagcagaggttgtagcaggagcagtctttgacaggtttgggatatacttccaacaccgtttgtgaactccgcttatcttctttggagcttctgcagctcgcaatcctgcacatgacaaaaagcttcaactttgagatcaaggagcataaaaactaaacaaatgaggaagaaaaaagtcaccatctttgtgaacaattccccaagcttttccatgtctaccatcctgcatttgattccaaaatcaaacaaaacccctaatcagataaacaaactccaaatgatttcgtttacagaaactttttctcagcttaagaaaaatgtaaacttttcaattttcagagatgaaagacaaggagaagaagaaccttatagagattgatcttagtgatttcataagagattccattccaatgagctttagccatatggtatccgattccccaattaggtaagaactgagcaacttcgattaagttcttcttctttcttcgtttcggtttactcgaatcggagctagggttttcactcgccggcgccgcagagaaatttcttaagagattaagcgagagtctgaaagcaccaacggtttcggttctagagattgctctgttaataagtgtcatcgccatagtgtcgctctcttcctctctctctctctctcaagtttcagccactgttgaagatcggcgactgaggttgaggaggagaagcacaacttttggtttattcacaaacagactatatgttataattaatttggttctaggtgggttttgttcggtttagaagattatctgaaacagaattggctgtgtggttccattacatagcattgttctgaataactaggatttttttgttcttacacaagactaaaagggagattagaaaacaaaacttttgatatatcctacaaaattgatgacccttttcgatcctcttgtgatcatccaacgaaattgacaatctttggaccttgtttctttttcttcacctcgacactattctgagctgaatcatcagaggtattgatcttcttgctgcttttgggctcttcagtgaaatcgtcttcaagatcgtccccactaaacttagtgagctttcctcttggtgtagcatcaaatcctgtcatttcagtcagggagatacaattatggtctttataagataaatgagatcgcattcactgttccgaatcacttgaaagagaaactacttgactaggatcacataattagaagctcaagaattggaagagtgagacaaaagaaaatgttacttgaagtcttctttggttgggctgactcttggttgaatttatcaggacagtctttgacgagatgcgccacactcccgcacactttacaacacccgccctgcaaaagaaggcccaccaaatccattgttcaacatatcaaaactcatcttctatgaggaaaagaaaaggctcgaaacaagatttgagcattgtaccattgggtagattccatgcttgttttcgggacagttcttgcttatgtgcccttgtcccttgcatatgaaacaacttgcaaatttggtccctcctacaaaagaatcaatacagcaaccaaatctaatcttagtgactactcttaacaaacaaacaaacaagtgacagtatagcctcaaatacgttttcagagaatataatgttaaactctctaaataacatgaactacacttcagatcataagtcaaatatctgtgtacagaggtaaaaaaaaatacaaatttcgatgctaggtttcctgaaatcttgtaatatgagaaaagataaatattccggatccagagaagagaaaaattaccatcttccatagggtaaggacaatgggaaagtgaatgaccagtatctccacaattgtaacagagcttcttctcggagctctcattgttcttttcagggcagtttttaagactatgccctctcctcctacattgcaagcatatctacaaacaacaaaaccaaaaacattcattttctagtaaccaacaagtctagtgatcatcaaagtaccaacatttcatgaaaaatttcatctttgagttcataaagattaaaccctcaactgattctaacaagagctgccaaaaccctactaaatctaaaactaaattgaactaaaaccctaatcccaaaaccaatgattaaagaagaaaagaacaaaccttgtttctctcccactcagatttttcaggacaaagcttagcaatatgggttttggaatgacatataaaacagccttctccaggtttcataccaggaactcgaagaggatgtcttgtggaagagcctgttctctgaggtctatcagtggaagatccaggtttctttttcttgaacaagcttttcttcttcttcttcttattagggtcctttggtggcgttggttctgcttttggaaacagctctggattagcttccttgtatcgcttctgcgcaagtcttctcctttggttcaccattgttgactactgtaattagagaaagacacgattgatttcgccggcggcggtggaggcagtgagacgaggaagacacaagtttgtttggtcgttgaagaagctcttgctaggggatgttgtgatttaaatgggcttcaatcatctggcccactgttaatagacccaaatattcatatacctaatcttgctaagggatattgtgttttaaatgggcctatttcaaattttagaacagtcagagtcagagtcaaagttttgttggagccggtcatgcctaactttttttttttttttcgctcatgcctattgcctagcttactcacataagcatagcaaaacttatcccactgtataagaacatttccctaaccatgttaacaagtatcaactagggtctagggatgggcacattgccttctaataagttcctaaatatttagcggtatgcatttaaacttttggcgttcgtatacccgtacccaatcgaaatatatacgtattcttttggttactcgaatgctaataaacatatactcaaaaaccaattgattatgaataaagaaaactaatgtacatacttttaacgtaagacattctaacacctgtactttcaattcgagtatttgagatcaattattcgtttgagtacgaataaccaaacttttgaattttggttatttgaaatcatttttggagtatagatacccaaatttctacattttctacttgttgccattctagtatcaattaatgaacggtacaggatgtcctcaatatgagccattggtgatagacattaccataaaaggccttcaaatttggtatgaatctagtggttgagttcatcaactactgatttttagctttatttcttaaaacaaaatgttgcacttgttgtacaaaagatatttttttctttgaatttaatttaaacattaaaaaccaaaaacagaaacatattatatattttcaccaaaactcaacattttattcgaatcatatatattataagacgttacttgtgtaaaagttacaccagaacgcagcctactttcaccatctcttaatgtgtcgtggtgtgtttttatgaagtacatatatataaggacgcaataaacgatgtaatactaaaaccgtcgaactaaacataaatctcttaattattctcgtcgaaaactcatgatatcatacgtgtcctctccattttcccttgccttaattaatacggtgaaggtgccggcacgtaaggcatgttgtccattgaagtagccggctcaggtgctatctcgcccaacatgactggtccaaccggtgcaagagtgtccattgcaattcccgagctcctaatttccgacattgctcttcttgacttcccttcttgtgattcacatagctttggtaaatacactcctatagcaaaccaaacaaataaattataccataatctattagagagagaaaagtaatataaccgtactggtctaccaatatcgtaccttcaccagcagcaaggttgaagtagagatcgactacgttaggacattggtttaagcatttaaccgagcagagtttatgtgtgaactgagattccaacaatgcgtccgaagatatacctaaagctttccggtctagaccacacgctttaatgcactcgtccgattcaataatgtttgtgaccttgttagcttctatctccgatgatcgacatgtgtacacctcgatcccgctcctcttcatgctcttctccaaaacgcaacgttttccagtggacgagaccgcgaaggcacacgtgttttcatccagattctcgcacttcacatcgtcccctaccaaattaattccaatgctacttagtatttgtacatggaataacaaaagaataacatacctttgaaaatgtcttagttaagctgaacatacaatcgagaaagctaattgggatttgttaaaaatttacgatgtaagttcaaaatgttttataatagaactatatctagcttgtatgtggataactttgatatatagagcgatttgaataaacttaccaaacgtcgtttgcgaatagatggcaaggagaatcataaaagctacgaaaactgtcttcaaagccatgttgtgatgtgaagtgaagacacaaggagacaagtaaaagaaatgttaattgaaagaaaattcgaaggaaagatgttcttttgggtgtagttattggtgttgtagcgatagcctatttataaaggggtaatacatcaaaattaattttaaaatataagaaaattatacaattgtatatttttccttgatttaatgagtaacgacaatattgttgacaaatgaaacactaagcagagtttacatggaatggtcactgaaaaagtcgtagttatattagttaggcaaactctttgattaatcaacaaacccatattttcacctcaatagaaaagtacgcaacatggaaaattggcttgacatatataatgccgttgttaatggcgaagattatgcagtcaaatttgagatgtgaaaccttgactcacttttcctaaaatctggcacaaaaccatcttctcatttggtcatcattttattggactattgagtcttttttacttaattttaaatatatagacaaagtgagaatagtagtttggatgaaaaacagagatgttctttctccgtaaatgacggtatagacttgagacgtggaaattaacgacaagtattgtactatgttatttcgacagtgaaacttaatgtaaggatagtcacgagtcgtccttattaattagatatttgtatacgtgcaaataaatccaaaattctgttgttcagaaattatactaaacattaaattgacgtgaaatatggttccaaaaaccgaacccattctaaagcgacgactttgtctttttagaggttctatgattgggtttgagattcttagaggtaattttgagaaggccgacatacaatttgatctcctagatgatcatgactttatgagctgcctgcaatgaccctagtgccctgacccgctcgcctcgttggggaagaacatgttatgcatttttattcgggttataggagctccggtttccagacctttaatcaaataccgaaatacgcatcccacgatattcaaattcaaataacatgttttatcttattttacttagtatgattaaattcacttttactatgttttaaaataattactattttcattgaaaggtttgattactatgttgttacgtgtccctatagaattaggagatttaatctgttttgttcttttgtgcagttgaaacttccatgtttcctcgacaaagaaaccttccatgttccaaacctctgtgtcttcattatataaatagtcattatatgttttaatgtggttagtggtttactaaagtatcactcttattaatttggcgacctatcatgtcatttcaaccaatgctacttaacttttttattttgttttataaaaactaaacagtggaaacgtggtaacgacatgaatattgttaccgatactgtctctaataaactcacataattcacgcaacaaacgaaccatgggcccccatgttggtctgaggacggactagcccattcattatgtgttatgttatgtgtaacaataagccgttattatgcaagattaagaagaccacatctgtacagataaatccatcttattctatcttccagagttgattgcttcttattctcataatctatttgttgctgcggcttgcgccataagttctttacaataataatgaactctgtttgtttctattaatcacagcataagtgtagtgatggatcaccattctatactgtggaccgctatttctctagaggaaatgtttctacttcttctctgtttttgtgtccaagtgtgagtaagatcaaattagcaatacatgggcttttgttactatatatcaaagatagacacatacttaagttactaagcaatcacgaaccataacctaacgttactataaatatcatctttatataatttttattgtttttttagttcacatggcagggcctgtgactatcaagattgatggttataatgaaggcatcccttccttggtctctacttccttggtctctaatccatattcatggacaaattaaggtaatactaaatatagtaacttattacaatgtcttcttttttttttctctatgctaataagatgacatttgccacaatcaaagcaagtctttttgtttctccacttaacattttctattataaataaaaggaaagagtttttaattactggtgttacctaattgtttcatggatttgactttagggaggtggacacactctagactttaaaccaatggggagagctatataatgttccagaggtggataagtggccaacttatgtgacaatgcatatatggaccgtctttgcctttctccatttatacggaaacttggtcttcaacaaagtcacctaaataaattcctaaatttgcctttcaaagtttgggacaattacatttcacatatttttaacaataaaaagcaagcataatattgtataccaaatagtgttcatacttcgattttgcggactattttagctaagttgggtggttgttggaaaatggaagtaattaattaaataaggaagagaagaagagatagaaggcatcgagaaaataaggaagagaagaagatacatgaatccgtttgttttttccttgatgaggtgtggtatgatattacaaaagataagcgattatgatggatatattttaccaagtaaatatgccatctaaccaaaaaaaatataaaataatttcttgtcatttgtaatgcacaccacaccaagatcaattgaaaatgtctaatataattaagaaattaaaaataacacaacaagtatgatgtaacaaagctcggcaggtgagtcttggagatcatcaacaagaaggtcatgaatatagtaaaacttttctaccatgcagtttcaaagacgtcaacaattcattgcttcttcaatcttttttattttatatgattataggtttacaacttaaaatcaattgacaataagtggaaatgtccatattttgtatatagtagtgttgaatgatctccactttcaatgtggaacattcttccacgcccatttaggatgatgtatagttcatttggctcattccatctcaaactaaatcccactttttttggataggttatacttgtttgggggaaactgaaagttttattagatagatggtcacaatttcttagtctagatagatggtcacaatttcttagtgtttgatgaattcttcaaattttgtaattcctattatgatttccattataaattactttttaatcttgtttttacatataaagtgactcatgtttcaaagtcaaaccatcaagaacagcctttcccaatctgaaacagccaaaagaatatgaaagttttcaaatgtttagtgtttgacacagattgcaaaaaacaggttaaaggttatgaaaagtcaggagagtcaccaaacttacaaaccatatataattaacgttctacgacaacaaaaggacgactttcgtgagagaatattggtgacatttattcttatggttttcaaccccaaaataatttacctaacataacccaaccaacaaaaaataataattgaagaagatgcactgttttaaaatgggagaatcatgtggcgcatcacgcatgtaaccagctttaaacggtatagattgttaatatggtacactttcaattaaacaaaggtagaaatcaaatgaaaatcatttacatatacaccgtgttacagttttgatagtccttctagtaacgtgatgcacgtggggcaaacgaaggaggaggcaacgtatatatacgtcatacattgttttaacacaaaccgaagatacaattacaaaatgtttaactttggggagacttggggaacatataacacttcctcagtttcaaaaaataaattgttttaacattttaatttttgattgtgttcttagttttctttttatgaggaaagagttagagcatctccatgcgagtatctcaatgagatacccaacaaaaagaagaaaattaaaaaaagtaaaaaaaaaagagagttaagttttgcaagagaaactttaagaaacaattaatatatcaattatctaatttggacagctgccataacattattcaattatcaagtaacaattaatatatcttttctgattattaatttatttatttttcaaaaaaatttcttacttttgtcgatggagaatatagtcttatatctccaattagagaataaactaaaagctgataaaaaactcacaaagattagggtttgacccgaacttggaacttatcaaaagtatatatttatttttgtttcataaaaaatagtgtttgtatttatgcagattaaaaactaaatctttttatatcctactatttcagtcatctaagatatagtaaaattttacttagttttattaacttaagtaaaaatattggaatgacgttttcaatgaaacggaaggaattttatataatttattatgtcaataattttgttttgatttctagcttgtagagtttgacttgcgttgcatcgtagttaattctatgaatgcgcctttatcctagcttatagagtttggcttccacccgagattccgagttcaagagaatttattgtgcttttataaatgcgccggccactcttgattctcaaagtggtgaataagtacggatttacagaattgtcctctatgattatataatcacacgagataaataactttcttgcgactaaaacctggccgctccgtactatcttggcaatattggaatttgggggtatatttaacgcgtgtgatgcaatttccaaaacattattgttttgattttgtatgagttattttctcaactgcatatgttataaatttataatgatcacaatccacacatagtcacatacatctagtttttggtattttattataaataagtgtttaagtctaaagttgtatttagtttgttttttttgggtttaacgaacaagcttctgataatgtttttttaaaaaatagtctctatttcttttctttttggatagatttacgaaagttttaacaagaaggtttggtgatttagacattcttaaactaatgagttaataggtaatgttattttttttgttttgggacaaaaaaagggatactcatgttgtgtcctaatatattagctcagtcggactaatttatctacgcggtgcaaccatttaaatttctactagagaaaattaaaaacccaaaaatagtgaatgtatagtatcgatggctagtggacccataaacacgtactcaagaacacaaacaatcaactatttcttttttttggttaaaaaacaaaccattaattctggtttcgttcacatgagttttatggttaaatctaaatatacgacaatttctgtcacatgattgtcgctggttgaaatagatcggtagtctctgttaattagaaaatgacaaagtgttagttttttaacaaacaaaaaagaaggaaagtaatgtgttagctagtgagagttctgtaagcctgtaacatatagcatatagaacttaaacagtttatacaaatttttatgacttagatacaattttgaaagattatatctagtatatatagtatatatatgaccaaataataaaataacatccaaaacttagataatatatggtccaaaacatagataatacatggctcaaataatacaacataaaaatatagacatagtatattaaactaaaaaaataatctaaaactaatattttgtttttacaaaaatattatttaatggataaattagtactttttaaaagtgtttttaagctgttaattagattacaaggatgttctatatgatgatattgaaaaggggccaaacctcccatacgctaggaacgtggtgggctacaacgtggaagaaaaatttttcgtttgtagatggatttgcattttcgtaatctacaaaaaaattatatgaaaactgaaaatatcttaaatttcaaaaatataaatattttattctcatgaagacgcatatgttatgtttagaacagtcgaagctctcaaatgattgatgatactagtgtttcaccacttgttgtgctatttgtgtgagtgtgacctgcatggtattaatacgaatattagactctaaccgtagatgaacaaatggaattttcatctacgaaccaaaactataacagttgtttgttacgaccaaaaaacggctgtgtaaagaggaccttttattgtatttgtcagatcttgtgttcttatttcgtatttgtcagatcttgtgttcttagtactacaagtcatagcacctctacgcgtgtgattaaaaaaatgtttcatacgcgaaactttgactattttgctcattaagctcttttacttgaacttatattataatatctgaactccaataatattagtaatatatttcattactaatcccaatttattagataacgcacgtgtcctctaaaactctaaataaaatatggaaaaagacaaatgacgaggctgtgtcttgttgataaagagatccagtacgtggtccatgccagatattattgtgttatgtggtttaaataataaattgtgaattattgatgtgtggtttgatctattttgggcttaaacgattgaatcctaagggtttcacattgaactgttagagcatttaagattcattctcacattcacagttaggtagtgatagtgatcgatttcacatattgggtccaaaagtagagcatttcacatgtacaatttcacttgattgtgatttaacgcgtaatttttatattcggctttataactagaaaccgaaagattctactttttcactaaccgaccttgtatatattatatatcttaagttttgaacttttagttatcaactaaattaggttttattttaaattcaccacatacttacacgtcacacatttttgttaaacggagaagtttgtgtttacattatgtaataagacttccttaaattagtactcggaaaatgaattttttattttttatcaaatctgattcgagttagttcaaaaattaaaaaaagtaagatgtgtgattaaagcaatacgaaaaataaatcacaaaattgaagagggaaaaaaaagcactacaaatagaggacataaacgtgtgattagagctaattagtgttttagtttaaaacgtagttactagttataacctaagaactttatccggttgaaagaagagtaaataattaatttttccagttgacaaaaaataaaataaaaaaataaaaaggtaatgtgtttaaacctttttgccaataaggattaaaagacagcatccttacattcacatcactttcaatatattcaaaaaagcagccagagatacaaactgtacaagacactatagagaaatggaaaaagacaagaagcctaaatgccgataatgtttgaccagaaaatggtaaagaaacgttatatgttaatatgttatgtaccaacataaactcaaataaaatacaataatacactaaaataatagagagacgagaatttcatcggtcaaagtctgacattcttcaacacccgaacctagaaaacatctataaatacctcatttggttcattcccatatttcacctgcaaacattctgaatacaacaacccatattgcacctaaatcacttcctcatatacaattcttcacaacagtaaaaaaatccacacatatttttttgttcttatatacaaatttggagagattgggatggagttttttgagatgtctcgagtttggtacatattcttcaaagttttcgtcgtagttatttgcctcatgttcttgaagctctttctgcgttgttggatatggccagttcgagctcaaaagaagcttagaggaaacggatttgttggtccagctcctagttttccatttggaaaccttaatgacatgaagaaactgaaaatggcctcggttgtggtggataatagcaaatcttccaccatcatcaatcatgacatacactctattgcacttccacatttcgctcggtggcaacaagaatacggtaactaataaatctatatcctcttatttaaattccggacaattagaccatataagttgtttagctaacaacatttggattaccatatctaaatattaacgtagattattggttacgtgttatgtgatgcagggaaagtatttgtgtactggctagggatagagccgttcgtgtacgtggccgatcctgaattcttgagtgttatgtcgaaaggggtattggggaagagttggggaaaaccaaatgtttttaagaaagacagagagccaatgtttggtaccggtttggttatggtcgaaggagatgattggacacgacatcgccacatcatcactcctgcatttgcccctcttaatcttaaggtatagatatgtacttacaatagttaaactttttttaaaaaaatcgtttgcattggcaagagtccaagttgtagaaaattaatagggtgactaatctagttcaacaatttagactatatagtccttttccaaaagcatgagccaccatttttcatgacataaatttcaaggtcttatgatgttgaaaagactagaaagtactatattagactcattcaaaatcaaagattcatacgaaatattcctctttttctcattacttttaattattcgtcttaaaaacaggttatgacaaatatgatggtggaatcagtctccaatatgttggaccgatggggcatacaaataaactcgggtaatcccgaattcgacatggagagcgagatcataggaacagccggtgagattatcgccaagacaagcttcggtgtcacgggagaaaatggaactcaagtcctcaaaaacctaagagccgtgcaattcgctctcttcaactcaaatcgctacgtaggcgtgccattcagcaacattttgagttacaagcaaaccgttaaagcgaaggggctaggtcatgagatagatggtctccttttgtcgttcataaacaaacggaagatatctttggctgaaggagatgaccaaggccacgatcttctcggaatgttgcttaaggccgatcagaaagggaattttacggcgaaagagcttgtggacgaatgcaagacattcttcttcgctggccacgagacaacggctttagcactaacgtggacgtttatgcttcttgcgatccatcccgagtggcaagacacgatcagggaagagattagagaagtcatcggagattccaagattgagtataacaaacttgccggtctaaaaaaggtacattaccaaacacagtacacaacaatccacgtgcttaattatacgcatgcatacattatgtttggacgcgttcacaaaatagtttacaatttggcttggcatgttcatattttcttaataaataaacgaattgaatgcacgtaaaaaagatgatattagcctgaacgcctgatactacataagatttcataaaattaaaataaacgaaaaatataccttaagtatactttaagcctaattaattaatactttaatatacatctgatcaatgtggtcaaagtcagtggtcacatagaagtcaaaatctacaaaacgtacaatgatcaaaccatagaggcgcgtcaacgactgcgctgaccaatgaacacgccacgtaatcttaaaaaaactgaaaaatctaagccacgtggcaatatcttctcataatgaatattctatctgtttttattcatgactaaaacgtgtgacacgcatatcatcaatgatacaatgaaatcacatcttttagttaattaaatcacttaacctcctgaatgttaactttgatactaatgaatataacttccgatcattttatgcagatgagttgggtaatgaacgaggttctccggctatatccaccggcaccgaacgcacaacgacaagcccgaaatgacattgaagtgaacggacgagtgattccaaacggaacaaacatttggattgatgtggtggcgatgcaccacgacgttgagttgtggggagatgacgttaacgagtttaagcctgagagattcgacggtaatttgcacggtggttgtaagaataaaatgggttacatgccgtttggattcggagggagaatgtgtatcggtcggaatttgaccaccatggagtacaagattgtcttgtcgttggttttgtcccggttcgaaatctcggtttcgcccggttatcgccattctccgacgtatatgctttctcttagaccgggttacggtttgcctctaattatacgaccactttagattacattaccgcacaaatataaagtttttattttcaagtttaattaggaggatcaattcttttcttcttttttttttttggtcggcagatcaaaatttaactatttaagtcctcgacttttagtatatttgtaaacgtgtcttctttttccggataacggaatacatcatcttttatttcttgtaatttcactgattaatgcaatatacgattttgagactaagattcaagattgtgtgtgtgtgataaaatatgtgttaatatgtaagataaaagatggatgggttacacctaataaataaattaaggtgggtaaattttgaaagtagtagataaatgtaagggcctttaccgtaattatacgaaaggttcgtatcacgtttcttgtctcgtctatgaagcaacggaccaaagtaaagcgtaaatggaaaattcagtttcatgcgaattttcgaatcgtttgctaaattatggcgtctacaatggcgacatggacaccaagctctctccagctcagaattgccctaaatcacggtatcttcaaagctccggagagagcgaagatgaccaagctcagtcgtcgtctccgtatatcatgcgtcgcgcagaacgcagagccaggtcgcgattcgggtgagagtaacgggtcggatcgttttcgtgggtgggctgattcgggagacgatgagaacaattctcgcggtggcgattggtttaaaggtacggactttggttaacttggtagatttgtattcgaatttggttataatattctgcaattttgtacctttttcatggtttgttgaaggaatttgatttttgttcaggaaccttgttatctggagttgctggaatggttttgttcgttgggctaacttacgcagctttatcttccaaacgcaatgtcttaagtatgtgtttcaatcttcatttagtgatacaatgtagttgattttaataatgaagttatcaaattttggtgaatgtttaggaccaaaagtagaagtgatggtgaccacagttactaaaagttcaattgatcaaatcagcacggatgagaatgaaggaaatattgtgactagtcaagataaccaggaaagctatagaggtataaacccgaaccgtataggttaagttctttggtgcttattttatctctcaatgtggttacctgtttaacaagcgttcccttttctggatgttagtttagattcacaagttttatctccggatgaaatagatgttgcgtcaaaatccacgtctactaggaaagacaatgaggaggcggagaaagcatcggtaagctcagcggagagatacacatcatctacagagctggatggagtagatacacatacctctcaaatcccaaacgaaaagcagaaagcccgccgttatacaggaatacctgctccttctacagttccacaagtagattctttaaaacctatctttccaacggttgtggatccagttcaaagtcaaatgtttgcagctttacaagctttaaaggttactgctttcagattattttgaccaatcttttgatgtgtgaagatactgattgcatatttataaaaccctatttaattttcaggttattgaatccgatgctctgccttacgatttatgtacacgccgtgaattcgctcgttgggtggtttctgcaagcaatactctatcgaggtaactatcaaaaaatctctttcctactcttgaaacattgtgaaatatttcactgccttacaacgtgaaaatatcttcattggttataggaactcagcatcaaaagtatatcctgccatgtatatagaaaatgttactgaacttgcatttgatgatattacacctgaagatcctgattttccattcattcaaggtgatcatcgaattttttgtacattcactctgaagtctgaatcagtgaagttatgtttaatctgctttcttcatttttcattggatagtataggtttggcagaggcaggacttatctcaagcaaactctctaacaacaatatgccttcttctgagagcagtcgggttacgttctccccagaaaggtagacgtgctatttattttcacccagccatatacattatacgctattaaaaagtagctattgttatgtgatatccactcttttcatctctttttctccctctgcagtcctctaacacgtcaggatctattgagctggaagatggctttggaatttcgacagcttccagaagctgatagcaaggttctttgtctattcctttctttttcgtttgccacatctagtcattgtagcgtcgtaaaccttacacaactcacttttcttatttcagaaattataccaactttctggttttcttgacattgataaaataaacccagaagcatggcctgcccttatagctgacctatctgctggagaacacggaataacagcactttcttttggtgagtgagattcttgcttcttaagtaatcatatcattagagtttcacaaccaaaatttgtttttaaaagtcttgtgtccatcatctagggcgtaccagattgtttcaaccgtcgaaagcagttacaaaagcccaaacagctgtgtctcttgcaattggtgatgcttttgaagtagttggtgaggagctagctcgtatagaagcagaggctatggccgaaaatgtggtttgtgcacataacgaattggttgctcaggtcgagaaggatattaatgctagcttcgagaaagagcttttaagagaaaaagaaatagtagatgcagtggagaaattggctgaagaagcaaagtcagagctagcgagacttagagttgagaaagaagaggagactcttgcattggagagagaacgcacatcgattgaaacagaaatggaggctcttgcaaggatacgaaatgagcttgaggaacaacttcaaagccttgcgagtaacaaggcagagatgtcatatgagaaagagaggtttgatagacttcaaaagcaagtggaggatgagaaccaagagatactccggttacaaaatgagcttgaagttgaaaggaacgctttatccattgccaggtatagaatatagtatcttgaaagttcttctttctttcccaagcaagatcaaatgagcatgaatagatcttacacagtgagatagaggcaaaacatttcttaattacattgattagtgaaactcaaaaacttttatattgaaaaatgtgacaaatcaaacatatgagagtttagctcttcagattatttactgttttgagttttgtttttgaagggattgggctaaggatgaagcgagaagagcaagagaacaagcaaaagtgctagaagaagctagaggacgttgggagaagtatggcctaaaagtgattgttgacagcgacctccatgaacagacaacaaaaaccgaatctacttggctgaacgcaggaaagcaaaatcatgtagaaggaaccatgaaaagagctggaaatctgattgctaagctgaagaagatggcgaaagatgtaggagagaaatccagagaagtaatttacttgatcatagagaagataagccttctgatatcagccttaaaacaacaagttcatggcatggagaacaaagccaaagacctcaaaatcaaaactaagtctaaagcagaggaagtgtggagacaaacgagcttgagggctgatgagatcagaaatatctctatagtgaaggctaaggagactgtggaagagtttaaggacagagtcggtaaactcggcgagaaattcaagtcgaagtaggtttatgcggtttggttgaagattaagatttgttagataaagatgcaaaacaatgaactgtcttaaattccaaaaccggaaagctatgagccccaacttagatagatgactacactgattatatgattgtggtcttcgccagtttttactactaccaccatttagtctttgaatccattctacaagcaattgaagaataaatatggtattggatcaacttcaaattttgaaacatgataggaaattaagttgagtctcactaatttttcttaatatctgaccatatatttaaaattagttaccaaaaccttggcagtaaatttttagttagatatgataaaagatactattgttttgattaaaaaaaggtagagatgatgagatttctatgttgaattcaaaacaataaaataaatattagctaagatatcacgaagtgataaagatgaatctttgattaaatcacattaaaagttgaaaaacgatatcataagagattttgtgttctctatatgtaacgctatctggcaacattctttctgctttccaataaggttcatgaagaatgggtaacacaatttcgaatgcaacaacgttatcatacggtgaaacgacatgctcaaatccaacttctacgattgcgagcagtttcacggaacatcctcgccttcttgctattctgtcaagattgagaatctcgcacaacttaacaatgaaaaataccaatctcgtcgtttcacggtaggcgggtattactggtatgtagctataatcttgctcttatatattaccatttatgttttatgagacatgtaacacatatagaccatgattttactatgtacacattagctcctgaagggttaaattaaatcttcatcataagaaaagaacatgaatctttcttactttatgcaataatatttctgttaaaaagaaaacctgcaggaaattgattatatatccaaaagggaacgacgaggaccatggaagtggttatatttcaatgtacgtagaaatagacagcacatctgaagtttttgcatatgtcaagttcttcgtctacaataagaaagaacaaatgtactttactattcaaagttgttggtttaaaacatatctatattattcaatatttatattaactatataagacttgttcatttgtcacatatgtcacgttgaattactccattttttctaatagatactgaagtaaagcgtttcaatgctttaagaatggtatggggattctctcaaatgcttcctctccacttattcgaaaatccaaaaaatggatatatattcgacgggcaaaaatgcgagtttggtgttgaagtgatggttgttccaccccttaccaattgggaagtgatgtcttttgatcagaaactctcaccatccacattctcctggagtgccaatggtttctccttattgacagagaatctttatgtgtcaaacaacttttcagttggaggaagagaatggtgaggctaataagtcattgaatatatatacacgtctatgtatgctaagtgtatacaaaataatgtgacttttctataggtgtttgaagatgtatccaaagggaagagaggcagatggcaaatggttgtccttatttctgcatatatatagctgatagtgaaaccttttcggaggatgagaagatttacgtgcatgcagatctccgagtattatacccacgtccacatgtatacaacaatcacgtcacacagaaacgtataattaactttgaaacacaattttctatattcttgaataaatcacttagttgcttttttcaagtcttaactaaattttcaataccttacatatatttatttttcttgcagttaacgtctgttacaagaaatcaactcaagggtggggttgcgaagattttgcggctatagccatcgggagtgtaattacttggacaatgacactttgacattggaggtcgaatttaaagttgtttctacaaccaagtattctcacccatgatctaagctcttcttgtagaatatctacaatattccatattctactacaagtctagtaatctacaatgccttgtttcatacgatttctagtaattagttcctttttagttaaatcaattctacagtttatggttccggattcatttcctgctaactaattatatcattttttataactagtaatcattgaagcttataattgaaatctataactacaaagcctagtgcacttacgtccagaaagccaaaataattaggcttcctattaacacatatatttatatgtttcttaagaacttttacgaaattacctgcatgtagttaaaataataaaatctaaactaattgtgagcacaacaataatccgccacgtcttctaaacctcttccattcaaaactcttcactatccgccacgtgtccccttcttcacactctttttatcttcctccacctctaaaactttctcaccacattttcccgagaaaacaaaaaaaaaaaacttacaccaaaacgatgtctggaggtgtcggtccaacgtacaacgacataaccttacccaaagaagaagaagaagaacatcaaacccaatccacctcaacagtatcatccaccggaaaacccgccggattcttctcattccgacaactaaacatcctcgcaataatcatcgttctctccgcaagtggtctcgtaacaatccaagatttcatattcacgatcctcactctcatctacttcttcttcctctcgaaacttatcttcccaccacacaacaatccaaaccgtgacgctcctctcacaagctccacaaacaaaatcttccgtatctatgttacagcggcggggatcgtcgggcttatcattccgatctgttacatcttcgaaggaatcgttgaggatgataagaacggtgttagcgcagctgcaccgcacgtgtttcttttagcgagtcagatttttatggaaggattagcgaccatgtttggcttctctgctccggcgaggattcttgttccgattgtttacaacgccaggagggttttgactcttgtggagtggattatgagtgagttctcgagggaggatgtgacggggacggtttctgcgcggcggatgtatgccgggaaagttttggcggcggctaatttagggatttggtcgtttaatctctttggtgttttgattccggtttatctacccagagcgtttaagaggtattacggttctgataaggaggattgaaatcccggtttagttccggttccaataaggagagtcaaaacccggtttaattcctttgtggttcacagctcttgttgttttccctttttgttctgtatattatttcgatgttttcttttgaacaattcagtttatgtagtagttcacagttgtattagatttcttacgataataaccgaatctatgtttctgaaagaacagaaatgaaaatgttttagtaatgatatagaataagaccattcacgatctcagttcaaacaatatatttgtatgaaacagtaaaacaagaaataaacaatttatatcaatgtaacaagattagatgtaggagctgatccaagaatattccaaagtttccaactacatgagtacagaagttaactgcaaatcaaagctttaagcttatttattcagtgtgtataagttgttagaacccaaatctcttaccttttttcacgatccatgttcaaggtttgttacttatagggttttatatctctgtctttggtaatgaggaagaagaagaagagatgtcattttaatttggttagctgactccagatcgtaaccccgggaagaaactccagctgtttcctgcaaccttctcgatattctcgtctttcgtgttgtcgaatttaaattctttgctagatccaatcgatgaggaactcagcttctgaattctatgctgttcgttctctctgtctcctgaccttttctctatgtttcttcttatgtctgttgatgaactctcctctgtttcgatccggtcattgttgttcattctgtcgtgtgatcgatttagcttgcttgcaagacaacgtgcaacgtcttcacctgttaactcaaacgaaactctgtgatctgctaccatgacttcagagccatgatccgaatttgccagtgaagcgacctcagagatctgattttgaagaggccatgtggtattgttgggtgttaagtttccagatactatctctggaccatttggtgtcagagcgcctgaagccaaacctgaaccatgcccaacaggtgtgatcgatccagaaccgaacctcgatccccatttacgagctgtaaagtgctcaaaacccaagaactttggaggctcgcctattcgaaactcaaccatgggtgatttaccagggtaaggagaagatgtaccagagtttgaaatcactgacccgggagagattagattaccaccaccaggactccccggacacacctgattagaccgaaactcatagtgcgaagacgaaaacttttgattcatcccactagtactatccctccgagttagctccaacgaagaagtaagcaactgagcaaagggcacttcaggtgaagaaggtgtagttatatggactgatgattcaggaggtggagtatacggtgcagtagatggctcagttataaacgcagagaacaccggaggagtgactggttgagtttcattagcataaggtccaacggtaaagacagattgaggctccttaggcgagaatgtattgctagtaagagaaagtggaccaacaggcgagtgagaaaccgatgaaggatccgattgcaaaaacgaagctggagatgaaggaggagctataaagggaagaacaacagtagttgaagtagctgagttttgaacagtaactaccggaactccagatgtaaccggttcaggtacaagcacagcattaccaatccttttattgttcttctgagttccaaaacatgaatataaactccaacattttccccatcttcccttctgtacaaattaaacacacaaaattagactcatcttgatcccctttagagagaactgtttcaacaaaactttctcaaagtaaaagcttttgataataaagttaatcttgtttagtttctaataagtagctaaacgtttgtaattcacttttggagaaatttatactatccgtggaaaattaaccaaacatgaaatagaaacgcttttaacctttttaatcatggatgctattatgacttgtaaagccaatccacaaaaagattgaaaaagcaacaacgcatctttttacctttttgagaccacaattgtaatccagagagaacaaatcaaagtcgtgaaatcaagaactaagctcaccattagctctgatctagaatcgtaatcaaaatcaaaacaccaaaatcgcaaattcaaatcacattcactacagtttcgtaactatgagctaaatcaaaacagcaaaatcgcgaaattcaaaactaagaacagatcaaattttcagagcaatcattcaaacaaaagctataaatctcggaatcacgatctaaatcaagcaagtaacaatactgatctatgagcagaagaaaaacacatttcaatcacggaaaatctggaagaagaagcttagtagtttacctgagaagaagacggctgtactcgagactcggcggtgacgatggcggtagcggcggcgttaacagtctcaacgctgttattaacaacgttcctcatctttcgaactcagattcacaccgactacaataacatccagatttgcttgcttactactactcagaaaccaccacttggatctactacgcagagagattttcccgagaaaatcaaatgagaaaaggataaataaatcaaataaaaagcgaagaaggttttgtataatgatggatcgaattctctctctctctctctcactcacaccggtcgttatctagtccagcttttcattcaatttcaccacgagcttttgccacgtcatcacattttagatggttcatggttcctttccttcacaccaccacacgcgcttcacttaaaatagttatgcatcatttgggagggtaaataacggtttgatcggtttggttcaatccctagaaatgcagattcaatttttatctacatacatagttactaaaacttgttaaagaaattctaatatattggttgtgaacatatatttgtctctgcattgtgggttttctcaaatcaaagttccaaaaagaaaaagggtaatatctagaacttaattttttttggtatatatagactagtatcgtaaaatactaacgttggccaatgtctatatgtaggtgttttttttatagaataattattggtcttcaaatgtacctataaaatggatgattctatacttgttcaaaggaaagaagaaatatattagaccatggggaagagttgacccatagcctttatgtacgcatatgatatggggaccgatcaataagtgagagaggtaatataatagaagccgcttcatcattggaactcccatgtgacctcctctcaagttttgagcatttctttaatctttttataactagagtcacttttattaatttcttttgaatgttcttctctactgttgctatactattctctaattattcacaaatagttattattagtgttttcaatatattttgtatccttaactttgtaactatttatgcccattaagtaaaacaaaataaaataattggagaaaggttggtaacaagaagaattaagaagcacacgtgcgcagaccatcttgttgtgtgtgatggctttttgagcaaaccctcgtgcgtgtgtgtggctgccactcctttacctttcttttctacttttgttactttcttctttattaagtctctctacaatgaaaactaattattactctttctttttacctttttaggatatgaaccatgttgacatcagtcaaaactaagagtcttccctaattaattatgttgtttaagttcaataccaccaatcaatacatgaatcaaattggttgtgtatctttataatactcaacttgtttggtactgtatcattatcgagttaagatttctaaagaataactaaactaaaactttaaaagaagttgttgttgttgaaatttatccctatgattcgacgtttgaggaagaactataaacacaaatctcacttgttactcgattcgattgagaataaaagaaaacccgaaacagaatggaaagaatactatgatacttgcacactccactatgtttagagaaagtttatccaagagaaagagagcaaccaaagaactcagctcaggcccaataaatcaagcccaaattaaatatcatacatttttaacggcccaatatttctgtgtttgcgactatctcattcagattttccaaaggataatttagattttctctgttttatctttttgtgtgtgttgttatttcattttcaagctctggacatttgattggtgatgaagctgagggagtgaatttatggcttaagatagtcttcaaagctacatacaaaactatattacaatttcgaagctgcccatggccatggcgttacagattatagcttcttcttcttcatcaccaacgattacaaaatctcaccttttctcttatcctcctctgcaatctcgttataaagcttcgaaacctaacctctcctcatggttttctcttctgggttcttctcgtttctctccttacattggtttaaagcatttgggcatctcaatctcgccgaaatcttcaaacccaggtttcgatttcagagatatgattgcttctttacttctgggtttttgtaaagttgtttaatttctgaagttgggtggttttttgtgtgcagagaagaagagaagatgtaagagtatgatgattcgtgcgtctctgtttggtgttggagcacctgaggctttggttattggtgttgttgctttgttagtctttggtcctaaaggtcttgctgaggttagtgtctttgtgtgtgtaaaatttcttgatgattgatttggaatcatatctttttagggtttaagcaacttatgaattagtactgtttagtttctcttatgagaattggagtatggtgtatagttgaggctagagatagatgaccttttggcttaatagtgtttgattctctgtggatttaaaatcttaacttggagaaagttcgacgtctatacggagccatttgagagtctgagtttgggaatgagaagagaaaagagctcaagatatcactgttgcttctccatatagtcttttagagttgttttagctctttgaagaagtgttttacttgctatgatccgtgcaggtagctcggaatcttggaaaaactctgcgtacatttcagccaacgattagagagctacaggtttaatttctatctcaagactttcagaaattatgaggtttgtttgtatatgttgtgcctaactgtttttgtttgtttacatgtcttttgttttaggatgtttcaagagattttaaaagtacccttgagcgtgaaattggccttgatgatatctcaacgccaaacgtgtacaaccaaaacagaacgaatcctgttcaacctcctcctccaccaccaccaccatcagttcctagcactgaagctcctgtgactgcaaatgatcccagtgagtggtctaactatactatgcgcgcatatgcttttgttcttcttcatctttcaccaaattcacactaaacaaagttaacaaagatactgtcatttggttctggaaatattagattctatttgccaacagaataggaagcatgtgctaggcatttgattgagacatattaaaaagtagtttgattcctctagatcataagctcctcaagcattggctaatctgtaacctactgtcattgttttaatgttttctatattcatcatattcatgaaatggagtagtgaacctaagctaagatgatttcattgaaataagcagatgattcacaatcaccaaaagcttacacatccgaggattacctcaagttcactgaagagcagctaaaagctttgtctcccgctgaaagccaaacagaggatcaaactcagactcaagaaccgccacaacccacaactgtacaaacacctaccggagaaagccagcccaatggttagccttgcttctgatcagcaaattaagaactctctcatcatcttcaaagttgtctaaaactcggttgttgcaggtacagcgagagaaacaacagctgcatctcctccaaggcaagattgaaagcaccaaaatatgacttgtagtgttaaaaagcataagcctctctatactgggaagctgctgagggaatttttttgatctgccaaaaaggacgaagctattagctctcaggacattctcgcaaagctgtatgtgcatcttgataatatgtctgtgtatttatgttacattagattctttcttaatggtaattgagtttattaggtcaaagcttggaaaataatgaaatgagtataaattattggctcttgctctcatttcatcaatattcagagtttaatcactggatctagaaatttcatgttttcttttattaccatttctcttccatattggttaaaaatgatgaagtaaaatacattttttaaactatcaatgacaatgattgagtgtctttgttgttaagaacaaaacacacacaatggttctcaaaatacaacaactgatctgtcatcgactgcaaaatctttcacacttgaagaagactcaattctgtttgtagctttcttggcctatccattaaaatacacgaagaaaacattaatcataattaatctaagatccatgcatagcttttataacaaaaagatatttacctcttcatcccaatttgtaaaaatagtgacgaggccaagaccaaaaacttgaacaacgagggcacatatgattccaagccaaagccccttaaaatttaacattgttgatatgtttaacgttgacattataatcagttaaataaaaaaaaaaatctgattaaattggggtagtttcatttacccgaccaccaacgtgaaagtgaaaagcaagtaacaatcctgaaggaactccaacaagataatatgaaccaagattaatgattgctcctatcttctgccatccacatcctctagcaacccctgattaattaaccggaaaaacaaacataaccggacttaaccaagtttttcatgattagtgtatttttaattgtctttacttgcaagcaaagaaagaaaaagaacctgagagaacgcattgaagactgtctagaaaatttcctaaggcgagaattggcatcatcgaggctacgtagctgactacttctagttcactactataagctaatccccatatattccttatcaatatcaagactgatccgatcactatactttctgctactgcaatgcaaatgaccacacgcaccgcaagcttagccactttcgggttacccgctcctaattcatttgagatcctcgtgctgcaccaatattaaaggaaagtcaatggtctatcatgattttgatgtaaggttacatgattcaagttatataagtttaccttgcagcgccacttagaccaaatgggatcatccacattgttcctgatgtattaaggctgcaaataatttctgactaaactcaagaacatgataaagaaaatacacaattattcatatgcattgttctaaccagattgagagaacagaagtttctagaaccgggtttggaagaagtcctgataagagaactaaaagttcaaaggaccacatctctaagctgcactcaaacaacattacataagaaatcaagatagctaattaagagatccatgtatttgtaacattgattcatatatatgtattaccagaccataagtgcagaaggaacagctagtctcagaaaagggaggatatcgcgtagagcctccttagagaaaccggtccaagttagtgagcaagaaggcgaaaacttgacgtaacagaacaagagaacgacattaagccaatacgaaatggagttggcaagagcagctccttgaaaccctaaaccagatttgaaaaccaagacccaacaaaggaggacatgtagagaagttgttactccagagcagaaaaccacaggaaacacattgttttgggcctgcaagaacctgttaaagcattgaagaagaccgtaggcgaagatgcttgggatcatgaattttgcgtaggagccagcgagtgtagcaatggatttgttttgtccaaagaagacgagaaggtgctctgtgttagcccaaatgatggagagaggaatagaagctagtgtaagaacaaacatagctctttgcatttgtattcctaacattccgtacttctttgctccgtacgcttggccacaaagcgtatctaacgcacttgctgttcccatctgttcatgaggaaaatggaaaagtgaatcagtgtagtttcttgcttcacaagtaaaaacgtacaacccaatttttaaaactttcaattgaatattaaaatttggatttgttgacatcgttcaatgttcgacaagtggttttcaagttcaaataagagccataagcaactgcttaaagcattcatttttgtttatacaagaaaaacattttgattttgttattttggcgttttcacttctcgatctgtccataaaatggcaaaaatgtattttgttttcttgtcgcatgagtggcagaaaagatgcttacgcaacttggatattcaaataaggtggcctgataactgataaagtgatatgtccatcataggtgaggtgaataatatatatttctttctaatgatatataattactaatacatctctttttagagataaactaattaaagatttaaagcactatatattacttgcacacaaaaaaaaaaactctacatattaaaaaaatccaaaggtttgcatatatgtataggaaaaaaatcaaaaaaaatgatattaattaccaaatcaagtttcacattcagacatttattcctaatatcctaaatttggaagatttttttttggtaaattaaattaaagattaagatacatggttaagaataaattgatatgggaatatgtaatttgtagaaagacagagagagtgaggaaaaactgacgaggaagctgaaaccggtgacggaggcgaaagaggtggcgatggatgcggcggagagaggaagagagccaagatggccaacgaacatgacggagataacttgtagacaaaactgaagaagactcacggcgatgagtgggcctgaaagccatagctgcttcttcacttcttccttgacactacttttctctccgatcaaaggccatgacaaatcaccctctcctctttctctgtcgtccctcatttttttttgagaaatagcaaagctatgacaaagtatcttcctatctttaagggctttgtgtttggtccggtctctctcttctctctcgctttgtccctattgatgtgtgatttgtggtgtgtagggattagtacttttttattttgtcaactttataaatagagtgaatcattacttggctaataatgaaaaatcaaatggattttattccttttaaaatatttattggcagtcgcatacaagagcgggttgaatccagaaaacattggcaaatctattattaataaaatttaaaaatataggaatttgataaaatttcgttttattcggttcggttttctttgtaacactaaaattgcaaaaaaaaactatcatttcaattttataaaaaaaatttcaggtttgtgttctataacttcaaaggtaaaatctaaaattgtcgaagttggtatgtagtattcaattccctcataaatttgtatttttcttccagattctcgatgggcccggcaatggtaaaatgttatgcatcaaagaaacaatgtgtccaatatgttcaaagaagttagaatatgttcccatatagatgtggttttgcaccaaatggtaagagaatatacattcttcatttaaacacaagcgtagacgttgttgaaactctaggcatagactttaagaccgtttctatcacctctctctcttcaagatggaaggttgatatctctctcttcaagattgaagattgaaaatgttcccatatagatgtgactgtcactttctttaaacactttgcattagcaaaaatgtatcttatgagctgtgtctcttcttcgtttcctctatatccatgccacacaaactcctcatctaaatgagccgacaagcatctgggaacagtaccttggttggtaccatgacaatgggagatttccgggtcgatatccacttacctggatgcaagtacataaaaatctatgaggtggaatcaaagaatcagtttatacaacaaggagattgcgttgttacttgttacttacagaagtgatagcaagaaatcttagtttaggagagttgttgagaattagtggaattatatccaaccagagatggccatgtggacatatcactaattttccaagtcgagtgaaggtaaagccacgaaaatccagagccttcaatgactaaatcaaaagccaatataaatcaatgtgatcaaacctaacagccaagaagaaaaaaaacaataataataaaaaggatagataccattggatcttccaaaggtaacacaagatacgtgaccaaggaaatagctttgagaaacttgtcatcagtatgacatacaacgtcgatatgtggcttttcaaggcgaagcttatgcaccttcgcgaaacggtagtcccggttatcactgatggcgaggcccactttcgatcgggcaagaactgagcaacttgatataagcctctctagagaattttcatctttgaacaccacataaaaaaggcgtaatatgttgagtgacgggaggcaaaccgaagaaggaacatccactataatcttgtccgaaagagtcaattccacaagtgttttgcatgtgtaaagactcttaggcaagctggtaggctctgccgtccagtggagctctaactctagcttgcgcacaaagcgatcaactgcatttgcaactaatttcccaacatctacctcaatagaaaatttttaccgagttggatgcacaaagtttctagaaaaggtgccttgtgaagttccaataacttttcaagaaacttccacacgctttcgcattcatcaccaggatcactgtactcgagtttaggcaacaacgtccagacataacgccatcgttttgacaatatcattgtcccaactgcatctttgatcggtacaagcaacaaaatctggataagcaaatcgtcgggcaacgaactgatctcgtctctagaagcaacaacctcttcatcaattctttgacaacgttcggccattagtgatgtaatagctagctgagtttgtgataaagatttcaaatataggtaagcagagacgaggaggagcaagtcgaaccctaaaaactttagatgatcgagaaccttagatatattcgtaatttctctatgagaaattgagaataagtgaataactaactcttcttgtctcacaaaaataaaaccctaacttatcttttccgtgagacataaacaaacccactttgggccaataaaatcggcccattattatcttgacccaatccggatcaaacccaactccatactttggagtttggacccatcgttaccaatgtagtagactaatgtagttaagatatatataatagaagggcctatttataaaatacaagaaatgttaccaaagcataaaccctaaaagccctaaaatcttaatatataaaccaactcacagagactctaaaatcagccaccaccgcacatctctctcctttgccctcgttttttttcggttctcgtctttcgttcttcacttttagacaagcaaatatgagacccccagttacaggtaagaaccttagttaaagtttatgtctttcttgttctgtctgcctctagagtataaccctgtccgtatcaaatctgaattcgtatcattacggtttctgtagtttgaattggtagttagggttttaattcatgagccttttgtatcttcactgtttcaataaagttcaaagataaaagtagagatttttaataacactctgttcttccgtttagttaattttctgtatgttggtattgttataatcaggaggacgtggtggtggaggattcagaggtggaagagatggtggtggaagaggttttggaggtggaagaagctttggaggaggccgtagtggtgacagaggccgtagtgggcctcgcggcagaggacgtggtgcgcctcgtggtcgtggaggaccacctcgtggaggaatgaaaggaggaagcaaagtgattgttgagcctcacagacatgcgggagtgtttattgctaagggtaaagaagatgctcttgtcactaagaatttggttcctggtgaagctgtttacaatgagaagagaatctctgttcaggtatgaagtttgaggattgttttctttataattaaattgagtttgtttttgttcttatattatagctacttcacttttgcagaatgaagatggaactaaggttgaatacagagtttggaatccgtttagatctaagttagctgctgcaattcttggtggtgtcgacaacatttggatcgtaagtccatctatacacataccacattgactctgttttctttttttgtattgaaagacatgtgcttgaattggttctttgttaaaacttttgtagaaacctggtgccaaagttctttacttgggtgctgcttctgggaccactgtctctcatgtttctgacctcgttggccctgtaagtctttcactaaattattattttagttatccgtaggtccatttctatcctatgtttgagacttatctttgttctattgctttatgatttgtaggagggatgtgtttatgctgttgagttttctcatagaagtggtagagatttggtgaacatggccaagaagagaactaacgttattccaatcattgaagatgctagacatccggctaagtacagaatgctcgtgggcatggttgatgtcatattctctgatgttgctcagccagatcaggtttggttctatatttcttactatgaaagtttgaagttaccctttctacagttttattcacaaaggttacgtcatattgcattgcatcttttgcttttaaaatatcagttcattgaaatcggcatatgatgacatttcatttactatgaaatgtttgaagcctttttattttacagttatatcttcaaagtttttttttattgcattgcatcttttgcttttaaaaaaatcagtacaatgaaatcggcagatgatgattttacttggattccccttcagaacatttatgggtgttgcaaactccaagcttctgatgctactttgtatctttttactaaaattttttactttgaacatgcaaatctgttttaatctcaaagtttttatttgtcttcatttggtatatcttatcgatttggaagaagtcttttcggtttcttctggttttcaacaattgcattttcaagtcatttagaagttttactttattactaaacttggagactcaattgttgtagcaatattgctgagctagcagagattgctccaagaaatctgcaatgattccataaatgtttctatgtttatgttaatgtctctctttattctcattttggttctctgtttatgttttatttaattgaatccatctatttgcctaactcttgaaggcaagaatcttggccctgaatgcctcatttttcctcaaaactggtggacactttgttatctcaatcaaggtcagtgctcttatccttaatcaaattcaacaatgttctcctctgttattattcaatttgtatttccgtcgctaaataaacatgtctcatctgttcaggccaactgtatcgactctacagttgcagcagaagcagtcttccagagcgaggtgaagaagctgcaacaagagcagtttaagccagcagaacaggtgactctcgagccgtttgagcgtgaccatgcctgtgttgttggtggttaccgcatgccgaagaaacaaaagaccccagcctcatagaggaactgtggacagtagtgcctgtgtattaagacttatttactgggttttgtttttatctccttgcttgttgtattaagctagagatggataatgcttttatgtctcatttggaaaattttatcctcgttttagaactaatatatattgatgcaacattttcgtccaatgattgtatctccatcagtcttttctatgcttgtttttgcttggctataagaactactgtccattttaatcctacttgtttctgcatgctgaattgattgttgaagtagtttgttttgaacatgattatgctcaagaaaaggcgtaaaagtatcacttagctctgaaaggaactcatttttttttggttaataaaattttaaacacaaacaaaccgactaagtgttattgacataagtctcaatacagtttcaagtaatattcggcttcttccactattggatcaaagttataggcgccttcttccatcggtagcgcatttttaagtattgccaattggcgtgaccaatgaaaatagtaagtttcaaaagaaaacgggtaatcagcagaggtagaatcattgtggcgtctcaaatctttaattttctcaaaacaacgcttctctagattcccgacaaggttgatacattggcgtaaatcgaggtgttccaggtgaggacaaccgtcaagaatggcgtttaagcctgttttggttagtttgttcccacaaagctggagatggcgtagtttaggcatgctttctgcaattgctatggcatcatgatcatcatcatccgaacttaagtaaaagaggcggtttagcatcaatgtcttcagatttggacaagacagccctgcaagtttcatagactctcctgacaatgatattcctgaaacctcaagctcttcaagcattggaagtttcacaactgcttgaacaaatccatcgtctgttatttctgagcacattagtctaaggcttctaagattacttgacctacaagtaatggtgtgtaaaaagttataaatcataatcttgagatatctgtttttaacagacacttgaagacttacatgaaaagtaatcaaaagtcaaaactagaattagaggagaacctctccgcgatgtatgtaaggagagaatcactcccgaagtccccaatgttgatctccagcaagccaccctcgctacgatcaacggcgttacgacatatcgcctcaggattgttcaccagtactggtttgttgtaactcaagattcgcatgtcgattttacgccatatggatgggtctttacaaacatatcgtcacgatctacacactttctgagcgttctccagtatctcagtcacgctaagacgtagcagaatcaaacacatcaaatccgtcggaagatccgcccagttttttggctcttcgtttttcatcagtgaagacagcggatccatttctgatgaggatcaaaatgtcaaatctgtgaaatatatatatcagaaagtcatttagttttaggccttctttgattatttgtagattctaagtagtttttggttttagttttaggccttgaatggtagtagattctaaaatggtttctagtttgcataaaaaagtttcctgaaaagctaagaaatctaaatttttaattttttattaattaatgaaaagcaaaaaaaaaaaatctatttatgcaaactagacaccattttagaatttacaatcattcaaggccttaattgtttattaactaatgaaaaaaaaatcaattttatgagttttttgtccaacttcgtgtgattttttttcctcttcttgttttgtttaaactaatgattgttttggactttaaagtcagaaggcatctctgattacttgatctgcaatataaagttataacaataagatgcaaaattttacaatctagtccttatggcactaagtttacgaaaacaattcatgtctaataagcccattacctgaattaattattgggccttaagctcctaatattctgaccttttgtatttcaaaatcatgtattccttgcataacaagaaatctgatggtggtgattcgataaaaagagttcgataggatctgaaatcttcctacaagaagtaaactgtttaacagaatttgttaaatgtaataaataaaaacttttccatatttatcggaaaaataaatggaacctttccagctttcctataccaactccaaattccaatagataaacattcttaaaccctagcaggggctcgataaaaactaaaaaataaaaaaaccaaacacgaaagctgcaaacatcgattaacatcaaccttctctttgttgctttcgctctcgctctatagcaaagatgaaacctccccaaagaggttagaaccctagcagccgttttgttttactacttgtttaatttctctgttcgacctatagtatagggttgagggttgttaactccaaattcgttttgtcacaatatatctacctgaattgcttgttacgtaaactgttttgagtcttcacttcttcaatccaagtttaataggagatttaataatactctcttctgattagttaatttcggttttatctgtatgattatgctcaggacgtggtggtggtgttagaggtggaagaggtttagccagaggcggtgaaggaagtgccgtaagaggcagtggaagaggcggcgaaagtggccgtggaagagggcctggaagagttaaaagtgaatcggacggtggaattaagggaggaagcaaagtgttagtgacaccacacaggcacgcaggagtgtttgttgccaaaagtaaagcagatgctcttgtaaccaagaacttagttcctggtgaaatcatttacaatgagaagagaatctttgttcagaacgaagaccgatctactgttgaatacagagtttggaaccctcatagatctaagttagctgatgctattaccactggtgttgataacatttggatcgtaagtcccataacttaaagtaacaatctcttttattcttctgttaccgaaactaatgaatacttgtttcttgaaattgtagaaacctggtgttaaagttctgtaccttggtgcttcttctggatacaccgtgtctcatgtctctgacattgttggtccagtaagtgaacactaaaccttaaaccctaacttttaagattgagtgagtgttttctctctatgttacttatatctagcttttctgattggtaggagggatgtgtttacgctgttgagcattctgatatttgtggtaaagttttgatgaacatggcggagaagagaactaatgttataccaatcattgaagatgctagacatcctgctaaatatagaatgcttgtgggaatggttgatatcatattctctgatgttaatcaccctgagcaagctaacatattaagtctcaatgcttcttatttcctcaaatctggagggcactttatgatctctataaaggtttgtaacaaaacttttttgaccattgattcaaatcaaaatcattctctttttagtgtgcattgtttggttaactctaagttacttgtttcaggcgaattctatagactcaacaattgcagcagaaactgtgtatcagatggaagtggagaagttacaaatggaagagttgagaccaacagagatattgcatcttgactcttgtgaggaaaagcatgcttgtgtttttggtggatatcgcttgcctaggaagtaaaaagctgatactgctatctaattaggaagctgatactctttacttagtttgtgattgttaaaattcatacacattcatgaggctttaaaattattatttttctctgattctcactgtgatttgtcttctaactagtatgagttttaagaagttgagttttgcaaaaacaaaaggtagaatacacatacattttgagttgaattctagtatttatattttggtttgttttatcgaacgtggaactaacacaacgttacattgaagaatcattcattgtgatttgagattttcaatgtgattttaaaagtttgttatcgataatatgattttgtggaagtgtaatttcaaatttgtagacagaaagtgaaactctgcttgttcatcaatttatgtttccttagacataattgataaatacattgttttgtgtttatgacaaagagaagacgataattagctgaaaataatcacattattcaaatatgttccaaagaataaaatttttgcactatttgctattttcagttctgccttctaatagattaaactttcgtaatgaacttcatccttgaaaatttaagagtaaatttgaaattggtcatcaggtcatgtattaaagggaaaaataacaaaataaaaatgtcagaagtgggatttgaacccacgccctcttacgaggaccagaacttgagtctggcgccttagaccactcggccaccctgactttttgtttgtataactacactaaacttaattgacatagattaaacggatactaatgcaaaatatgaaaataggcgcaatatcaatgtctgcttgagctatatcatattatcattgaaaatagaccaattggctgtaacattgaaaataaaagaaataagatggctggacacgtggaaaacaaattgcaaaagaaaatgattgaaggaaatgtgtggattttcgtgtgtcgatggtaagcttctatcaacttcatttataacctttttcttatatgggttaacaataacacaagtaacatgttcaccaattatttgttctacaaaaaaaaactaacaatttggtaagtttagaaagagaaccagaactaaccataatcaattctaaagctataccgtttaaactgactagtctctcttctcttttgatgtctcattctgcaaaattttcattaggagaaacattcagtttttagactattagtacacatcatatacaatctatctacattttgtaaaactcaaatgtgttaattaatcagatctaactacatttgtaaattatttatgctctttatacattttcaaaatgtaaagatccacaacaagaggaatgggtttgttcttagtcctattccccgaccacaacaacaacgactcttcttcttattattctccggcaaaaactaccttccgctccaaattatcctctcgtcttctcctctccaaggctgaatccacaatctcaagctgcatcatcctcctcttcctcactctcttcctcttcactctctctacattcgaagaaccttcctctcgttttcccgccatttcttctcctcactggcgatttctcctcaaccgcaacatcatctctcgtcgtttcgctctacaaggaatgggtactctgtttctaagaggaaccaagagcatgcacgatttaatcattgctcatatcgcttccgttacaacggagaacgatctccgtctctttatacggttgcttcaccgctccggagttacttcaaaatccgacgtcgttttactcttcaattcaccttcatccactacaagattcaccgagttgatcgaacaagagaacaactcgttcttaaagctcgttcatgttcatcggaatgattcgatgacatcatcatcatcatcatctgagcatgttatttgggggaagaagagtcgtcatcgagctaattataactcgaacgagctgactcatggctcgatagttggtttcgacgtaactgagttggatcctgaaaactctttatccgggtttatggatcaagttccgttaagctt

SEQ ID NO: 884 - DNA, 18384 bp, Arabidopsis thaliana
gaggagatgggcttgttacccaatgcttcttggtcgagtacgacgcagtttcaaacacgttatgcttgttgacgctaaaacttcatttttcatcggtgacccgtttacccggattcgtaaccggagccccgactcagtcctcttcttcttctcaaaacacaagaacgcctccgaggttaatccggagattttgatcggtggagctaaaggaatcaggagattgtcgagctccatgcatactgagattgtgagagcgacgatgatgaagaagaactcggttacggaagtaacggaatcggttgtgttgagtcaactcgtcgggaatgttcatatgacgaagaactttcaagtggttttaagtgagtcagtggtgccggaagcgaattagttattatgaaacgtatttgttcatgtttatactgttattatggcgataattatgaaacgtatttgttcatgtgaattggattcttctgtctacgataattaatgttggcaatatttttttaaaaaattacaaaaaatatataaaatttttgtattcatttgacatttgttaggttcttgtttttttttttttttgacttaaaaatctatctattccacttacaaaaagaacaatgatattgttgtatttctctaattatcatatcatttagccgttatcgttgttaaataattttctttcgtgtaatgaaataataactttcaacttcaaagtccaaactatctacgtttatggaacaaaaggttatcgccatgtgtgttttgctcttaattttcggtgatatataggccaaaaatctacatactttaattgttgctcgcataatgatatatttgtctacatatctttaccaaccaatattaacttaacatgcatgaagaagattacgatatacacaaaatacaactaaataaagctggaacttcttaataacagaaaaagtaatggttggaactccgtatttgtgttaacaaccccttattatatatggtggagaagaatcgagttaggcaaggcataagtaggacacgtgctgatcaactatgctaatttttttcacaaaaaccattaagaaaaataaaactaaagtggtcaagatttaaaatagaaatttaaggtggaaagtattattggtgatatagttgctaagcgaatattttactcattaggtttttgccttcacgcaacctaccaagaaatgtcaaaaaaaaaatctgtggttttatttatgctaagctgtgattttacatcattaacgaccaatccgtatgtaaatctatcattgcggacaagagtttaatgtaaatatgcaaaacagaatttgcattatttaatggactcgaagctgacgaattctcttcttccttttgtcgtctccaattttcatgatgttccctagctattttcaacataacacgcacaaaattaatgttttactgtttcaactcaacgaaattaaagcgttgttaagaaagatgtacatgttgaaacgtttgaattaaggaaagctaaaaggttaacgaccaattagaaatcgattttaaatattatttcagttttcttaatatatatttaatgttttaggagaaaagatcatcttctctttccaacaactatgtaatagtataagaatatattcaatttacatatgtcaataaattacatgttccttagctgtcaataaatttttagttttcacacatattaaaaacatactaaaagttgattataaatgtattgtttttttggtgatattttctattaattataaaccaaaactatttaagtattttttcttgaagtttacaactcattttatggtttgtatgtttaagacaactttttcctagaatatacattattttgaaacagaggtaatgttttttaccaaaattttattttgtatattatttcattatttcattagtttttttgatattttatttacaccatatcatgtttcataactaataaatacaataaaattacgccttactcgaaattcaatatcccgtagaatattatcagccggatcacattatgaattatatgttgaaaaatataaggatcaacaatatcatatttgcatttatgtttctagatttaatatttgtttgaaagacctaaataaatctataagaaattgattgaaatgttcaaatcaatagcatctcgagactatgttaaatatacgtcaaaatatatatatccaattaagtacatcaattaattacatcttgagacatataagtttgtggttcaaaccttttcttagaaagtgcatgaacaaacctataactcttttagtccccctgtgcccataatttctattttcaattgtttctaaatatttgctttgaatattaattaagtagcttttggattttcgatagggccaacaagttgttaaaagtggcaatttgcttctacaagtttgggggtccccttcgttctcataggcaatttgaaacctatttttattttattttatttttgtaatccattttcttctgtgttatacatattttaaatacgttggcaaagttatggaaggtagggctattataaaataaaataaccaattattgtttgaagaagaacgaaaaaaatgagagctttataaaattcgagatagcttagtatatgagtattatactatagtgccggcgatcctttttttctttcttaaaggtcaacctgattatgaccataagaacataattttcgtgctgatggctttgaaaatgaattcttgcaactcgaataagataaaatccatgcaataaaagtgacgaatataaacacaatttaatagtttttcgttatcaagaaaattaatacggttttccaaataaaacacgttcgcttttagtagcctgttttgaattgggattaattagttttttttttttttgtatagaactacaatttaacctttcgcaaaaaaaaaaactacaatttaaaagttgcatggtgacagtgttttatgttttatcggaagaggtaaaaaagaagggtacgaacggaaacatcgcacttgcatgtgaaaatctgatgctactttgtaacccaagtggcatgtttttgttattttctcctattttctagggctttattttaagttcaatggatacgccaaaattgagttcttcttcttttttttttgtcacggaaatttcctaaaccatatatattacattagtaagtggagatagattaaatgttaagttgtgcaaaggaaagaaaagattaactttctttatttcataaatagaattgaataagaattatttttctaagatatggaaagttggaaacattgaagttttaaatcaatgaatttgaagaagaataagtattaaagtatcttgtttgttgaatttattattttgtgttgtgttttatattgtagaattaatttaatgataattttaatcatctaaatcgaataaaattatcaaaattattataattatgtcgaaaatatatgttatcataaatttaggctatgaatagtgacatgcgaatatgcattggagtgtggtttatctacattatccgcattttgtaattattctgtactttttatttatttgtgaagcggtattcaacggtgatgtgcggttcaattataatcaactgccattttttaaaaactattgtatgaattgtttttttcaatgaatacaactttgtttggaggaaaaatcaatcatccaaaatgataagtaaaaaatattcattataatcgtcatttaacttttgttttgttcgatctgctgacgcaattttcacatttaattcacttgatctatttgacctcgtgttttgaccgtctattctgttgtctcattcgagttttttcgatgatcaaattttttttcaattttgatgagactataagaaaataatctaaagtcataagtttattcaaaaaattaacaatcaagaacataaattacaaactcacagttgtttacagtaatgttttgaagaaaacggatatttcaggacatacgtaatattcctcaaaacttatctattttttaatgagatcaaaaatgtaaatttcatgaattttaaatactgtacagagtatttgttaccgtaattgtgactatagagttactcgaatgtaatttacagttgtcgattttattaatttctttcataatggttactaaataatttaataactcgaattcaattacggtaacataaatattcgagaacttacccaagttaacaaattaaggaaagcaaagaaaattatgcaagtaagtgaccgacacgtggcctatgatcctagtgagattagccggtaatcttgtgaagtaaaattacacaaaaagagttaaaaaagaaaggaaacaaagggcatccacaagcccaagcactgaaaatatttggaaaagaccaaactcaaactcagttacatacatacaccacacagagtttataacgtaacagactgtgatcacaatccaacgccacagatctttccattaacagacacgtgtcgtaatcatagctcaagtttcgtaaatgacagaaaacattcggttagaaaacggtgatgaaactattgccgtcgaaacaagacagatgcaggtgtttgggagtctcaacaacgaatcctcaccgtctgtttattttctaaaggttaataacgtaaatttaaatatctaatcggacggttataaagcctcttactctttccttttatatatcgtcactatcacctcaaaatgccataagagaaagcaacttcttcttttctctctctaaatttctcagagtatctaatctctctctcttctctcgttccatattatcatgcgtttcataattcagtaaattttttgaaatctgatctgttctttctgaagcttttgagagaataataaaaaatggaatctggtttctccggcggtggtggtgggtcggatttttacggcggtggtggtggtagatctatacctggaggtccaggaactgttatcaacgtcggtaacaataatcctcagacgacgtatagaaaccagattcctggaatcttctttgatcagatcggaaacagagtcgccggcggtaatggattctccgggaaaaggactttagcagattttcaagcggctcagcaacatcaacaacaacaacaacaacaaccgttttatagtcaagcagctctcaacgcttttctttcaaggtctgtgaagcctcgaaattatcagaattttcaatctccgtcgccgatgattgatctcacgtcggtgaatgatatgagtttgtttggtggttctggttcatctcagcgttacggtttaccggttcccaggtctcagacgcaacagcaacaatcggattacggtttatttggtgggatccgaatgggaatcgggtcgggtattaataattatccaacattaaccggcgttccgtgtattgaaccggttcaaaaccgggttcatgaatcggagaacatgttgaatagtttaagagagcttgagaaacagcttttagatgatgacgatgagagtggtggtgatgatgacgtgtcagttataacaaattcaaattccgattggattcaaaatctcgtgactccgaacccgaacccgaacccggttttgtctttttcaccgagctcttcttcttcgtcttcttcgccttctacagcttcgacgacgacatcggtatgttctaggcaaacggttatggaaatcgcgacggcgatcgcggaagggaaaacagagatagcgacggagattttggcgcgtgtttctcaaacgcctaatcttgagaggaattcagaggagaagcttgttgatttcatggtggctgcgcttcgatcgaggatagcttctccagtgacggaattgtatgggaaggagcatttaatctcgactcaattgctctacgagctctctccttgtttcaaactcggtttcgaggccgcgaatctcgccattctcgacgccgccgataacaacgacggtggaatgatgataccgcacgttatcgatttcgatatcggagaaggtggacaatacgttaaccttctccgtacattatccacgcgccggaatggtaaaagtcagagtcagaattctccggtggttaagatcaccgccgtggcgaacaacgtttacggatgtttagtcgatgacggtggagaagagaggttaaaagccgtcggagatttgttgagccaactcggtgatcgactcggtatctccgtaagtttcaacgtggtgacgagtttacgactcggtgatctgaatcgtgaatctctcgggtgtgatcccgacgagactttggctgtgaacttagctttcaagctttatcgtgttcccgacgaaagcgtatgcacggagaatccaagagacgaacttctccggcgcgtgaagggacttaaaccgcgcgtggttactctagtggagcaagaaatgaattcgaatacggcgccgtttttagggagagtgagtgagtcatgcgcgtgttacggtgcgttgcttgagtcggtcgagtctacggttcctagtacgaattccgaccgtgccaaagttgaggaaggaattggccggaagctagtaaacgcggtggcgtgcgaaggaatcgatcgtatagagcggtgcgaggtgttcgggaaatggcgaatgcggatgagcatggctgggtttgagttaatgccattgagtgagaagatagcggagtcgatgaagagtcgtggaaaccgagtccacccgggctttaccgttaaagaagataacggaggtgtgtgctttggttggatgggacgggcactcactgtcgcatccgcttggcgttaacttcacacactcttttttttcttcttattattaccatattattattaattttcgagattattctgatattattatcattgtgattttccatttcgaaaagtgtaggaatcttatgtaacaaagaaaaaaaaaagacttttatgtttttctaataataaaagaaagagtgattgggttctttaatattctatattttgtaatatatcttagaatcacgaagatatcatagaatttatgccttaaaaagatgtaatatctgaggaaattttgcaaaagaatctcgcaggtggagcaataacaacttgacaaataatgtgattcttagacctcatacctatgaattattttattagactattaacaagtgaattactacatggtattgtaacttgtcatgttggatatgaaattctttcttacagataatcatattgtatatatgcgtgtgataaaaatttatgattggactcagttttaacgtgagtgaatgtgttggtgagaatataagctaaacaatactagtatacttagaggaaacaatgtatggcgacttttgtggtcatggaccttatagttcaattattttaacactaataaaagttggcattcgatgggtccatatccgatggcattcgatgttcttattttatattatgcttataaagtatccatctttacgcgagacttgtaaaatccgtgtccttggaatattttaaggcatatatgaaatataacaaacctggtcattagaaaaagataatattattattgtttggtgcaagctgtttgcggctaaaattatgcaaaatctttttgaaagacctctcttcttaacctcttgtttgttaattaagatgatttctttctaatatacgcaactaataccgtgttgagtgtttgattggattgttagattgttttccaagaaaaatcacatagacaaaattttatccataatttcttcatagaacaaattgagataaactttttgatcaagccaagtatgtaatgttaccaaatatataaataaaaaacgaaattttcatttattcattcgaaatgctacgaggtcttaacacttcctggtcctatctgaatttgtgatgtaaccaactttcctgatgaccacattacattatacattcatatgaaataaatgttacattcatttagttagagaattttaatgctttgttttttgaataaactgaaaagttcatttatgactcacacatcttatgcagttgacgttggtatatctttcacttgatctgaagtacctagtagctgcaagaaaagaaagtaacaaaagacttacacacgcttgcaataaatgtaagatggttagaaaaatgtggccatgtaggcctagtgcattatattattggagcactaataagtcaatatattcttaagaaaatatgcgatgtatttcaatatggtttggtgtggttcatcttcaaatatattatacagacaatatagagattatttgaaaaataattcttcttagggatcaagcatgaagcaatataaaaaaaaaaatggctcttgttgaaaggtaaaccaagcatgagtttctcgagagtttataaatggttagttttaatagtttacacaataacttatttatatcaatgtggattcttgtattagaagagtaaattgttgcttaaaaagctagaaaaaataaatcaattttgtattttgttagtattatgataacaactaacaatgtaatggcttgagtattaatattaagttttatgtgtccagtccaacgggcaagaaatgtaaaagaacccagactctcactttattgggcttataggtccaattaataaaacttaatgggcttatccacacaacgagtttacgaggagactgtgagagtttgttttcacagtcatcatcatctctaagaaacaaacttgtatgacctttaagcagcaaaaaaagaaaaaaccacaaaacttctctgaaaggtggataaatggtgtcgtcgtctctgagactcccttcactcacttcgcttctatttcccgccaccactcgttatccagccactctccggcgaaccgtatgtctacggaacagacctctttccggattcgcgacggcgccgagtggtactgcttcgccggagactaagtcgtcggaggttgaccggcttaggtcagaccgagccgttacgcctcgctcacaggactttaatgcttggtatcttgatgttatagctagtgctgaactcgcggattatggtccggttcgtggtactatggtcattcgtccttatggttacgcgatctgggaagcgattcaggtgaaaaaattgtggattcaaattgattttgaatgttgatgtttcttcgtatcgcctcaattttcgttgtgaattgttgatgcaggattatttgaatgtgaagttcaaagagactggtcatagcaacatgtacttcccacaggtactgtttcaagctgaaattcagaaaattagctttaagctggtttagtttgttaatagaagtagaatttagtatagagttagtataagactgatgaaacacttgtgttcttggttaattatagattaatcataatccaaatttgtttgttggtgaaattcatcttctttcttatgctcttatgtcacattgggatttatagtgatggtttggtcttttgtgcagtttataccatactcgtttattgagaaagaagcttcacacgttgagggatttagtcctgaactagctcttgttactgttggaggaggaaaagaacttgaggagaaacttgtggtaggcatttttctggcgttattatgttttaccacaaagctagaattgtgaaaattctttgcctaaggttttgggtttgattgttgcacttgttgaggttgtggcaggttcggcctactagtgaaaccatagtgaatcatatgtttacccagtggattcacagctatcgtgatcttcctctcatgattaatcaggtctggacagacattcaattgtttatcattctttgtatgaaaaatctggtatttatgactgttcctggttatgtttttcttctttctgcgatttagtgggccaatgtcactagatgggaaatgcggacgaaaccatttattaggactcttgaatttctatggcaagagggtcatactgctcatgccactcctgaggaggcagaaaaggaggtttgttctctatagagctgtggtcaacttgtggagattttttttgtggtactctcctgtgacaaatgattagttttgtattgcaggcgaaacagatgatcgagatctacaccagatttgcttttgagcaaactgcaattcctgttattccaggtcgaaaatcaaagttagagacttttgctggtgctgatataacctatactattgaggctatgatgggagatcggaaggctttgcaggctggtactagccacaatttaggccagaacttttctcgtgcctttggaactcaggtacagaactattattgtctcacaagtatgtcatgcttatcgagacttgaatttgtttggagtttagttctctcatttttttagtgacgatagtattggtgcctactggttcatttagtcacatcttcgttttgcaacttcatcatgaaagaatgttaaatgacgtaatgatgatgccagtttgcagatgagaatggagaaaggcaacatgtgtggcagacatcatgggcagtcagtacacgttttgttggtggcattatcatgactcacggagatgacactggtctcatgcttcctcccaagatagctccaatacaggtttatctttcttaagcagttttctttgctttaatctgaagttcgatttgctagctaaagagaatttgttatggggaaacgggagctgtagtgattatctttaggaagtgatgagagacttgagattgaatcctctcttttctttatttgaaggtagtaattgtacctatttggaaaaaggacactgagaaaacaggagttctcagtgctgcatcatcagtgaaagaagctctccaaactgctggtgttagagttaaacttgatgacacagatcaaagaaccccaggatggaagttcaatttctgggaaatgaaggttcgtaactatcttagaaaaaaacacacactagaatcattttctggagtgaaaagattttcgtgatatttcaagctcttataatttacatttggtttgaacctttggtttgtagggaatccctctaaggattgaaattggtccacgcgatgtatctagtaacagtgtcgtagtctcgaggagggatgtaccaggaaaggcaggaaaagtttttggaatatcaatggagccatcaacattagtggcgtatgtaaaagagaagttggatgagatccaaacatctcttctagagaaggcgttatcattcagagacaggtactctttttgtttatctttctcccacaaacttactcaataaatggtattaattagcacatgctcaaattttgatattgtgcagtaacattgtggatgtaaactcatacgctgagctcaaagacgcaatttcatcagggaaatgggcaagaggtccttggtcagccagtgacgcagatgagcaaagagtaaaagaagaaaccggagcaaccattcgttgtttcccgtttgaacaaactcaagggaccaaaacatgcctaatgactggaaatccagcagaagaagttgcaatctttgccaagtcatattaaactaggtcgttacactttcacacattcccaatcatatcaaattctctttattaaaaaggtccaaaagtgacattagtttctatttccgtggctattggagtggaataattgtagtcctttggtcatggatcctctctggtagtacagaattaaatgctactttggtcggagattccaattcatattttgttttgttacgcaagtgcaatataatacgttgacttttcatttattgttattgtctttgtctttgatagtttaatgtgaaaaaataacaaaaatatcattttgctatcgacttcgttaattatgacgtaaatgttgttttaggtattcaaaagcaagagatgacataaatcggtaatgccgactcataattttatcaaagtttcatgcctatatatgcaaatctgccgtatgcttcactgatgtttatcttaattttcataaactttgataaaattatgatcaacaagttgagtgtagagtgcccaagagttcaacaagttgactaaaatttgatagtcggtgagcacataaatctccttgatgccgtaagaatgcgcttgagacagagtgcccatagttgtccaagctcctgcttttagtgcaatgttgacatgactagatgagtgcgtgttattgaaccgccaatttcatggataggagtagtagtcgttacctccgtattaacacggaaaatccaacccaaccaaacccgccattagagagccattccaacatggtaccctggattgaagtcgggttacacttcgaaggtttcaaaattgtcaacaaaaagatggtggttttcaattattgttattgtatttttgaaagttaatatgaaaatatgatgaaaaacttgtataatgtcaaaaatattgtaataaccaagcgttaatagctcaattggtaaaatatttcaggtctatggttcgagtgatacttaggaacaaaccatattaaatgttttgatcttgagcatgagaggaggttacatttaattatatagtcgacttttatttatttaattttattaagattacggtaacatttgtaattggtatttaatagtaaatttttataatttttgtgtttatcaaaatcaaaatcaaaatcacggtaacatttgtttttggtatatgttaagttattttataatctttgtacctatcaaaatctcggtaacatttgtatttagtatttgacagttaccttttataatatgtgtatctatcaaaatcacgttaacatttgtaattggtatttgataatttttattaatcatctttgtgtctatcaaaatcacggtaacatttgtatttggtattttgataagtattttttataatctttgtatctatcaaaatcacggtaacatatgtaattggtacttgataattaatttttatcatctttgtatctatcaaaatcatggtaacattagtattagacttttaaatatgatacattcttatttgactataaaatatgtttactccattaatatttagatatacatttgaaatcataattggtaagaaaaagttgtttacctttttaccagtaagtttattgcaacatgtcattaaaacatagtccattcaaattctaattcataattttaaggtttgaacatgaataacatttcaacctatgaaagtttagaaatcatttgataaacttttatattcattatagcaatttaattcttgaaaattggtaatcttagattcctttgactaatcaaaaacttggtaatgttgagatatatataagtgatcaatctagtgagggggtggccatacataggtgtattagtgcttatgagttggtaagaaatatagtctcaagaaatctcttcttctcttctttagtctccgcatgattattatctcgacataatcatgtaaaagatttatgatttaatataaaactattacatagatgatttgttttaatatatattttttctaaatattctagataccggaactttcgagaaagagataatatcacaaaaaaacagcaaatagtaaggtaaaattttcattattcttatttaaacattttttttaataacatatggattcacccaaatgttataatatccatggatatagatatccatattatataagatttatgaaagtatatctttgtatttaattttttttatataagtcacataatatgagaacaatattttctaaaactatacaaaatagattatataaatcttgaaaaagaccatgtattttgatttaaagattaagatctctggatgttcatcttcatatttatttttgtattatatatttatattgtaattagtttttgttatttataatatcaacaaattcagatccggataattgtttctcgaggtaattcgaatcggaacatctcgaaattttaaagtatctagttctgtgtcgactttattgtattatatcattatttacacacaggaaataagttctaagcatatgatattttcagtagcaaaactttttcttatataagctattaaatattttttttcataaaatatactttcagtttttagaaaatttataattggtaaaaatttatttacaaagagcgggagccaggaaaaaagaattgttattatttcaagtgtaattttcttaaacgttgacattttttttgattatatactatacattgatcaaaatacacacgtgcaaaattttaatctaatcattaataaatttgatcttttttattttaccgttacgtttgaaattataatataacgatgattattattttctatatatcaaaccaaaaatagctatttatacaatccaaatctttttctttttttaatcacacaaatcattaacatttgatgaagttgtttctttttcaatctccatcaagatcattaaaaatatcattttacaataaaaaaaaattaggggttaaaacataaataaaacagaaagtataggggacaaataacacaaaaacaccaccacgtccgccaccaaaagttttaactttcacacgaagctagccatgtcactctctgctcttcttgaccattgactttttttagagatacagagatatgtcttactatttaatttcctcattttgcaaaatggtaagaacgaaaaagaataccgtcattgagggtaaaaccgtaaatattaggatacaaacgagggcaatttaggtataaaagaggatgataaatacgtggtaataggtcaccaccaccaagctcttcttatgttcatcccaaaaaagctttaataaaaaaataatcgtttctctatgaagaagaagacgacgacggaagaggaagacctagcatcgccgacgatttatttttgaattttcttagtctaagatatctccggcgaggagacgtagattcatcgatctaatattcatcgatctcgttcttgtggctttttaaatcgcccagacttttaagagacgctggatttgatatccgagaagagccgtttgataaatacgtaatcgattcgagcggtggatagtgaaattacggcggaggagttgaatcggatctcggtggtggtgtgtttctgtatttgagtgaggaggaaggagaaatataaaaagtaggtggagactcaggtatatgaaaaccctaagttctttgattactactgctctttgtttattggttcaatcaaggagagatctgttttgcttatggacgtcaatggaagatcccttaggctgcgatacgcttcgaatattcttttcgccatggaagatcccttaggtttctgcaattttcttgggagatctcttaatcatgagaacgatttctttttaactcatcttcctcaggaacttagtggacatgagtctagcctttacccttctgatttggctcatctatatgatagaattaggacacgatgatactctgattttgggcaagtttaatggatcttggcttcacgcggccattcaagtttttccagaatcttcgatttggccaagggcagtgatctgaagtcagatttaatcggactagaaacatgaataaatacttgttttgtatgcttttaatgtcaaaactctggaggtttttttcagacttatagcgcaatctgtcttaaggtaaaggctcatagagtctttaacttgactgtctagctatgaagtttttttgcctgcagtgactctattattgtatactagaagtaggcaatagctcttgcttatgttttttttttaatatggtttactaatgaaaggttattgcttgcaggtgaggtaagcgttcataaaacaaaaatcaagttttgtgggagtgcattgaagcatgacaagcaataaaggtgctatcatccctccagagcttccttggaaaccggtggctaaaggtagcagaagttcaacaaggcgtggcaagaaactagttaaacgagttgcagcttcagatattgagtcagaagacaagagttcaacacacacactagtagcaggagaatcaaagcgtccaaaggttcctcttttactttttgtgctttctttcttgattttgttaggaaatttctggtctcttgattttagtttttattctttctatttattgcagcttggcgtttctgttctaggtcagcatttcgttgaaagagtagagcatgttccgattaagaaacggatatttgtggttagctctccatcaccatcaccatcatcatcaaagaggtcatctgctcaacgtgaaggctcagaacataaggcacagatcaaccatgttttacctgtttcgagattaaaccctaatttggtctcagacgtccgtgatgaaaagcctgattacagtgttcatgacttttctggtatcaagatacttgctgatgctgcttgcagtactgatgtgagtaatgattttgcaccagctgtagaccgtctgcctgctgaagaatttgctgttcagctacaagatacctcaaccatatcaactcatgttgaaggtaacgattcatcagctggaactgctgatgtctcgcatactgcggttgattccggtgatcagagtggccaaggaaagagcaatattgtagcgcctcagaaacatcctctaacaaatttgtgcaatgagttggctgatgagcagagtgtagagcacagcagagtaacctctggagggattatagcacctaaaaaaacctgcattgctctttcaaatgaatcctcaacagaaagaccaaaggataatgtagaagcaagtgaaagtgaacctttagcacctgatagtggagctgtaacggtgtcagagaaattatcagccgatgagccaactgaaaaaaacaatgaaggccttaaagatgttaaatttctctgggatttaaatattccttgtgatgtagaagatgaagcgtctcgaagagatgaagagggagaaatcacagagtctattgcccctaaagggagcgaaccttttgatggaagtaaacacagtatggatggggtaattgcatcagatgaacatacaaaattttcatcaccatctaagcctaatgatgaagcagctgctacaaatgacaaggattgccaatctggttatgactcccagtttgaggatggagagttgagggaaccatacccttgggaagaaaatgaagaggttgaacagttggattacggttctgagccagaggatgagagattctactctatgggttctgagaagggaatcttgacagatgagaatttcagtcatgttaagtgtgaatctggtgatgcactgagagttgggcaggctaatgaaggaagtgacatagagaagcaagctgttgtaaacatgagcgattcacatcctaagaagggctcttcttctccttcaaggagttttggttcaaaaccatacaaggaggtgccttcacatgatgcaatccagaggagaaggcaagtttgctttccctgagcctttttttttggtcaaacgcttattaataatttgttagtaactgagtcatggttctttatgattcaggcctgatacttatgaagaggtgagcacgggtccagataggtttgctcggagagacgacaggtcagggatgcgtatgcgtaatcggagtcctcaaagagggtattttagtggttgggattccaaacgacgcttctcccctcctaattacaaagatggttcttatggttccgggcgtccatggcataaaagaatggcagatgatcgaggtatgatgaacggctttgatgagtcagggtcaggacaaggaccaggaccagaaccagaaccagagggttatgttcgtaggcaattctcaaatggtggatacagaggtcggtttaagagattcccagatggtggggatcgtaaattcaggggcccatacactgatacaaaccaattttctggtcggatgcacaaccggatgagtggtaataggagagagagaggtggctctccggttgtcaggagattgcaccacccgcaatcagagtcaagatccagaagccgttctccagtcttgtggaatggccgtaacagatcacctcctcctcctccaggtgggtttagagcagacgagaggatgacggaaagagtgaggctgcctttccagaaacggtttcctgcagatcaggagatgggttatatgtcacctccgagaaacagaatgtcgtcgccgaggttctttgaagggaggaataatggtgctggagagaattataatagcttcagagaaaggaagttccggcctggacagagattttatgtcggaaattccatgagaagacc
